United States Patent Application Publication US 2024/0093182 A1 - sequence listing, part 13

SEQ ID NO: 27164 - DNA, 883 bp, Artificial sequence
  DNA replication origin
gttctcggcccggagctgcgccacctcccgcgtgaggcacggcccctccgcctggcagctgtagggcgcgttcagctgctcgtccctcaggcgctcgacctccgaccacagccagcggatgtcctcctcctgccgctccaggcgcgacgccacggcctccgccgccagggcctcggccgccatcgcggcctccctcaggcaccgacgccgagcggggtgcccgcgactgcggcgagggcgacgcggacactcagcgcacggcagaagacagggctcccgggaggggcggggcgatggggcggggacggagccatggggcctcgttggagccgaggcctacacgttgcaggggcggggcgctgggcggggaggggcggggcctaggccagataccctgcaggggcggggcggggcggggcggggcctgaggccagataccctgcaggggcggggcggggcggggcctgaggccaggcccaccttagggtcacgggcagtggggaaatggggtctgaagggcctcccctgcctttcgaggcctgtctagaggctattggcagtagtttttagtccgttgaaacgaaaatcttccaaaaccttgcaaaaaggccatcgtctgcgttctccaaaaaggcttcaccctttcttcctcttgaattctggcagtcaccattcttttgccttgcaaacaggttctaaaaagtggccattcattataaatggactttctggcctttcgtgccaaacttgcccaagtactgaggcctctgggccagggcatatagaaaatcgctgtgaaatctaaatccgaccagcacgaaattactggctccttgagtctagggcaaatgccacatatatctttgtatccctcttaaccatg

SEQ ID NO: 27165 - DNA, 1430 bp, Artificial sequence
  DNA replication origin
ttggccgccgtcgccacgcaccgaggtgggagcccgcggcggccggagccctcttgggacccatggtcgccctcagtcagcgggactgctcccgggaccgcgacggggcggggcggggcgctccagcgtcgtttgagcccaggcgcggaagggaaaaggcctctgagatgctcgcgttttttgcctgggcgcggtggcgcacgcctgtaatcccagcactttgggaggccgaggcgggcggatctcctgaggtcaggagttcgagaccagcgtggccaacatggtcaaaccgcgtttctactaaaaactacaaaaattagccgggcgtggtggcaggcgccttaatcccagctacttgggaggcagaggcaggagaatcgtttgaacccgggaggcggaggttgcagtgagcccagattaagccattgcactcaaacctgggggacaagagcgagacttctctcaaaaaaaaaaaaaagtttttttttcttttcttttttttttttgagacagtctcattgtcgcccaggctggagtgcagtggtgggatctcggctcactgcagcctatgtctcttgacagtccacgggttaaagcgattctcctgcctcagcctccccagtagctggattacaggccccgccaccaaggctggtgaacttttgtgtttttagtagagagggggtttcaccgtgttggccaggctggtctcgaactcctgacctcaaatgacccacctctgcctcccaaagtgctgggattccaggcgtgagccaccgcgccgggacccaaggcccttaagttttaaggcctcattcttcagtcaggttttccctgttcccgcgtgttcggccaattttttgttgttgttttgtttttgtttttgtttttgagtcaattttccagacatctttaattagcaatatgtttaagtagttacaagcctttccttcttttcttgtgacagtttgggttgaatttctatcgtttgcagcctgtcactgtaaggcacaaacatgatcacgcaagatgcgatagtagatttaagccagttgtttttaagtttgtgtttaaggagaaactaacaatgaaaacggcctcgttgacggaggaaaagttggaatgcagcctctggtgctgtttgagcgatccctctccccggggcctggccgcgcgctgctgtgttctggaagggctcattgtacagtcaaggcggcaggtaagagtcccgtacaggtgtctgcccgcttttcctttcaggcttctgtgtgagctgtttttcccctgtaggatgcgtccctgacctccaccccttcaccctacccaatttgtctttacatgtctgaccatcaaggctctcctgggtcatattcagttcatgctgatattttcccttcctcccctctttggtcctcactatttttgctttg

SEQ ID NO: 27166 - DNA, 1098 bp, Artificial sequence
  DNA replication origin
tccccgccgcctcaaccttcgtgggagcgcggatggaaaatgggaaggggcaccgaggcctcggcggggagctgcgcggcggcctcgggggctgctccctttgcgaccgacgccaccgataggaggggcggctcctgtcaagcctcagcttaaaagggcaacagcggccgggcgcgggggctcccgcctgtcatcccagcactttgggaggccgaggcgggcggatcacgaggtcaggagatcgagaccatcccggctaacacggggaaaccccgtctccactaaaaatacaaaaaattagccgggcgcggtggctcacgcctgtaatcctagcactttgggaggccgaggcgggcggatcacgaggtcaggagatcgagaccatcctggctaacacggggaaaccccgtctctactaaaaatacaaaaaatgagccgggcgcggtggcgggcgcctgtggtcccagctactcgggaggctggggcaggagaatggcgcgaacccgggaggcggagcttgcagtgagccgagatcgcgccaccgcactccagcctgggcgacagagcgagactccgtctcaaaaaaaaaaaaaaagaaaaagaaaaaggacaacagcaccaccgtccccgctaccgcctgggaaagggctgccccaaccctgccaccttccctgtcacccctcaacccggcgcgcacccgttttggcggttgcacgagtccagagcgtgcgcgcgctcccggctgccccctcctccccttgacccagcacctttctgcccgacccatctagtccctacattcctcacactcgcctactggaggctcagggcggcacaaccaccaactgtagtgtgtgtgtttctcccgagtgtgtgtgtgtgtgtctcccaagggaacagagcactgctgagttcaggttgattattaggtcgtggactgtcagcaaaatgcagtcacaagaaggctgtgggctgttttgtgttttgcggtgacatcatgttgctcatgttttatgtttttcagagttcattagtttctatttgttctcagttaatatccacctcaatagattgcataagtagaatacccccaaactg

SEQ ID NO: 27167 - DNA, 828 bp, Artificial sequence
  DNA replication origin
ggccacacagaggcctgcacagcacccccatgcttggtggggggtgggagggatggaggggctggctgtccacaggctgggcatgacagggaggctcactggaggtggcgcactttggaggagcaatgtcaggggacagctttctcttgttgggccacaagactccaaaaggacagcagggtgactgattcccagcgctagagacgaggcggtcggccaggtgttgctgcatgtgtgtgtgtatatgtatatatatatatatatatatatatatatgtatttatagatatttatagagcaggacgggacatatcacaaagggggcacaagttttcagcagtggtcacacctggatgtgtcagctcaccactacaacagactaagtcgcagatgtagggggctggctttggggctgggggagccactgtcaagtcacagaacagccgctcaggcaggcttggaaagggaggtcactgagaagaggagggatctgtttagacgttgaaggaggggctggggctctgaggatgggatggtcttgccggacccaatcagctggcagttggagagaaagcagagagaagcaggagagagaaaagcaagcagagagaagcaggagagagaaaagtgagcagagagctgatgaggcaagtgcagagcacaggcatgccacagcagctgtgggagggcaggggtggggagggcacaggtgcgggtatggcgaggctcctgggaaagtggggctggaaaggaaaggagaggaagaaggagggaggcagagcttcacagttagtgcctgggggttgcagcggccctccccaccccaca

SEQ ID NO: 27168 - DNA, 879 bp, Artificial sequence
  DNA replication origin
ggacgcctcctcacctgcgagccgccctcccggaagctcccgccgccgcttccgctctgccggagccgctgggtcctagccccgccgcccacagtccgcccgcgcctccgggtcctaacgccgccgctcgccctccgctgcgccctccccgagcgcggctccaggaccccgtcgacccggagcgctgtcctcgtggaccgagtcgcgggcctgggcacggaactcacgctcactcccagctcccgacgtgcacacggctcccatccgttgtcttccgagcgtcaggccgcccctacccgtgctttctgctctgcagaccctcttcctagacctccgtcctttgtcccatcgctgccttcccctcaagctcagggccaagctgtccgccaacctcggctcctccgggcagccctcgcccggggtgcgccccggggcaggacccccagcccacgcccagggcccgcccctgccctccagccctacgccttgacccgctttcctgcgtctctcagcctacctgaccttgtctttacctctgtgggcagctcccttgtgatctgcttagttcccacccccctttaagaattcaatagagaagccagacgcaaaactacagatatcgtatgagtccagttttgtgaagtgcctagaatagtcaaaattcacagagacagaagcagtggtcgccaggaatggggaagcaaggcggagttgggcagctcgtgttcaatgggtagagtttcaggctggggtgatggaagggtgctggaaatgagtggtagtgatggcggcacaacagtgtgaatctacttaatcccactgaactgtatgctgaaaaatggtttagacggtgaattttaggttatgtatgttttacca

SEQ ID NO: 27169 - DNA, 1188 bp, Artificial sequence
  DNA replication origin
taaaatgatgtcctcagggcctggttttgctttccttccatgtcagtttgcttctttgggtctggctgcattcccagacaggccatgctctcgtggtagcaaggtgacatgacacagggtcaggtccagcaggaaagaatgctgtcctgtgtccccacttcctccagaagccacactcacccatcccacctggcttggtcctcatgtctatcccagaatccattaatggggccaggggactatgacacaccacttggcttagactgaggagctctgtgggcagccccacctgaagctctgggactaagcctgcgagagagatggattccccaagggaaatggggccattgcttgagtaaaaaggaaatagttgctgaagaggaaaaccacgtgcttactccacatagggcagactcctggaagaggggggcagggtagggaggtggatatgcaggttgccctggcagggtctggaaatgggggctgcaggcttggagggaggcctcagtgtggcttggaacgtggtgtatggtggtctgccgcgaaggccggcctgcacaggggtgggaggggggtgcttctgcatgggaagcacagacagcgctgcctctcccttgcactcagctctcggggcatgagaggctgactttccgtgagcctgtgggccaggcctctttgaatggggctgagggagctttgccctggttcctttgtgtccccacggtgccacgggaggctccctggcagggtgtggggcaaggcagtgagtgaagagttgggatgagtgagttagggcccacggattactcaagacaggacttcaagttgattcaggcgtgttagggagctgtgattggattttgagcagggcagggatgggacagaagagtttggggaaggttcctcaggcatccgtcacggaagggacaagaagggagagagagtggatgccagggacacccagaagctgttattgtagtcaggatacgacaggggtgaggctacagacaggggacttgcaagcagggagggcagggtgagacattcagaggaaacgacaacaggaaatggtgacagatagggaacgaggatgaagggaagggagagccagtgacgactggcagtggagtggggagcaccgccacctctcctcctccacttgcccctcctgtggcactggacaagcta

SEQ ID NO: 27170 - DNA, 1083 bp, Artificial sequence
  DNA replication origin
aggggttttgtgccacttctggatgctagggttacactgggagatacagcagtgaagctgaaatgaaaaatgtgttgctgtagtttgttattagaccccttctttccattggtttaattaggaatggggaacccagagcctcacttgttcaggctccctctgccctagaagtgagaagtccagagctctacagtttgaaagccactattttatgaaccaagtagaacaagatatttgaaatggaaactattcaaaaaattgagaatttctgaccacttaacaaacccacagaaaatccacccgagtgcactgagcacgccagaaatcaggtggcctcaaagagctgctcccacctgaaggagacgcgctgctgctgctgtcgtcctgcctggcgccttggcctacaggggccgcggttgagggtgggagtgggggtgcactggccagcacctcaggagctgggggtggtggtgggggcggtgggggtggtgttagtaccccatcttgtaggtctgaaacacaaagtgtggggtgtctaggaaagaaggtgtgtgaccagggaggtccccggcccagctcccatcccagaacccagctcacctaccttgagaggctcggctacctcagtgtggaaggtgggcagttctggaatggtgccaggggcagagggggcaatgccggggcccaggtcagcaatgtacatgaggtcgttggtaatgccgggcaggtcaggcaggtaggatggaacatcaatctcaggcacctggcccaggtctggcacatagaagtagttctctgggacctgcaagattaggcagggacatgtgagaggtgacagggacctgcaggggcagccaacaagaccttgtgtgcacctcccatgggtggaataaggggcccaacagccttgactggagaggagctctggcaaggccctgggtcactgcacctgtctccacctctgtcccacccctcccacctgctgttccagctgctctctcttgctgatggacaagggggcatcaaacagcttctcctctgtctctgcccccagcatcacatgggtctttgttacagcaccag

SEQ ID NO: 27171 - DNA, 919 bp, Artificial sequence
  DNA replication origin
tccaccctggtccagaagagggttctcaacttgccaggggagagcagggaaggggggtctgaggcagaggctgaagataagggcagcttggtcccgaccagacccagagtcaccgagatcaagagccggaggtcctagtctcctgcctctggaggagcttggtttgttcatttgttcacacgttatatgaaaggtcagttggggcatctggtgtacacaggaccctcttctcaccctggccgatgccttagagaacaagatggacaaggaccctccttaaataaaccgtcacgcctcatgcaccacatgtcaggttacaagagggagtgcaggggccatgtcaggccgaggatgtgaggaagagggtgtggggagaggggtgttgggtggggctaagtgggagggtgcttcgcttctccttggagcaaaggaaagtgtaaaactgtgtgacacaacctagtttatgttttgaggaatagattgctgggacaaggggacatgggggacctgctggaggccaatgggggccagtgaggtgcccacagggagacgatttggcatgagccagtgaaagaagtggagatagagaaaagtggagagaattgcagggtctcatgaggggaaatagaagggacatgtgggtggatgagatatgagtggtgaaccctgaggtggggaaatggggcacagccttgcggggaggttggcgaggtctatttgcacctgttgggttggagccccaggtgacatccttgtgggagggtcagtggatccttggcagcaagtctggtgctcagggagacactgggtggggtgggagccacagaccttctgctgatggcaaagacagggttcctggaggtgctggctccctctgtgatctgaggacccagctagtaactccccgttctgaacccgc

SEQ ID NO: 27172 - DNA, 1351 bp, Artificial sequence
  DNA replication origin
gtctctgggaaggggtaccttgggatggggacatggtcttgggattgcaccagggggccagtgtctggatgggagagcattccaggcaggacctctaggtgctgtggggtgggagtggtggccatagagctgtccaggggcccgtgaggagtcaggagcagcagtcacgctgtctttgcaaggcctctgtgcctctgggtgagctaggagcccccatggtcctgactccagcatctcctcccctcctccagatcatagaccccctggcccgtggccgtgccttccgtgtggcagatgacactgcggaaggcctgagtgccccacacactcccgtcacgccgggtgctgcctccctctgctccttctccagctcccgctcaggtttccaccggctcccgcggcggcgcaagcgagagtcggtggccaagatgagcttccgggcggccgcagcgctgatgaaagtgggtgcaggggccaaaggcggggttgggggccgacccagcagccgggtctcatgctcacttccccgtccccagggccgctccgttagggatggcacctttcgccgggcacagcgtcgaagcttcactccagctagctttctggaggaggacacaactgatttccccgatgagctggacacatccttctttgcccgggtaagaagtgcccggggtgtccccccaccccacgttcccttcctgcctgtgtccaccctgacctcatgtgtttgctcaggaaggtatcctccatgaagagctgtccacatacccggatgaagttttcgagtccccatcggaggcagcgctaaaggactgggagaaggcaccggagcaggcggacctcaccggcggggccctggaccgcagcgagcttgagcgcagccacctgatgctgtgagtgcggcaggcagggaagaggggcagagagagaccccggggcccgtcaggaacagctgggcgagtatcggcattcacctctgtgggcgatggaaggggtagcctcagggactgggaactcactactcactgggccaccaggggtgggagacgcagagctgggcatggccccagtctcatggcttgcctgtggaatgggacagcaatcttagaacccaggggctgggcagaatccaacggggaggcggaggtgacagaggtgatacttgctgagttgcagaagtcagtgtgtccccgttccagctccctgccatccccggaggcccgcagtgttgcttttttactggcaaggagaaggcagatgccgggcgacttgcgcagtatattcgccaggatagagacagggtgccctggtgccccccggggagggactgcagcagtttgcggggctg

SEQ ID NO: 27173 - DNA, 930 bp, Artificial sequence
  DNA replication origin
aaacttggagttggctaacagttcagggggtggctggaacccactcatcctcttattagaccttgcccactcagaccctggtccctggagtgactacaggcctgggggcagcatgctgccccggaggagggcctttgaagtcccctgcctgggaggggcgatctggccgccccttgctgagtccctgccatgccagggggaccgccgactggtttggagtgagcaaggacagtgacagcacccagaaatggcagcgcaagagcatccgtcactgcagccagcgctacgggaagctgaagccccaggtcctccgggagctggacctgcccagccaggacaacgtgtcgctgaccagcaccgagacgccacccccactctacgtggggccatgccagctgggcatgcagaaggtatgcctgcctgttgctgcctcctgcaggcccctccttccgctctcaggggctggggctgcggacacagccagcctgagcagaagggactctctgggagctcacagtctggaagggcagtcagacagcctgctcgtgaaggcacctgaaacagtctctgggaaggggtaccttgggatggggacatggtcttgggattgcaccagggggccagtgtctggatgggagagcattccaggcaggacctctaggtgctgtggggtgggagtggtggccatagagctgtccaggggcccgtgaggagtcaggagcagcagtcacgctgtctttgcaaggcctctgtgcctctgggtgagctaggagcccccatggtcctgactccagcatctcctcccctcctccagatcatagaccccctggcccgtggccgtgccttccgtgtggcagatgacactgcggaaggcctgagtgccccacacactcccgtcacgccgggtgctgcctccctctgctccttctc

SEQ ID NO: 27174 - DNA, 1154 bp, Artificial sequence
  DNA replication origin
tccgcagccccagcccctgagagcggaaggaggggcctgcaggaggcagcaacaggcaggcataccttctgcatgcccagctggcatggccccacgtagagtgggggtggcgtctcggtgctggtcagcgacacgttgtcctggctgggcaggtccagctcccggaggacctggggcttcagcttcccgtagcgctggctgcagtgacggatgctcttgcgctgccatttctgggtgctgtcactgtccttgctcactccaaaccagtcggcggtccccctggcatggcagggactcagcaaggggcggccagatcgcccctcccaggcaggggacttcaaaggccctcctccggggcagcatgctgcccccaggcctgtagtcactccagggaccagggtctgagtgggcaaggtctaataagaggatgagtgggttccagccaccccctgaactgttagccaactccaagtttccactagaccgcagctggccttgcccggttgagtgcttcatagaggccctcaccccaccatccctgaggggcagttgaggggaggcactgagtccagagaaggagctgagagctcaacccgagagagcttggccccaggacaccacagagctcagacagcaggtgcttacgggcccaggcaggctgtccacagcacttggacatgcaaacaaaaacactgccagcacctgccgttaggagccccagggaatgccaaccacactggcagctcccaagaggtcacatgccaagcacatgccagaaaacaccaacacactcatgacctgtatgagatacctgagcagggaccaagagagagactggcgctgtgggaaggccctgcgggcagcccggggacccaagaggggcagagtgtggacacgcccgaagcgtacttgtcggctgctaagaggcaagagcatccgggcggtggagacagagaaggagagagtgagtgctgaagagaagggagtggagcagggtagtggggtgagagcggtcagtatccagaacaggaggagggcaaggggatggtggggaccgagatggaggaggaagctgaaacaagagggcccttgttctcatttccatcctctgtgtacctgcctctgccccaccagcccccagctcccaccccatg

SEQ ID NO: 27175 - DNA, 1221 bp, Artificial sequence
  DNA replication origin
ctccggccgggcccgcccccgggcgcacgcccctcgctccagggcattcccgggcgggccggaccggcgggcgggcggggactcggcgcgggccctcccggccagcggcggcagcctcctccccggcgccctcaggaccccccagagcccccggcggcggcagtgagtgagcgcggccgggagcgcagggctccgggggcgggcgggttccggggctgcgtccggagggcggggcgagtcctcagcacccggggccggagctgctcagagcggccggggccgtgtcggggccggggccggggccggggaggggtcgcggcgaggcccccccggggcggccgggcttttcttcctggagtttcccgagtcgcccgcggaggcggcccagccccggattcctagcccggcgcgccgcaaaaatagcccgtggccggattagcagccccagcggcctggccgggcgggacagctcggctccagcccccgcccaacagctgagggtcccaggagcgggagtctagagtccgggggtgccccaggttcctctgaactccccccgctgcattttccttcccggccacgaccggcgggtggtgtctccgagctgaaactccagcccagggcgggatggtccctgtcccggctgccctcaccgatgggaatagcaggagccgtggagctgggggtgggggactgactccgccttctgccccacgacactgactcccccatctgtacacttcgaagctccagggtgggctgggagcgactcccgaagacagactctcactctgtgcgcagaggccaacggggacaggccttctcccggctggggtgacagccagaccccagatgctcagggcattggcagagggcctggttgtctgtcatgctgggggcatgtttgtggggctgggcggggaatgggcaggggatcttccctggccccccagggcctgcttccgaccgaggtggtcctgaccagagtttcttctgtgtgtgccgcttgagatggtgaatgtgtgtgtctgtcccggtgggtggggcctaggtctggaggcccttctcctatcctgggaactcccacccgccaacgggacttcctgttggagaccgggagaagattcaaggatgaaactggcttttcaggtttgacccagctagatgcctgggcagtcccaggctcggttctcctcacccctgtggagctaaccccaacct

SEQ ID NO: 27176 - DNA, 960 bp, Artificial sequence
  DNA replication origin
ccagacccagaggatggcactgaagcagcagcaccttgtgaccagcacagggcctgaagacacatttgtccgaggcatgggggggcaccctgtagaggggtccttagggacccatgggacgaagggatccctgcaccctctatccagaggaagccttggccacccaccactcagagctcctggacagccctgcccgtactctgctgttggcacccctgtcccccaccctgggagggtcagcccacccagtgtcaggagagaaatgctgggaaactctcaccagcagccccagcggaaagcagagtgccattttgagtccagcccagattgtgcagggatatgagcccaccccggggtggccgctgagctctgagacagtgagaagagcccagagtggacaccagacactgcgctgcctctgctgagtggcttcgggtggggccggtgcagcctggcctgagtgcctgctggtggagcggggcttctgggggtaggggcacagggcagggggaggggtaatgactgtggtcctgaactgagtgtgtgcatcggtgtgtacacgtgtgtgtgtgcacgtgtatgtacccatgaaagatgtacatgagtaggtgggtgcatgtgagcacgtgcatgtgcaggcgaatgaacgcatgaagtggaaggatgtggggacgtgtgtgtatgattgtgagtgatcggtgcacatgaatgtgtgtgagggaatgtgagtgcttagtgggattgggtgagtgtgggatacaggacttgtcagcgtgggcctctggaggaggtcgggtttaggggagccagggatacacacccatcctccgccctttaccccgtgcctgctctccctcctcaccctcttctcagcacaaatcagggcaggacagctcaagcctcaatctggagccagggagaggcggagccgcccagcgctgacactgcggtccgctccca

SEQ ID NO: 27177 - DNA, 1093 bp, Artificial sequence
  DNA replication origin
ggatgtatacgtgcaggcttgggctcagaggcctgacactgagcacacgtgtatcgacccccctctgatcatccttctgatgacctcactcaggaggccagggtgggctgagagcctggggattcctggacacaggctctgagctggggatttgcctgcagaggcagactggggcatgctccccactgaaggtgactcctgggtgcggggggtttcagctctgagccagctgtgactggtgctcctggcagctggcgatgagtgtctgggtcttggagcgggtctaggtggggtctgacagagtccactgcaggaggagacctgctgacaccagatgcccagctgtggcatgctttggaggcaagcccagtccccagctttccagagaggacaccacttctggccctgccagcctagtctgggcatccaggcccgatagggcttgcttatccctggcaggtcaataatgctaagcatggagactgtcctgtctctggctgtgagcctggcatgggaggggtggcacgtgcaggctatcggagcactgagtgttggcactggggcaggctccctctcacccggtgtccgtgatgcactggcagtcatcccctggtggagttaccctccaccccctccaaagcttccattgtctccttctacatgagaattgtgttgatattgcttgtgttcagagagcacccattatgtgcaggcaccgccctatcccgtggcatggacaaggatatgggcaggggaatcttgcccaggctctgggatctaccggtaagtgtaccagcacctttagttcaaattctccccttttctgtctagccaaggagcaggccattgtctgcgtcgggccctcaagtgcaacagctcagtttggagagggctggtgccacccagacccagaggatggcactgaagcagcagcaccttgtgaccagcacagggcctgaagacacatttgtccgaggcatgggggggcaccctgtagaggggtccttagggacccatgggacgaagggatccctgcaccctctatccagaggaagccttggccacccaccactcagagctcctggacagccct

SEQ ID NO: 27178 - DNA, 1844 bp, Artificial sequence
  DNA replication origin
ggctttgaaaggagtgaaggctagtattggtgctggggtgagcagccctgacccccgacctccacaataggccacaggctgtggaggggctggagctgcctccagctgtaggaggtgtggccatcagtcgctggagcctttataaacaagtctttgagagatgtggctgtattggctacaggggccagggttctagtatcagccttatgaccccagggtgcccagcacactggctccgtcttctctctgatggaggggggtgctgacagctgttgaggtgggtgtcaggtcagagcccatggactcctctacacagctttgagctggcagcttcccagcagggtggctgctggcctcttgactggtctctgcggccatctgtgtctgatgagccctggagggccaaagcttccttgggcagagaaggcagccactgggcaggccgaggttgggtgtgtgtgagctacatcctccctgcctggggctgtgctgccaggccctgggcccaggtgcttatgggaaccccttgccaaaccctgggatatggggagggggcagctgcctcagaaatagcctatgacttcaggccactggctggcctggcccccttctgcctcttccccaaatagccaggagctggtcatgggcccatccctggagccctgctccccgggcggtttcttctgatccttccagggactccccaaagcccagggtctgaccccttgggtgattacttgtggcctagaagctgagctgaggattctggggtagcagaggattctggggtagctgttgggaacactcctcttactggtcagggctcccattccctcgtgtcctggtgtgagggccacaaaccctgggtttggtctagaccctaaccctaacccattctcagacgcctgcccaccagccccgggagtgctgggcaactgcagctgatttccatttctccagggtgcatgacgcgggaagagaggggccgggagctgggtttccgtatagggggctcctccaccaggacagagagtagtagggcaggcaggaggcagagcacacatatgtgcacacacttgtctatgtggactgggtacaatcctgagtttcgtgcgcgtccgtgtgaagagaccaccaagcaggctttgtgtgagcaacaaggctgtttatttcacctgggtgcaggcgggctgagtccgaagaaaagagagtcagggaagggagatggggtgggaccgttttatagggtttgggcgggcagtggaaaattacagtcaaagggggttgttctgtggcggggaggagtgggggtcacaaggtgcctcagtgggggagcttctgagccaggagaaggaatttcacaaggtaatgtcatcagttaaggcaggaaccggccattttcacttcttttgtgattcttcacttgcttcatctggatgtatacgtgcaggcttgggctcagaggcctgacactgagcacacgtgtatcgacccccctctgatcatccttctgatgacctcactcaggaggccagggtgggctgagagcctggggattcctggacacaggctctgagctggggatttgcctgcagaggcagactggggcatgctccccactgaaggtgactcctgggtgcggggggtttcagctctgagccagctgtgactggtgctcctggcagctggcgatgagtgtctgggtcttggagcgggtctaggtggggtctgacagagtccactgcaggaggagacctgctgacaccagatgcccagctgtggcatgctttggaggcaagcccagtccccagctttccagagaggacaccacttctggccctgcc

SEQ ID NO: 27179 - DNA, 1583 bp, Artificial sequence
  DNA replication origin
gggacggaagccgggagaaggggggcagtgagcgccgggaactggctgcgcccccggggcggggcgggccacgtggaggtggatcctcttcccagcgcccaccgccaggtccggaccgattcccgggcccgatgcggtgcctgcgaggcgagagcggggaaggggcacctgggggtggggcgagccccgcactgtgccccggcgcccctcccaatgagctgtccgcccccgcctgcgccctggtcgcctggcggccccagagcccactccaccagccggtggtcagaccaccgagaggacgggcccgtcgtgaacctgagtggatcctcgaggggcccgggcggagtggtcgtgctttgggggagggggcgggccgcagacgtgttttccggtggggtgccagcggagtgagcgcctgggaggccgccccagccctggtccggagtgggccggggagtccttatccaggaagtggacgccaggcttgtgcggaggcccccgcccctggccggggttgtcacaggctggtcgggggaaggaaggagggagcggcgcggattctgcctctgcagcagagcccccatccctctttccgcccagggatgctgaagggagctcgcccacgttctgggttgggcctgctggagcgcaggcagcctcctctagaggccgaggccagaccagggctgaacacggcccggcagtgcgcagccgtcctacgcttctgaggcctccccgacggcccagcgcctgtaagctctcacaacctctcaagtcagatccatgcccctagggaggggcagggacggtgcttggcccagtggacggaagggcctaggggacgggccctgagggagctgggcacactgctggctcccacggcccatggcagccccagcacccagcagagccatcccccgcttctggccacttgaaggtttatctgggtctgcagggcccctccactgtggcaggcacaatcccaccccacaacccacctctgccgcacaaaaaccctcgaggggcttttcctgagctttgacttctgtgaccctggtcctggaaaggagcacctgaaaaggccttgaagagcaactgggcacctggccgcgtcaggtgggagacgctgggcaggacagacgcacaggccatgtgtctggagccctcagatgagtgtgacacctggtcctacagaaaggctaacagggcaggacctggtctccaactgcctctcctcctctgaccagccgtcccacccccatgggccccagccaggacttcctggggagggaggggccatcagccggctggaagccaccagctgtttgtagcactgtgtgccgcttcccggggtgggggcataatgtgtcatcaatccgtgtttataaagcagccctggatgtgattccacaccctccctgcttatctgcagccatgcctcccaaacaatgagtctctccttcctgtgggaacagccccccatccccccgagtgctccccctcagtctagtagggaaactgaggccccagttgagcctttgtcctcttgatgggcagggagaggatgggtgttactttgtact

SEQ ID NO: 27180 - DNA, 1367 bp, Artificial sequence
  DNA replication origin
gccctagatgcccagagccgggggcagacagtggcacccctgctccaccctgggcaagcagcactgacaatctctacattcttcccagatgacctcaggcaactgagatgaagctaagcagggaccagtgtgagcaaagccgctaaatgcatgaggacaaggaggactaactgagggccaatccagcaggcagcggacaggggttcagggacaactgcagtgacaggcacttcaggagggccctcgctgctatgttcacattacctgtcccagaaatgcccgggccagggggactgccggctggtcgaagaactccaaccccagtcgggtaaggtggccctttgggcttgagaaatagatgctgcggtatgggcccggagtggtgggcggtcccaagcagcgctccctggggcaaggtgcctgggctgcatcggacgagctgtgtggctgctctgcaggtgcctgggctgcgtcggacgagctgtgtggctgccctgctctagctggtcgctgcttcttttgccccatccgtcggcaaaactgtaatgggaaaaaaaataaataagcatccgaataggagacagctgtgtggtaaggtcaggctcaggaagtgcaaggactggatctgaccacctgctttggtttcttcatctgcaaagcgggggtgaccatcctgtgggttgttatgaggcacaaacaccctgacacactcgaggcctcaggaaatgatcacgtctgacgatggacggctgctgctgggggcagggtggctgctctgccccacatatgtgcgagctgcacggcatgggggcccaggctgcatgacctggggagcagatgggggcctgagcctgggacagcagggctggtgccctccgattcccactcatcatgcaggtcccaagcaaacgtctgagctggtttctggagccctgccctttcatccaacccttgccagaattcaaaacacaggatcttagcagggccaaggtcggacacacagggaggggtgagcaccggggtgaccaccgcgtgctcagggtccctaactgtcctctgcttcatggcccaggctggataacgagcaagtggggcaaaggcaaggtctcctgagggactaggagggtctgctgagaccgagcaggccgccagcctcccacctctggcctccccatgggtagggggaacctaaccacacatcctcggctgtcctggggcaaaggagaagggaagatgaaggtggcgggtgagcgccggcctggcagcacccggagggctggtctttagcagcacctaagtcctcctggcatgggagagatgcattatttttaacgggagtgctgacgttaatgtagaacggagactgc

SEQ ID NO: 27181 - DNA, 1318 bp, Artificial sequence
  DNA replication origin
tagacaaccagaccgcaggccgaagatacctcaggccacagccaggctgggctgggaaccggcagtcatggattcaccttgcaggtcaagtcctctcagcaggaccctccattccccagattcctcctttcccaagtgcccttgagaaaaccatcagcatttagcacgaggccaggcatcacggaaggcacaggaccccaaggatgtccccacaccagctacctgggcaatcccagagcccgtgaagtcccctaaacctgggctgctgaggtggccacaagggaccctcatactcagctcccaccctccggctttctgagcagtaggcccagctgccccacggtgccccagcctggaccatggtcctggtaacggccaacagttgtgtcactgctcggagccccagagttaacagcagagcactggggaccaaccacatcccctgcacctctcgtttttaggccagataggtcagctggacagccaggctaccttcacctcagcccacgaagccctgtggtgccaaaggccatggtcagtatcacgggctggggaggaggggcactggagcttagatgctcgccgggggagcattcaggagggcttcccggagatagggtggtgggaagaaggggtcagcgcggggagcattcaggagggcttcccggagatagggtggtgggaagaaggggccagcgtggggagcattcaggagggcttcccggaggtagggtggtgggaagaaggggccagcgtggggagcattcaggaggccttcccggaggtagggtggtgggaagaaggggccagcgtggggagcattcaggagggcttcccggagatagggtggtgggaagaaggggtcagcgcggggagcattcaggagggcttcctggaggtagggtggtgggaagaaggggtcagcgcggggagcattcaggaggccttcccggaggtagggtggtgggaagaaggggtcagcgccgggagcattcaggaggccttcccggagatagggtggtgggaagaaggggtcagcgccgggagcattcaggagggcttcccggaggtagggtggtgggaagaaggggtcagtgtggggagcattcaggaggccttcccggagatagggtggtgggaagaaggggtcagtgtggggagcattcaggaggccttcccggagatagggtggtgggaagaaggggtcagtgtggggagcattcaggaggccttcctggagatagggtggtgggaagaaggggtcagtgcctgggcgggaagcccagaaatccttaggcatccagagccatgaggacag

SEQ ID NO: 27182 - DNA, 1065 bp, Artificial sequence
  DNA replication origin
gctggggcacggggggttggagggccggcagagccctgtccgctagcagccaggggaccactaggaggactgaggtggggccagcatttgagcgaggaggtgccacttccaggccaggccagggtttcgggagctctggctacgctgacggggcagggctggttaggttaaaggggtagaaagggccgggtggggccgggcgcggtggctcacgcctgtcatcccagcacttcgggaggccgaggcgggcggatcacctgaggtcaggagttcgacaccagcctggccaacacggtgaaactctgtctctaccaaaaatacaaaaattagctgggtgtggtagtgggctcctgtaatcccagctactagggaggcggaggcaggagaatcgcttgaacccgggaggcggaggttgcagggagccaagatcgcgccattgcactccagcctgggtgacagagcgagactccatctcaaaaaaaaaaaaaaaggaaaggaaaagaaagggttggttggagtggaggcagaaagaaggccgaggacacagtgtcgcctgcccttgacggaggcagcacatgaggatgagaagctgattggagaagaggatgactgcagtgctaagagcagcgtggtcaggttgccaaggatggagcagtgggcacagcagggggacttagggtcggcggaggagtcggtgaggaaagggaggtttggcaggaagtgatcaaaggggtcatgtttttgtcaggatgtgggacttggatgtgttctgtgtgaaggagccagggcacggggctgtggtgatgagggcggccaggctttgactcatttgcaggcggctctgtgggggctcagtgagacaacgaggggcgtgtgccctgcacccacagggatgtagagggtcctgctcctccctactgaggtgggtcagggtgggcagcaggcaccccacctggtgagctggaagcagcgtgggaatcacagaatggacgggaacttaaaggctttgcttggcctggattttatcttgaaatacttttgacagctggctggttgagggtatct

SEQ ID NO: 27183 - DNA, 906 bp, Artificial sequence
  DNA replication origin
cccgcatcccgccgtggggccggggccgggggcggagggggccagaggaggacggagccggaggcggagggggcctgaggaggacggagccggaggcggagggggcctgaggaggacgaggcggggacgcagggggcctgaggagggcaggggtggaggcggagggggcctgaggagggcaggggtggaggcggagggggcctgaggagggcaggggtggaggcggagggggcctgaggagggcaggggtggaggcggagggggcctgagtagggcaggggtggaggcggagggggcctgaggagggcaggggtggaggcggagggggcctgaggaggacaggggtggtggtggacgcggagcagcgccacagttaccaacccacgtgccacgctccgggctcgcgagacttcggcgacaccgtccggaggaggtgctaaggcggcggccgggagaacggcgcaggcgcaggcgcaggcgcaggcagcggaatgcgcaggcgcggggccttctggaagccaccgagttccgcggtgctgtctggagccgtacggttcgcgtttggggcacaggggcccctcttgctggtgcggatgggaaaggcgcggggtcgagtcagcgtccctctcgatgttggtttcttcgttttacaaataacacttgggcggggcgcggtggctcacgcctgtaatcccagcattttgggaggccgaggcgggcggatcacgaggtcaggagatcgagaccatcctagctaacatagtgaaaccccatctctactaaaaattagaagaaattatccgggcgtggtggcaggcgcccgtaatcctagaggagaatcgcttgaacccgggaggcggaggttgcattgagccaagatcacgccattgcactccaccctgggcg

SEQ ID NO: 27184 - DNA, 1330 bp, Artificial sequence
  DNA replication origin
agcgctgggtggacctaacccttgctttcttggaggaaacccaggaatccagagacaaagtggaagggtactggcatgtggttgggcagggctgcctgaggtcggtgtcagccgaccgtggggcttggtcccaggaggctgcttactgggccctgctcctctggtttcccccaagtcgtgattctgaaatgaataaggacggtgcagaactggactacaaatgcaggagtgacttcctgggagggtggggcccctatctctcctagactctgtggtcagactctggccaacaccccctgtaaggccacaggagaggaacaggagtgatagcccccaaaccccagtcccaccaggccctgagggcccctttgtcactggatctgataagaaacaccacccctgcagccccctcccctcacctgaccaatggccacagcctggctgggcccagctccctgtatataaggggaccctgggggctgagcactaccaaggccagtcctgagcaggcccaactccagtgcagctgcccaccctgccgccatgtctctgaccaagactgagaggaccatcattgtgtccatgtgggccaagatctccacgcaggccgacaccatcggcaccgagactctggagaggtgagtgtcagacgggactgccagagggactgggtgggaggccaggtatgtgagtggggacagtggggagggggcggtggggaggggacagtggggaggggaccatggagaggagacagtggggagggcactgtggggagaggacagtgaggaggggaccttggggaggggacagtgaggagggaaccgtggagaggggacagtgaggaagggacagtgaggacagatagcgttccctctcagtgaggagagcagggtaaggagggaacgattaggagttgcacaaccatctgggctcgctgagacctgggcaggcacaggcccaggttctgacaagcagagggtgaaaggtttcgttctaggcctgaagggccttacagggcagccagggcactacagcctctaaagtcccagcatctgggatcagggcactgtcccagcttcaaattcccagcatctgatcccctgggaggggccagggagcttttccttccctggaacgctgctgggaggtcatgagcctgcagaaggggtggcgggcaacccagtctggggctgggagggaggtcctgtggccagaggagacggtggaggggctgggggcaccaggcgtgctggaggcggagggcgggagatttggggaccaggctgcacagaacccgtcggaagcagggcgatcagccgggagctgc

SEQ ID NO: 27185 - DNA, 1083 bp, Artificial sequence
  DNA replication origin
cccggtcaacttcaaggtgcgcggggcgcggtgcgggcggggcgggacggggcggggcgcggtgcgggcggggcggggcggggcggggcggggaggggcggggaggggcggggtcgcggggcggatgcgggggtcgccgggcggggcccgggctaggccccgccccctcactgagccgcccccgcccccagctcctgtcccactgcctgctggtcaccctggccgcgcgcttccccgccgacttcacggccgaggcccacgccgcctgggacaagttcctatcggtcgtatcctctgtcctgaccgagaagtaccgctgagcgccgcctccgggacccccaggacaggctgcggcccctcccccgtcctggaggttccccagccccacttaccgcgtaatgcgccaataaaccaatgaacgaagcagcgtccacctggtctctgttgtccgtgggcggcgggcgcttggggaggcggagcgggaggagggcgccccggctgtctcggggccactgctgggccgcagggatccttgcaccgaccccagggtctctaagaggcagagggatgtgcagctcccggggcgggagcgggggtcactcgggacccaggcgtggtggagaaggggtgcagttaggcctttgcggaggggggagcagtgctggcgcccacccgccgcggctctccctgggacctccgtggtcttccttctttatttctcccgaatgtgtactatttcctgatttcagaacgatcaggacgaagaggggagggatgggcgtctgcgctcactcattccttcttccattcctcaatgaaacatttactgggcataagacagcctaggcatgtttctaggctatggataccgcagctgaaataaagaaagccctctgccccgtggggctgacaatctagtgggggatacagacgtgatgaagacagtcagatcacagttcacagaaatgagacaggaaaagaggctgagcctcactcataagagaaacgcaagttaaactacacaaaaataaaaaacctcactgagatccatgtctcacctccctgataggcaaaaatccaaga

SEQ ID NO: 27186 - DNA, 1876 bp, Artificial sequence
  DNA replication origin
agaacatagtgagcagaattgcaggcctgcatgacctcaccttctgtgaggagtccggcctcccaagacgctttcctgcctaggtgcccggctcagagtgtcccctacaaggctactggaggagaaccccagaccgagcctcattcaggtgagggggctgcacaccggaggtgggagaggtctgtcccttcccaccctgtgacactgggtcccactttctctctagggggtctcggtttcctcatttgcaaactggagctcataaggtgggccagagaagtttcagtgaagtgaggaatggatcgtccctctgccagggcccatgtgctctaggtcaccctgtcatcacagggacagggaggtcaaggacagtcactcctgaggccagtccgggctgggctgaccacgtggactctcatgcccagattggggccccaatctccctgaagctggggctccagctgtgactcaggggtgggcagaaggggagacagaagcgataggttcctcagcccccagtcccacctgagggcccctttgtcactggatctgataagaaacaccacccctgcagccccctcccctcacctgaccaatggccacagcctggctgggcccagctccctgtatataaggggaccctgggggctgagcactaccaaggccagtcctgagcaggcccaactccagtgcagccgcccaccctgccgccatgtctctgaccaagacttaggggaccatcattgtgtccatgtgggccaagatctccacgcaggccgacaccatcggcaccgagactctggagaggtgagtgtcagatgggactgccagagggactgggtgggaggccaggtatgtgagtggggacagtggggagcgggcagtggggaggggaccgtggggaggggacagtgagtaggagacagtggggagaggacagtggagaggggacagtgaggaggggaccatgggaaggggaccgtggagtggggacagtgaggaggggaccatagggaggggacagtggggaggggacagtgaggaggggaccgtggggaggggacagtgaggaggggaccgtggggaggagacagtgaggaggggaccgtagggaggggacagtgaggaggggaccgtggggaggggacagtgaggaggggaccgtggggaggggacagtgaggaggggaccgtgggaaggagacagtgaggaggggaccttggggaggggacagtgaggaggggaccatggggaggggacagtgaggaggggacaatggagaggggacagtgaggaggggactgtggggagaggacagtgaggaggggaccatggggagggcacagtggggaggggagagtgaggaagggacagtgaggaggggactgtggggaggggacagtggagacagatagccttccctctcagtgaggagggcagggtaaggagggaacgattaggagttgcacaaccatctgggctcgctgagacctgggcaggcacaggcccaggttctgacaagcagagggtgaaaggtttcgttctaggcctgaagggccttacagggcagccagggcactacagcctctaaagtcccagcatctgggatcagggcactgtcccagcttcaaattcccagcatctgatcccctgggaggggccagggagcttttccttccctggaacgctgctgggaggtcatgagcctgcagaaggggtggcgggcaacccagtctggggctgggagggaggtcctgtggccagaggagacggtggaggggctgggggcaccaggcgtgctggaggcggagggcgggagatttggggaccaggctgcacagaacccgtcggaagcagggcgatcagccgggagctg

SEQ ID NO: 27187 - DNA, 1133 bp, Artificial sequence
  DNA replication origin
cgcggggcgcggtgcgggcggggcggggcggggccgcggggcgggcggggccgcggggcggggtcgcggggcggggcggggtggggtcgcggggcggggcggggtcgcggggcggggcggggcggggcggggcgggcggggcggccggggcccggcggggcggggcggggcggggaggggctgggcggggcggggcgcggggcggggcgggccgggccggggcggggtcgcggggcggggtcgcggggcggggcgcggggcggggcggggcggggtggggtcgcggggcggggcccgggctaggccccgcccccgcactgagccgcccccgcccccagctcctgtcccactgcctgctggtcaccctggccgcgcgcttccccgccgacttcacggccgaggcccacgccgcctgggccaagttcctatcggtcgtatcctctgtcctgaccgagaagtaccgctgagcgccgcctccgggacccccaggacaggctgcggcccctcccctgcccttcaccctcccacagttcctgccctgactccaataaatggatgaggacggagcgatctgggctctgtgttctcagtattggagggaaggaggggagaagctgagtgatgggtccgggggcttcgcaggaactcggtcgtccccactgtcgtcgcggcctggggttcacttggggggcgccttggggaggttctagcccctgagcaccggagctgcggcccgggtggagcggagcagtcccgggccggcccgcggcgtctcctggggtccttgagtcggacgggcgtttgtgcgtctcccggcttcccatatcgcacaaagattgtcacttcactaagcgtattggaagcgtgtcggggctcagggaacttttccacaaagcctgacgtccgaatcccgggactctggcagctacgggggtccctgaggccggtccctccccgactcctaagagagtagggggtttcctgcccggtgttctctctccggttcctcccatgtgctccctcctggcagagcagtaactttacccgaggggagtaaacagatgcccctaaagtctgcagtaaaggtgcccacgcgcaacggcgtgggtcaatgccagaaaccctgggatccc

SEQ ID NO: 27188 - DNA, 1185 bp, Artificial sequence
  DNA replication origin
aatcgcgcaggtctgggacctgattgcgggccacgaggcgcaattcggggcggagctgctgctcaggtcggtagaggcggggtctccgggagctcagggaggtggagatgagggttttgggcgcgtgggccgccaacgccatccaaggtccttcgggtgcggatccccgggctctgggcggtgtgggcgctagtgaagccccacgcagccgccctcctccccggtcactgacctggtcctgcaggctcttcacggtgtaccccagcaccaaggtctacttcccgcacctgagcgcctgccaggacgcgacgcagctgctgagccacgggcagcgcatgctggcggctgtgggcgcggcggtgcagcacgtggacaacctgcgcgccgcgctgagcccgctggcggacctgcacgcgctcgtgctgcgcgtggacccagccaactttccggtgaggcctttccggccggggcaatggtgcagcgcgcagccggggtgggggggctctgggggtccctagcggggcagaccccgtctcaccggccccttctcctgcagctgctaatccagtgtttccacgtcgtgctggcctcccacctgcaggacgagttcaccgtgcaaatgcaagcggcgtgggacaagttcctgactggtgtggccgtggtgctgaccgaaaaataccgctgagccctgtgctgcgcaggccttggtctgtgcctgtcaataaacagaggcccgaaccatctgcccctgcctgtgtggtctttggggagctagcaaagcgaggtcactattgttggccagtgaagctcagggacctaaaaggagcctcctagaactctcaaatgcgccccacccccggaggtttgtcctcccatggcgaggagtgcgatggggcagagggagcactgtgatgtggcgggggtagggagggtggccttcgacttcaacccttgaatcgggcttccaaccatactgttcgcaaagcacttccccattcacgcatttattcattcattctccctccatccccacttcctgctgggacctgtagatgctaatcctggccctttttgcagagagatgcagaaactgaggtcccagagccaaatgtgcaacctaattcgttggcccagagcagagggctccgcagacctgttcctttccccttccttcccccatggaca

SEQ ID NO: 27189 - DNA, 1462 bp, Artificial sequence
  DNA replication origin
ttggtcttgtcggcaggagacagcaccatggtgggttctctctgagtctgtggggaccagaagagtgccggcccgcgagcgcgccagggtttatgcttggggcgcgggggcacgcccggccgggcggcgctcattggctggcgcggagcccggggcgcggcctggaccgcaggggagtcccgggcggggcctgcgcggggccgggcggcgggctcggcctcccctgggggtgcacgcggggcgggggccaggacgtctccaccctccacccgccactccactcccgcccatcccgctcgcccgggggcagggcggtagcggcgctggcggggccggcccgttggggtcgggcgctgtcggctcgtgcaccccggagcgcagcgccaccctttcctttcgggcgccggagcgtccctagcgagggagaaagtcagcccgcacccccgccccggcctggcacgcgctggacgcgcatcgactccagcgggatcggggaacacacgggcgagcgagtgcgagccggagggcttcgcccaatcctggggcggagaggaatgcgcgcacccggacgccctggcccataggaactcaaaagaatttctgcgcagagcccctcctgctctccagcctcgcttcctgcagctccctttccctctggcgatagtcactagtgtgcttgagtgacaggcaccgggaaggaacaaacaccaggacgcaaaaagcacggggctgggctgggggcggctccagattcagactcctctacccggggttgtggggtggcgcgtggggtggtgggtgctggctaagccccaagtcatggactcacagtttgtgtgactgactctcccactggcctagaggtcgtggttcactgtgacacccccagctctccaaatgctatctgatggaagacttgctaggtaaatactggttgtaaacagataaacaaacttggctctgggtagggaaaggacaggggagagaaggcccctgtggttgcagaatgtaggtgaggggatgtggggtgaggaaggaaggggtggacttggcgagggggagggtgggaggtgcaggagtgccagtgggtgcatccctgctcatgaaaagtgatggtttggccaggctcggtggctcacgcctgtaatcccagcactttgggaggccaaggcgggtggatcagctgaggtcgggagttcgagaccaggctgaccaacatggagaaaccccgtctctactaaaaatacaaaaattagctgggtgtggtggtgcacgcctgtaatcccagctactcgggaggtggaggctggagaatcctttgaaccagggagttggaggttgcagtgagccgagatcgtgccacagcactctagcctgacgacacagcgagactctgtctcaaaaaaataaatacataaggccgggcgcggtggctcacgcctgtaatcccagcacattggga

SEQ ID NO: 27190 - DNA, 1272 bp, Artificial sequence
  DNA replication origin
gccccaagcataaaccctggcgcgctcgcgggccggcactcttctggtccccacagactcagagagaacccaccatggtgctgtctcctgccgacaagaccaacgtcaaggccgcctggggtaaggtcggcgcgcacgctggcgagtatggtgcggaggccctggagaggtgaggctccctcccctgctccgacccgggctcctcgcccgcccggacccacaggccaccctcaaccgtcctggccccggacccaaaccccacccctcactctgcttctccccgcaggatgttcctgtccttccccaccaccaagacctacttcccgcacttcgacctgagccacggctctgcccaggttaagggccacggcaagaaggtggccgacgcgctgaccaacgccgtggcgcacgtggacgacatgcccaacgcgctgtccgccctgagcgacctgcacgcgcacaagcttcgggtggacccggtcaacttcaaggtgagcggcgggccgggagcgatctgggtcgaggggcgagatggcgccttcctctcagggcagaggatcacgcgggttgcgggaggtgtagcgcaggcggcggctgcgggcctgggccgcactgaccctcttctctgcacagctcctaagccactgcctgctggtgaccctggccgcccacctccccgccgagttcacccctgcggtgcacgcctccctggacaagttcctggcttctgtgagcaccgtgctgacctccaaataccgttaagctggagcctcggtagccgttcctcctgcccgctgggcctcccaacgggccctcctcccctccttgcaccggcccttcctggtctttgaataaagtctgagtgggcagcagcctgtgtgtgcctgggttctctctatcccggaatgtgccaacaatggaggtgtttacctgtctcagaccaaggacctctctgcagctgcatggggctggggagggagaactgcagggagtatgggaggggaagctgaggtgggcctgctcaagagaaggtgctgaaccatcccctgtcctgagaggtgccaggcctgcaggcagtggctcagaagctggggaggagagaggcatccagggttctactcagggagtcccagcatcgccaccctcctttgaaatctccctggttgaacccagttaacatacgctctccatcaaaacaaaacgaaacaaaacaaactagcaaaataggctgtccccagtgcaagtgcaggtgccagaacatttctctcattc

SEQ ID NO: 27191 - DNA, 1553 bp, Artificial sequence
  DNA replication origin
ccagggcctccgcaccatactcgccagcgtgcgcgccgaccttaccccaggcggccttgacgttggtcttgtcggcaggagacagcaccatggtgggttctctctgagtctgtggggaccagaagagtgccgggccgcgagcgcgccagggtttatgcttggggcgcgggggcacgcccggccgggcggcgctcattggctggcgcggagcccggggcgcggcctggaccgcaggggagtcccgggcggggcctgcgcggggccgggcggcgggctcggcctcccctgggggtgcacgcggggcgggggccaggacgtctccaccctccacccgccactccactcccgcccatcccgctcgcccgggggcagggcggtagcggcgctggcggggccggcccgttggggtcgggcgctgtcggctcgtgcaccccggagcgcagcgccaccctttcctttcgggcgccggagcgtccctagcgagggagaaagtcagcccgcacccccgccccggcctggcacgcgctggacgcgcatcgactccagcgggatcggggaacacacgggcgagcgagtgcgagccgggaggcttcgcccaatcctggggcggagaggaatgcgcgcacccggacgccctggcccataggaactcaaaagaatttctgcgcagagcccctcctgctctccagcctcgcttcctgcagctccctttccctctggcgatagtcactagtgtgcttgagtgacaggcaccgggaaggaataaacaccaggacgcaaaaagcacggggctgggctgggggcggctccagattcagactcctctacccggggttgtggggtggcgcgtggggtggtgggtgctggctaagccccaagtcatggactcacagtttgtgtgactgactctcccactggcctagaggtcgtggttcactgtgacacccccagctctccaaatgctatctgatggaagacttgctaggtaaatactggttaaacaggtaaacaaagcaatagctggaaccggctggagcattcaacctcctctgggaggtaggcagtcctctaaccatcacacaagtacacacagaggtgcagacctcatcacaggccctgaggaagtctggaggtgtggacgaggcattcaaggtgaccagggttagtctgagggcttcctggaggaggtgagacttaaggatatgtattaggtggaggaggtggaggagggaggaggcttggctcggggaggggaaaggacagaggagacaagggccctgtggttggagaatggaggtggggagatgttggggtgatgaggctggccagctcctgcagggtgaggaaggaaggggtggacttctggggaagggtgggaggtgcaggagtgccagtgggtgcatccctgtgcatgaaaagtgatgttttttggggggatggtactgaggagaaaacagcctgagaaatcactgataagtcatttcctgggggtctggcagaagatcttgctttgaggagtgcatcaggtcagcacccttcagcctgctccctgc

SEQ ID NO: 27192 - DNA, 1461 bp, Artificial sequence
  DNA replication origin
ccccgcgccccaagcataaaccctggcgcgctcgcggcccggcactcttctggtccccacagactcagagagaacccaccatggtgctgtctcctgccgacaagaccaacgtcaaggccgcctggggtaaggtcggcgcgcacgctggcgagtatggtgcggaggccctggagaggtgaggctccctcccctgctccgacccgggctcctcgcccgcccggacccacaggccaccctcaaccgtcctggccccggacccaaaccccacccctcactctgcttctccccgcaggatgttcctgtccttccccaccaccaagacctacttcccgcacttcgacctgagccacggctctgcccaggttaagggccacggcaagaaggtggccgacgcgctgaccaacgccgtggcgcacgtggacgacatgcccaacgcgctgtccgccctgagcgacctgcacgcgcacaagcttcgggtggacccggtcaacttcaaggtgagcggcgggccgggagcgatctgggtcgaggggcgagatggcgccttcctcgcagggcagaggatcacgcgggttgcgggaggtgtagcgcaggcggcggctgcgggcctgggccctcggccccactgaccctcttctctgcacagctcctaagccactgcctgctggtgaccctggccgcccacctccccgccgagttcacccctgcggtgcacgcctccctggacaagttcctggcttctgtgagcaccgtgctgacctccaaataccgttaagctggagcctcggtggccatgcttcttgccccttgggcctccccccagcccctcctccccttcctgcacccgtacccccgtggtctttgaataaagtctgagtgggcggcagcctgtgtgtgcctgagttttttccctcagcaaacgtgccaggcatgggcgtggacagcagctgggacacacatggctagaacctctctgcagctggatagggtaggaaaaggcaggggcgggaggaggggatggaggagggaaagtggagccaccgcgaagtccagctggaaaaacgctggaccctagagtgctttgaggatgcatttgctctttcccgagttttattcccagacttttcagattcaatgcaggtttgctgaaataatgaatttatccatctttacgtttctgggcactcttgtgccaagaactggctggctttctgcctgggacgtcactggtttcccagaggtcctcccacatatgggtggtgggtaggtcagagaagtcccactccagcatggctgcattgatcccccatcgttcccactagtctccgtaaaacctcccagatacaggcacagtctagatgaaatcaggggtgcggggtgcaactgcaggccccaggcaattcaataggggctctactttcacccccaggtcaccccagaatgctcacacaccagacactg

SEQ ID NO: 27193 - DNA, 1060 bp, Artificial sequence
  DNA replication origin
ggtgggtggccgcgggatccccaggcgaccttccccgtgtttgagtaaagcctctcccaggagcagccttcttgccgtgctctctcgaggtcaggacgcgagaggaaggcgccgcccctccccaaggaaaggcgagggcctggggcacacccccagtgcccagatccaggcgcgcctctttccacctccagcaggtttggggcctcggccatgggggcaccgaactgcgtgcagcctgaccctcccgaatggggtggtaggtgagggccgcgggacgccccgggcggcgggctgcgaggacggccgactctgcccatcccgagggcggctggcttcgccctccccactctgcgccgagcacgcggcccggacccaccgcgagaactccgcacctgcagcgtgaacgcacgcgggcggcgttaagggcccggggctgactcggagcaggttagggaacagcgccccctcccggcgcgagccggtacctgcgcagcacccagccgccgcggctgtggcctggaatcggggacctggggtgccggggggttgtggtgaaggaggtgggaccagccccagcacctagccacgtagctggcgaggtggaccaggaaccgacccagacccctgccgtcacccgacatcactacggagagtgaagcttttttatatttgtccacataaaaccaatcatggtcattgtagaacttccgaaaacaaggcttgctgcaccttcctgtgtatcccaggtccaggaatgggtgcagcacatccttcagctgccgcttgacacgcggcaaactgtgtcatgtgtaaacaagaacaggacatggctgtcatatccaagagcacatgtgtaacacagacatgccacacacacacacacacacacacggggtagaggcaggcctcatccacacccctaacatttgatgcgtagctgttccagtcttctaggcacatgtagagatgcttttcctcagaaatggtattctcaaggtgacactgaggaaaagtggacaggccgggcgcggtggctcacgcctgtaatcccagcactccg

SEQ ID NO: 27194 - DNA, 1194 bp, Artificial sequence
  DNA replication origin
gggaacagcgacacggggggaacagcgacacggggggaacagcgacacggggggaacagcgacacggggggaacagcgacacggggggaacagcgacacggggggaacagcgacacggggggaacagcgacacggggggaacagcgacacggggggaacagcgacacggggggaacagcgacacggggggaacagcgacacggggggaacagcgacacggggggaacagcgacacggggggaacagcgacacggggggaacagcgacacggggggaacagcgacacggggggaacagcgacacggggggaacagcgacacggggggaacagcgacacggggggaacagcgacacggggggaacagcgacacggggggaacagcgacacggggggaacagcgacacggggggaacagcgacacggggggaacagcgacacggggggaacagcgacacggggggaacagcgacacggggggaacagcgacacggggggaacagcgacacggggggaacagcgacacggggggaacagcgacacggggggaacagcgacacggggggaataccaacacgggaggaacagcaacacgcagggaatatcgacatgggtgatgcctgcaaagcacagcatcaatcccaagtgactcctgtacagggcggccccttccaccctcctttccttggagacagttggctgggctagacctgtgtcacgggctggcagagcagcccacctacccatctgtcctcctggaggggacagcctgtggcaggagagcccagagcaaggccaccagctacactgtgataccggtggcagaaagacccagaccacagcgcccgtgtgcgcccactgagccagccagctcaagggtggcatgtgtacccctgcagaaacagagcggatgaggatggctatgtgttaacaatgtgaacctcaggaattccctccaaaaaatctcccacgaagtgaaaaagggaaggagctcccatcatctacacattagttagcagttatccttttcagaagggcttcattttgggtttttggggggttttttgagacagagtcttgctgtcgtccaggctggatgcaatctcggttcactgcaacctctggctcccgggttcaaacgattctcctgtctcagcctcccaagtagctgtgattacaggtgtccgccaccacac

SEQ ID NO: 27195 - DNA, 1280 bp, Artificial sequence
  DNA replication origin
ggaaagaggacggagaggagcgaggacggaggggggacgggaacgaagaggggcgaggacgttcagcatccattgcgacagcgacaaacaggacaccgccaggttcccggcggaggcagcgcccaagatccccgttgccgagcaaccgaagcatggcggtggggcggggtcggagcctgcgcatttccgcccccgcccgcccggctggtcggaagtgacgccagggggcggggccagcggcgcggtcgggtgagaggccgcggcggcaggtgagtgagcgcggcctcgtactcgcgcgtgcacgccgcaggggcgccgcaggccgccccttcgctctgggaccccggcccccaggttccccagtccctcggcccctggaggaccccgccgtgctgccccctagctcctccgccttcccgagtcgggtgcgggccgggaggctgcggcggggccccaagtccctcagcgggtcggcagcagcgcctctggaggctgattctttcgggtttcccccattgccgcagcctgggtttcagtggcattcagaacaagcccacatgttcctcaaagcggggttttacctcccggtagggagctccccgccgtggcgcagcgtaggtgagccggccgtggtcgctttcgctcttggtgccgcctgggttgcctgagagtgtttttttatggtggaagaatgtggatgagaagcctcacgggggtcggagaggcgtgtcctctctcgggacgctgtctgcaagcttgtccgtccggcaccccgggaaagctccccgagcgcagccgaggttgctcgtctgtgggagggactcaggcatagaacacaaaacagaggctagatgggaggaaaacactgggattagcgttcctggctctcccctacgttcgttggccgagagttgtcaaggagagagtttgcccttggacagactgataggatatcagggtaggcaatttcacttactctctggttctaaaccttgtgattccagctgaggaggctgtgacgcgctcccttccatgtactggctgccggtgtctttacggcgccagcatcagattacactacttcccttattgcaatttcagtctgcatccaattagagcagaataactcaacaaatactctccgagtgtctgctgggaaccagggatggttgtaggagctaaggatatagtactccacgaaagaacttcctgtcctcaaggagcttctattctactggagggtacagatagtaaattagataaataaaaaatggagcttg

SEQ ID NO: 27196 - DNA, 1640 bp, Artificial sequence
  DNA replication origin
cccaggccccaaaacccaagacagtccccaaccccccaactgcccacacagtctcactgggggcaggggccggggtgacccactggaaacctcgctgcccccaggactgctatgaccggctacacaagaagatcaaccacgcatgggacctggtgctgatgcaggcgagggagcagctgaggtgaggccccgccctgccccgccccgcctgcaggcgcccaacccaggctacccgggaagcccagcccaggccaggctccggtggccctgggaccgtggagggcacccctgggtgtggctgcctgcccaggtccaggcctgagggtgggggcggaggggctgctgtgtgcagggcgtgccctcaactcggcctcctcctcccagggcagccaagcagcgcagcaagggggacaggctggtcattgcgtgccaggagcagacctactggctggtgaacaggcccccggtgagcccacctgcggtgagggtgggggtcgctggccagcgcaggggtcagcgtgcttccctgacaggcgctctcaggaccaccattttgagcctgtggaaggacctgccttggagctcctggtgggggcaggacgttttcacttcgtgacttagttgcgtttctgccaatcagaacccaggtctccatccctagaccacaggacaagccagcttctctctgggcccaagggagagtcacagggatgccagattgcggggactgcagactctgcctcgggagcaggcagagtgggggcggccttggctgcagtggggggaccgagttcacaggccgggagcagctggggctgtggggaggcccggtggacaggccatttggaggtggtgagcagagaagagacagctgacggctaggtcgggactcttcccgagttcctttgagtgtcagtttccacatgggggtctgggagggggaacttagccttaaagggggtcagccaccggaactgcatccccacctcatctcgtctcccctccgcagcccggggcccccgatgtgctggagcagggtccagggcggggatcctgcgctgccagccgtgtgctcatggtgagcccctgcgtgcgtgctggccgccctctcaccctgcacaccggctgcaccctgctggacgcaccatgggactgcccatctgtccgtcatttggtccacccagagggcacttggtgcagcctccccaagcccctgctcactcccggtcactccctgttccccaggcccctgctaactctcgctttctctcccctcccacctgctgccctgggtgcaggtaagtggagtggtggggacgagggggctggcggggaggaagggggctcttctccagaacagtatcagggtttgctgggaattggaggggtgacaagcagggttacggcctctgacagacctcagcagatccagcaacctccctccaggtggaggcctccagaaccagagggaccagaccagagggagcatctgagccccgcagcagcaaaaccctttgttcaaaccagtcccatccagacccaacatctggaaagatgcacctagaacctcactgataaaacttcttaagttcacgaccctaacatttccccatacaaagctggtcagagagagcggggac

SEQ ID NO: 27197 - DNA, 1398 bp, Artificial sequence
  DNA replication origin
ccccgaccagggcgtgaagatgcggagccagcgcctgctggtcaccgtcattccccacgcggtgacaggtgaggcgcgccggggcgggggtgcgtgcgcgcctcggcctccctccacctctgtctctcccgtgcaggcagcgacgtcgtgcagtggttggcccagaagttctgcgtctcggaggagggtgagcgccctgcctcccactgggccctggggtcactgggctggtggcctaggcctgggttttcctggagtctggcagttctcagagccctgctgagcgcgctgtgcaagggtggggagcacataggggagaggaggcccggctcgtcccgccctcgcccgcttccgcggccccgcgctcaccgtcccacccctccccagaggccctgcacctgggcgccgtcctggtgcagcatggctacatctacccgctgcgcgacccccgtagcctcatgctccggccagacgagacgccctacaggttccaggtcaggctcgggggtgcaggtgggagccggtgggacccccacccccacccacccagcttaccaactcggggagacaggaggggcgccgagcttgctgggattggagtgggactccgccatgtcgccgtgggctggtggtccatcgccccctccccaaaagtcctggaccgcaagtacggatgtggtgagaaggacccggctgagggatggagcctcagttttcctggggaccacagcagggccccacaaggggtcgtatgtgcagaggattctgccatcttcctgggggtccctaggcccaggtcctgagggaggggctgtgaaggcctgaggacagcattcctgccctccctaaccacatcagggtcccgggccgacctgccgtcggttgtacccctccccaggcacagactgtgactacatccaagacttgtgcaggcccccagccccaccccgccttgaatgggggcttagggtgaccagtgagggaggcagtgtctgaacagggccctaaggagcgagttgacctcagttctagttggagagactggccagtggtcagtggagtctctcggtggtgggcaggcagggagatcctcagacacctcctgcccagcccaggcttcttcccagggaggtctgagggtggggtgacactggggaggcacagacgcaggcgtcctggacaccttctccctgcaccacgccagaccccgtacttctggacaagtaccctgaggccggctgcagagctggactatggtgagcaaggggacggctggccccagacaagttcccaggactgggggcctcagggtgatgccgtgaggcagggcagagctggcccctctgcaggctgtccctgttcttccagccatctacctggccaagaagaacatccgaa

SEQ ID NO: 27198 - DNA, 1463 bp, Artificial sequence
  DNA replication origin
ccggggagggccggggagggccggggagaccccggagacccccaagggccccaggcctcgccgcccctcccggcctcgcagacctccgccccaggcccgccccgccccgcgcgcccccgtgtccccatgctctccggcccctcccggcctcgggcgccgggaaatcgggggacggcgggacacccacccgcctcgcaccttcctcagatgcggcatctgcgcccgggggcggccggggggcggcgcggggccggcggccatggctgcggggcgaggccggcggggatgaccgacgtcccgcccggccccgccccgcgccgcgccgcgcccgggttaaccctcgggccgcgaggccagagtcgcccaggccccggttcgggttttaagagacacggccacggcccagaggcaaacgagccggccccccacgagcgacccgagtcacccccccgacccaggtcccgggacgctgaggccctcgtgggtgaaggcgaagtgggacgggggagggtgtgggccgggggccgaggggggatgtgaggggatggagctcagctggagcagggggtggtctctgggagaggcagaggggctcatcagcgagggggggttactatggggagggtctcagggagggcagcggaggggatgggggttcagagagggagaggggttccgtgagtagaggagacccgtagggagagtgaactggggtgggaaacgtggtttagggcccactgtaaccccggtcctatgtgtggggccctgaggacatacagggactagaggcctggctgtggggccggggccagggccagcggtatgactgcccgaggccttgtgtcctgcgatgcttgtggccaagactgcatacattgctgtgacggtggctggttaggggcagggtgcatgagagattgggtcagctttctacatgggccggatgccggctgtcagtggagcacgtggctgctgcagagtgtgacccagctgtccccatctcctgctgtgggtcccttatccggggtccttccgggaaagtggctgatggctcatggctcacttccctcagctccacgcaggcctgggtggcccgctggggaatgagcagaaaccctgcccagggcaccctgacactgttggagaggagctttactgcagggaggccctcaacacacacccacttagtgtcaccggcggccgccaggcttcaggccccactccactcccagctctctccctcctccaatggctatgcctgtcccccaggtgcaccccgagccaggcccaggatcttcaggccccaccgggcagtctcggctcactgcaacctccgcctcctgaattcaagcaattctcatgcctcagcctcctgagtagctgggattacaggctcccaccaccacgcctggctaatttttatttttgtttttgtttttgagacggagtctcactgtgtcacc

SEQ ID NO: 27199 - DNA, 1517 bp, Artificial sequence
  DNA replication origin
cctcagcaccatttttaaaaggtgcaaatgcatctatttctgcttgctttctttattttttaaattatttatttatttattttgagatggagtttcactcttgttgcctaggctggagtgcaatggtgcaatctcgggtcactgcaacctccgcctcctgggttcaagcgattctcttgcctcagctcccaagtaggtgggatcagaggcatgcgccaccatgcccggctaatttttttttttgtttttttttttgcatttttagtagagatggggtttcaccgtgttggccaggctggtatcaaacttcctgacctcaagtgatccacctgccttggcctcccaaagtgctgggattacaggcatgagccaccgcacctggccactaattttttttttaatttcatttttatttttgtagataaatatacacgtagcccctcgcttatccctgtctgtaagggcctcagtttcttgctgtgttgcctaggctggctgatcttgaactcctggcctcaagtgatcctcctgcctcagcctcccaaatgttgggattacaggcatgagccatggcacctggctatgtatttattttttgagagatggcagtctcattctgtcacccaggctggagtgcagtggtgcaatcataaactcattgcagcctcaaactcctgagctcaagtgattctcccaccccagcgtcctgagtagctgggactacagatgtgtaccaccgcatctggtctatttctgctttcttggaggcagagtacctctccccatccttacccactcagagggtgctaggggctgggcagggtgggcggttggccttgggctgggagcccctaacatagtggtctgagtccatttccattgccggagaggccacgttcagcatgagctggggcagggggcttgtggggtctcttactccagggtaccatctcgcttggatcccagtgagccctcccatgccccacacccaggtggggtgaggtggcccaggtctggctgccctgtctgcaggggtgggcacccatggtagctgtgaggcagaatagggaatgagggtagccaagggttgggcataagaaacggaacagcaggtgcagccagttctaggcaggattgggcagctcacaagccacatcctggctgctgtgataacaagacagaaatttccacttcacctctgattggtctcgggccaatccttcatagggtgtagccaattggaggcctctaaagggcacaagggctgtggtcaggtttctttgcttaataaaaatcctaattacagaggctctggagctacttgctccagcccactcccactctgtgaattgccttccgttaaatctgtgctttccttactccgttcttctgactcagttttgtttccttgtgtttcgttgttcttttgttactttgtgcgttttgttcaattctttgttcaacccaccaagaacctggacaactcacctccaagaccttctatctggtaacagctg

SEQ ID NO: 27200 - DNA, 1158 bp, Artificial sequence
  DNA replication origin
gcccgggcgccgcggagccgccgaggagccgccgcccgccccgccgccgccccgctcggcgctcagccccggcgcgactgcggtgagctcatcccggccgggagcgccccccgcgcccagccgcgcccggcagagagcccccagccgctccggaccccgcgcagccccgcagagacgcgcgtgtcgcccgcacgggccggcacccgggtcgcccccgccggcgtgccaggaccccgcacagaagcgcccggacgcggacgcacgcagccgcggtcacgatccccgccgcccgcccggcccgtgcccggctctggccagcagggctgccccacccccacggcgcggcgggagcccgagggggtctcctgggaaaccctctgcggggcgccgtggcgcaggtgcgcccccatccccagggtctcattatccgcggccacacctggggccggaccgcgcgcccccttcccctcccccgctcctgagggagcttctgtctgggccgagggggactccgggggcctgcccagccttggggtgaggggctggcccaacaccctacaggttcacggtcatcagtagggcgggaccacagtgggcgcgggtcgcacgcacacccaggaggcaacaagggcccctcaaaggcttagcgacctggctgcgctgtgtgagttcccaagagggggtgtccctgcagggctcttggaaacccagttaccgagccccctgtcctcagggagaggacactgacaagggggcggagtacagagaccggagcacagagggggcttctgatattgacacctaaactgagacctgtgggtgggtgggggggatgggacccggcaggggacaggggtgagcaggccctggctgggacagctggaccaaaggcctgcgtctggataagggagaaggggtccgaacaccagcctgagtccctttcttagacacccctggccggttccagggacaccagaaattagacccgcccttgccaaagagctcctcaattgagagaagaccaccttgggtgctagggggcattggggtttgggtggggactgtctcccttgccccccaactgcccacaacctttccagggcaggatcctatgaacttgtgcccaggcccccctagagcgccacctctgctgaccct

SEQ ID NO: 27201 - DNA, 1100 bp, Artificial sequence
  DNA replication origin
gcggcggggatcgtgaccgcggctgcgtgcgtccgcgtccgggcgcttctgtgcggggtcctggcacgccggcgggggcgacccgggtgccggcccgtgcgggcgacacgcgcgtctctgcggggctgcgcggggtccggagcggctgggggctctctgccgggcgcggctgggcgcggggggcgctcccggccgggatgagctcaccgcagtcgcgccggggctgagcgccgagcggggcggcggcggggcgggcggcggctcctcggcggctccgcggcgcccgggccgcgcgccgccatgctgggcctggacgcgtgcgagctgggggcgcagctgctggagctgctccggctggcgctgtgcgcccgaggtgagcgggccgggcaggggcggggggctcggctggtctcagccccgggcggggagtagcccctcccccgcggcaactttgggggcgcgcatggggacctcgcggcgccgaccccccggctggggtctggcaggggtgggggacttcatccaggctccagccctgtggggaagggaccaggtgcggacgggtcggcttgggaagcggcggcgctgggaccctctccccctggacaccgccgcctggagcccctctgtcttgggtggggctggggctggggctcaggctctgtagggcgtgtggtgatccccgagaagacgggagcgaagtgggcagggactcagaaacccctgcccagggcaccagggagaggggcttcaggaggccaccagcccggggcgccatgggaggcggcgcagagcctgagcccagggatttggagacagccgcccccggcacccgagcaccatggggaggaactcctagactgtgggaaagtgttcagagaccccagtccagagcagggtggtggagggccctagagggtcagtaggcttggggggccgccgagggccctagagggtcagtaggtttgggggccgccgagggccctagagggtcagtaggtttgggggccgccgagggccgctgctctctagcaggtagcccctgaccctgggctgccctcatctgaagtcttcgctcccccgccctttggtctccgagt

SEQ ID NO: 27202 - DNA, 1381 bp, Artificial sequence
  DNA replication origin
ggcaccagggagaggggcttcaggaggccaccagcccggggcgccatgggaggcggcgcagagcctgagcccagggatttggagacagccgcccccggcacccgagcaccatggggaggaactcctagactgtgggaaagtgttcagagaccccagtccagagcagggtggtggagggccctagagggtcagtaggcttggggggccgccgagggccctagagggtcagtaggtttgggggccgccgagggccctagagggtcagtaggtttgggggccgccgagggccgctgctctctagcaggtagcccctgaccctgggctgccctcatctgaagtcttcgctcccccgccctttggtctccgagtcagggagggggcccttgtggacatctgggccagaggagctgcaggcctggcggtctctggaggcccctcctgaaggtctgggtgcggtgcggcacctccccaggccgccctgctctctctgctcgctctctccctgagcccccagaggcttcccttgagtccctttggatagtgggaggtacagctggccagagggggctccagcctggtgctcgaatgccagggtccgctagtggctgctgctcacgcccctccccacccccagtcctcctggctgacaaggagggtgggccgccggcagtggacgaggtgttggatgaggctgtgcccgagtaccgggcgccggggaggaagagcctcttggagatccggcagctggacccggacgacaggagcctggccaagtacaagcgggtgctgctggggcccctgccaccggccgtgggtatggcaggggtctaggcttggagggctgggtctggggggctggtgaggagcctggtgggggtggggggcatcctgcagacttccagtttctcctcagacccaagcctgcccaatgtgcaggtgaccaggctgacactcctgtcggaacaggctccggggcccgtcgtcatggatctcacaggtaactcgcaggatgctgcaccctgaacacaggtagggccctcccaggcacgcttctgcacccctgagttccgagccctgggccatcacagtcgcacacctcatgggtaccacaccctacgtgggggctcctggagcaggtctcagcctgtaggggagttccgaccctagctgaggtttccccaataggggacctggctgttctgaaggaccaggtgtttgtcctgaaggaaggtgttgattacagagtgaagatctccttcaaggtgagagccggggcaatgggcggaggggatgggggtgggggcaacagccagaggcctggcccccagaggaacccctaatgcctctgttcccaggtccacagggagattgtcagcggcct

SEQ ID NO: 27203 - DNA, 991 bp, Artificial sequence
  DNA replication origin
gttctcaagtcctgtgggtacccccagtactaccacactgctcctgcctgccccaaccagacccccaggcccctcctagagagctcctgggcacagtgggggcaagtgcctgcggggaggcccctcttgggcacatgccctgcatttgccggcaaagggtggggcccccaggtgggctctgccggtcccccgccggtccccagccccactggccccagcactcacagaattccaccagcagggcagggtgctcccgcagggccaggcccagggtgtggcggctcagcaccaagatcccatcctccttggggatttcctcctctggaggctcctccgaggggctcctcgctccctgttcctgaccccatgggcacgaagccctgagcagcagcagcagcagtacaggcagaagctggcggctcatggtgctgccagggcgcgtggggcgggggcagataagggggccagaagccaagcagcagctgccacgtggcacacaggcccagtcccagcaaagacaaggcccatgcggccgcccccggcccccaggggaggggaggcagaaagagacgacacccagggcaccgagagagacagggccatgtttaatgggacagctcaggggacagcgccaggccagggggtcccgggacagagcaggggcagcaggggcagcaggggcagcaggggagggtctggtcactcacggggggtgctggggatgcttgggggtccctgtgcaacaactgagggaggtaggggagacacggactgggggttcagtccttccagtcctggcagatgcagagaccccactcccaggacaggtggtgcgtcctgtcatcgtcggtgaagagggacaccaccagataggggccccgcaccagcgcacccctcggcgcttcctccaccggagtcacaaactcatactcctgggcgctcgggccatagctgcccaccatgtagacggtcttgtccactagggagggcg

SEQ ID NO: 27204 - DNA, 1665 bp, Artificial sequence
  DNA replication origin
ttcttgcccacgagggtcttaactggccgctgatcccaatcagggggtatctcctggctcaggagatagggctgggggaaaccaggacaggcgctttgccaggggtcctctgcagggttcaggaggtcctgtgcagggcctggggggtgggggggaggtcctgtgcggggtcagcggcagggggaggttctgtgtggggggggcggtgggggggaggtcctgtgcggggccgggggcaggtgggggggagatcctctgcagggcctgacagggaggtcctcttcaagtttgggagaactgtggggtttagtggggggagggagaactgtggggtttggtggggggagggacctctgtggggttggggttgaggttggggttgggagaaccgcggggttggagaaccgcggggttggggttgggagaaccgcggggttgggagaaccgcggggttgggagaaccgcggggttggggttggggttggggttggggttgggagaaccgcggggttggggttgggagaaccgcgggtttggggttgggagaaccgccgggttggggttgggagaaccgccgggttgggagaattgccgggttgaggggggcctctgcggggcctgcaggggcagggggctctgagagctgctgttcccaccccctgccaagctggtgggatgaggtcagggttccccttccattatgagcagtctgcagcggaccttgacttggccgttgaggactgcatggcagaaagcagtgatggacgctgcggtgacagggcccccatccacaggcgcatacttcttagtggtttcaaggttgaccaagcgcagagtgggggctgcctcagccttgagtccaaagtactgcagcacgtgctcattgtcggccgccacgtccaccaccacgaacagcacctgtggcagggagtccatgctggcaccggccactctcccgctgcccctttcccccagccccccagtacctgcccccggaagcggggagctgcctccccaaagcccgctaggagctcccggtgcgcagccagcgtctggttgacaaacagcagcaggtggttgaggatcctggccgcgaagatcttggcagacgtctacagtagggagggtgctcatgactccacaggacccccagcctaggcacccccatccctggacgactctaccctgggacacccccagcccaggcactgcagcctacgcacctggctgttgaactccgtgaccaggcgcatgctgtgtgtgaccaggaagcgcgacagatcccccaggtccaggccaagctcctcgtccacggggaagtctgcccgcccctcatcaaactggacagcagcaggtgggttagcgggcgctgcagccggaccccaacccacacctgggcctgacctaccttcttgaagagaaccacagtgtccttggtgaggccaaactgctgaaagagccgcggccggtctgtgaggccaaaggtcatgtccagggcgtcctgggccaaggccaagaaggtggccacgtcctcgtcctgcaggtcctgaggggcctggccctgtgaggccacccggtcccacccacagtcactgccctcatggcccggccccccatgcccagtggctcacctggaagaagccaatgaccactaggtcccggcca

SEQ ID NO: 27205 - DNA, 1597 bp, Artificial sequence
  DNA replication origin
ctcctcactgtgcccttctctcatccgggacgtccagcccacagccctcctcactgcgccctccttggtcttctgggctccgtagccagaccctgttctctccctagggcagggaggcttctgtctgggctgcagggaggtctcccctttgtgtgggcagcattttcgctccaggccagaacctggcttctccattttcagcttgctcataaggccagttttctcggccatcctgggtcattggaattccccacagatcagtgtctctttgagggtcctgggagcctatagctcacccaggccctggggctgtggtcacagaggccatggttgccttcagaggtcaccagctcctcctgtccaccttgggtcacctggggcctggggtccaggcccgcctcccgggcctccagctttggggctgtgccactccagggaggctgtggctaggggccttattctgccgaaccagcatcagggttcagacccttcccagctgaaagcctgtgtggtctcaagtcattaaaggttcctgagcttctgccaggctgtgagcctaatgacagctctggggccagaaagggtcacagttacctcaaacccaaagggtgaccactttatgaccaaacatctgtgaccctgtgatcgtgttcggccaacaaggagctggagccccctgccatgcaggagcctggagtgtggtgctcggagccggggcgtgtgactgggctggcagatgagccgtggtgggcatcgtgtgcagcaggtccgaggccctgggcgtgtgtgggctctcctgccggggcttcctgagccatccttgctgggctgagcaggggtctctcaggttgcgtctgcgctttcccctggtacccgtggccccacatgatggcaggggatgcccgctgagccgtgggaccactcccgccgttctgagacacgaccctcccgcccgtttggctgctgggctccagcatccccccatggggaaacccagagttgctgggtttgtccgtccaggggatgtgggtttttgcgagaagctgtggagacggagtgaaggcccagaggcaggttgggtgctgggccctgtcaggatgtcagagtagaaaccaccatcaaggtcgcccagtgtaccccggtggaggtgtccacgtgagaggagctgctgtgctgccccaggatggcctcagttgtggcgccggggggccctcagcctccctgaggtgcagaccgagttgccacgcacgccccagagccagtgtccacgctatcggtggggaattcatgccaagagactgaaggacagactctcgggacgagatgtcatcccaccagaggggatgaggtggtgggatcccagcacccctgatcggaagctccccaaagtgcggtccagggaactcagggggttggtgccgggatcatgaatgtggggcgcgctgcagtatcgggtaccaccaaggcaggcctaggaggggactcggtgtcttgtctaccctgcaaactggagcctgcgcagggtgggttgttcgggcccttcacgctccgtccgtccctgcgcagcagcattggtcgaggctccctccccagggct

SEQ ID NO: 27206 - DNA, 1693 bp, Artificial sequence
  DNA replication origin
tggtgctgagaggtgatggtgctgcttgtccccacacaggaggaggaaggtgaggacggcgatccatcgtcagggcccccagggccgtgtcacaagctgcctcccgcccccgcttggcaccacttcccgccccgctgtgtggacatgggctgtgccgggctccgggatgcacacgaggagaaccctgagagcatcctggacgagcacgtacagcgtgtgctgaggacacctggccgccagtcgcctgggcctggccatcgctccccggacagtgggcacgtggccaagatgccagtggcactggggggtgccgcctcggggcacgggaagcacgtacccaagtcaggggcgaagctggacgcggccggcctgcaccaccaccgacacgtccaccaccacgtccaccacagcacagcccggcccaaggagcaggtggaggccgaggccacccgcagggcccagagcagcttcgcctggggcctggaaccacacagccatggggcaaggtcccgaggctactcagagagtgttggcgctgcccccaacgccagtgatggcctcgcccacaggtgagcgtgcgcctgtcagtgaggagggggcttggggtgaggctgtgtccctgcagaaggccagaacctcctcataaaactcaggaaacccaggaccgccagcaacaggcaggaggcccctctgctggagggagtggactgggccctgggtcaggggagtccacgccgtgacctcaggtgggagatgaaggttaggggacacagcccgaccctggctcccgctctggccctcagtcttcagggggtgagcagtgactgcctgtgtgtttagagaggaaaccaacccccagacagcaccaggacagcgggcaggggacagcgggtgggggacaagctggcgggggacagcgggtgggggacaagcgggcaggggacagcgggcggcggctgcaccacgggagccttacagatgccaggagggggcctcgcagacgaggaaggggcacagcctcggccaccggaggccagggcgactcgcagctcttgcccttgcagtgggaaggtgggcgtggcgtgcaaaagaaatgccaagaaggctgagtcggggaagagcgccagcaccgaggtgccaggtgcctcggaggatgcggagaagaaccagaaaatcatgcagtggatcattgagggggaaaaggagatcagcaggcaccgcaggaccggccacgggtgagcaccccgcacgcagccagcctcgtggggcctgctttgccacccctggcctccgcacagtctcagtgtgtgcagcttcagtgtgtgtggcgagtgtcgcctgtgacgcctcacacttcccctgtcactgtggcaccctcccgggcaccctccagcaggctccctgggccccacgtctccaggaggaaaacctcatgtccccagagagaggctgtccctgaagccccgagcaggagggaagctgacgtggctgtcaccccgcaggcagcacagatgctctcgggaggtcatttccagtctgacccccacatgagaatgacctaagtcacctgggaaggcccccactgaccatcactcccgaggtgcccacggaggagccttctgtgctcacacctggccgtcctgctgagggctggggaaggctcttgtgtagcgtgagcacttctctcctccca

SEQ ID NO: 27207 - DNA, 885 bp, Artificial sequence
  DNA replication origin
catgtgctgacgtgcggcgtgtggtcttgtgataacactggaagcgcctactgaccacctgcgggcgttttctgctcagttgtgtttgtcaagcttctgtttatctccacaaactctgcgggacactgggcgggttggttgggaagctgctcatggtgcccttggccatgtgatccttgcaaacctccccggaggaccgcgggcctgtgaggcctgtgcctgacccgcctttccatatcgcttctgccctgcgctgcttccagccgtttctatgcacccgcattccggcccccagcctcctcccaggagggctcagaaaggatccggcaggagacctgtagagcaaatgtagcccccatgccatggcatcggcgtccttgagcaggtggcctcgtgcccagtgccgacccgtaatgtggcccggaagacccgtaaagacccgtaaggcggctcactgacacttggccccagatctgcccctcatggaggctgctggtcagtgcggacggtcccgggtatttcagatgtgactcttgtgggctgcagggctctcctgcactgggctccccatggtctgcagggtttcctgtgggctacggggcttcccatggacaggtctccccatggactatggggctctcctgtgggctttggggctcccacaggctggtgtctccagggtgggttgctcattctgtgccgtattccatcccctgtcgcagttgacaccttttccctttgcacccacagtggtgaagacctgtgcttatgctcctagagagacgcaggtgagaacccaagtcacacccctcagtgttttgttttgttggtgtgtgtgtgtgtgtgtgtgtgtgtggtggagtctcactctgttgcccaggctgg

SEQ ID NO: 27208 - DNA, 904 bp, Artificial sequence
  DNA replication origin
catgagactgcgtttatacagaattctagaaaaggccgactgacctcgagcgacaggtggatttccccaagggaagcctccccaggcttccgggttgaatatgtgggctgaggcgatggtttcctggggtgcggggccgcccgcggggctgaggcgatggtttcctggggtgcggggccgcccgcggggctgaggccatggtttcctggggcgcgcccgcggggctgaggctgtgatctggtgcgcgtcagaacgtgccaggtaggactgtggttctgtgcgggtccgctgagcacccagccgtgcgtcagtagagctgatttttacacagccgtttccttgcctttgttcatcccggagttctgcgcccttaggaactgtgcaccgggcgctgctgcctccctgaaggcttgggcagagcctttccctgcgcgggactcgggggctgggcctgggaagggcctgcggctgccggaagctgcctctgcagggcgggttctgtctgctggctgtgctgttccggggggtcgggatgcaggtcgctgatggcactggccgtgtctgaggattggaccgctcacctggggtgcccctcctcctcctggtataaagtacgacttagcttgtcaaaacagggatcaagtaagtgtgtctgtgtcatgtgctgacgtgcggcgtgtggtcttgtgataacactggaagcgcctactgaccacctgcgggcgttttctgctcagttgtgtttgtcaagcttctgtttatctccacaaactctgcgggacactgggcgggttggttgggaagctgctcatggtgcccttggccatgtgatccttgcaaacctccccggaggaccgcgggcctgtgaggcctgtgcctgacccgcctttccatatcgcttctg

SEQ ID NO: 27209 - DNA, 1013 bp, Artificial sequence
  DNA replication origin
gatgggcccgctgttgctctgaggagggcacgtgtgccgctgtgtcccgtctgtctcagcacagtcacggtgcgtgcgctgggggctgtgcagcagggtcactcctgaaggaaagtgggttctccacccagacagacggctgctccccagtggggagctgggggcagtcctccaaaggaaggctgcgggtaatgcaaagggaaaaggagagtgggtactgaacaggcggctggtgagcattgctaccacagcagggcctggagcttaggcctcacgtgttaggggatgcatatcctgtggagagccggttagtcgtcccggtgtgtccggaattggtgggttcttggtctcactgacttcaagaatgaagccgcggacccttgccgtgagtgttacagttcctaaaggcggcctgtccggagtttgttccttctgacgttcggaggtgttcggagtttcttccttctggtgggttcgtggtctcactggcttcaggagtgaagctgcagatcttcgcggtgagtgttacagctcataaaggcagtgtggacccaaagagtgagcagcagcaagacttactggaaagagagaaagaacaaagcttccacactatggaaggggacccgagcgagttaccactgctggctcccgcagccagcttttattctcttatctggccccacccacatcctgctgattggtagagtccagtggtctgttttgacagggcgctgattggtgcgtttacaatccctgagctagacacaaagcttctccacatcctcaccagattagctagatacagagtgtccacacaaaggttctccaagtccccaccagagtagctagatacagagtgtcgattggtgcattcacaaaccctgagctagacacagagtgctgattggtgtgtttacaaaccttgtgctagatacagagtgccgattggtgtatttacagtccctgagctagacataaaggttctccacgtccccaccagaatcaggagccca

SEQ ID NO: 27210 - DNA, 1636 bp, Artificial sequence
  DNA replication origin
cacagccccgagagcctggcccggacacagcagcagctctgcagaaccaaggcaagcattggggaccttgttgggagtcggggggcagcccaggggccagtgtctgaggtcctgctgtctgtctggccacccaggactccctcatccctggaaactgtgctttaccatggaggccacccactctgtctcctctaaggttctgaggctgaatgggctagggggcttgcggggaggccccagtgtccagcactgtgggacctggcagggtgcctgcggccaggacccagcggggccaggtgttggtctaacagtgcagcttcgttcatatccccagcccctgcccacctgctctgagcacagtgatggccctgggaggtgggcctgggcccttggcaggctggggacagcctagtggcccttgtcccatgctaccccctttcccacacagcgatgctggcatcagacaccatgctgagtgctggcaggggcgagggctgggaggcttccacacatggttccccatgcagtcccacctgtgggcatctggttgggggtaggctggaagctcggggagcctggagctgggacttctgtgcttgcctgggagctctgaagggtgaggctgggcatccagggtgacacagcccagggaaagacatgggggtgacgtgagaggtgcctggagggagctggcaggtatggacatgatggacacggaagcacggaggcgggcaagtggccagacgcatctaggggaaggtgtgggggaggcgcccttaggaagggccctgaagggctgtgggcagcagggagccctgggaggcctaaagcagagggcagatagatgagggctgttgtctcaggtgtggggcggacgaggtggggagccctcacccaacaggaggcgagctggtcctgtgtggcctgaactgcagctgtctcctctgtgaaacgggggtatagctgaccccagggggctgcctggagcatcccgggaggtgccaggcccaatagtgctctgggaaggacagggccctgggctgttgtgggaggcggcagatcctggtactcacatcctcctccttggggagggcctgatggttggctgaggcctgggtggagagcagagggttggttctgacagggttgggctggccagagctggtgctggggctgctgctgggggcccgtgcctctctgccgtggggtgcctggggctgtgacctcatgctctgtggcctgcagggcaagtgacacggatctgggcagccagggtggcaggatcggactggaccccttggcagggccgctgtggagacagcccaggggaaggggtgcaggggtctggacactccaatggccttgctctcgggctggcctgggcagcggagggaaggagaacccttctctgatactagatggtgcctgggagaaatcaaggcagagggtcctagccggtgggctctttggaggttgtggctcctgtccgggtgagagccaccatatattggggcctaacgtgttccctggcgctgtgagtccaggctgccttgggactcaggagggtggagcccaccccaccttccaagggccctggccatccctgcctgccgaccaccccactcctgggagcctg

SEQ ID NO: 27211 - DNA, 1369 bp, Artificial sequence
  DNA replication origin
tgggccgggtacctggtcccaacacctgcaccctttcaaaggcctccacctcctgctagaggccgtgccttccccaggttctgcccagaggagcccgcaggggccgagctgggtgtgaggacagccgtggctgcgtctcctccccccgaccacgtcctgctgcccacagaggccttgagctctcagttggcctggcaggcgcgccctgggggttcaaagctcccgttgacacgattgttaggttattaggtaaactctgagacgtaaatcttttaatccactgtggctaatccggttcacttttgtttgccacgacagacgccgcggcgacaaaggggcctggggcccagcacacacagtcacacgctcagaacttggccgcggcctcagggttcctaggcagtggagagagacatcttgggacagccaagcagagggaggcggcggagggcacaggtgggcgggggcgcaggtgggccggggcaaaggcagctgcccgctgggggccgcacttcctcacctcccatttaatgtccccttgccagctcgagggggaaccgctgggcactggggtgtgcaggtatcggggccgctggggatagtgggcagaaggacagatgagcaccaacgggggggcggcagcgcccggagaggcgtgtgggatggaggccgtcagggcagggaagggcgttcaggtgagggaacagcagggacaaggactgtggtcggtgtggcaggggcaggagtccccccaacaaggacaggaagcggcctgaggctgcccagggaggtgggacgtcacctgctacttcccgaagtcagcgcgaggcccctcggggcatggcccctgcacttggatgccacctctttttgggaaaacagcactgaggttgggggaggccagcaggccctgccctgtgctcacaatgtgcctgggacaccagacctggtccatggccagccgtgggctccatcccgccacccggcctgtcagagagggtcacacacggacctctggggctgtgaggccaggtcaggacgatcactttgcccagggggacactggcacaaggaggtgcctgctttgcctagggctacaggctggcccaagacaaggatgggcactcaggtctcctgggaggcaggtgccaggccaggcccaacagtcccctgatgtcagcagctcccgagttgggaagtggtggccgccctcccctcctacttccccagcccctgcggccggaccctccaggcaggcctacttgaccacatcctggtatccacctggccccagtcccagcccctggacaccctggggtcagaactcttcagaaaggcagtgcaggaggactcccctcaggacactggg

SEQ ID NO: 27212 - DNA, 1741 bp, Artificial sequence
  DNA replication origin
cccaagctggaaccctggccacatggccacacccagcagcctgggctcccgtgcggtcctggctccctctgccgcagcgccccgcagccctccctaggcgggctccagccttggaccatcctccctaaccactgcctgctgtcctgggatggtgtccctacccacatcctgtccccagacaagctggtagctctgagcatggcatgggaagggcttcaaggccgggttccatcctgggacaggcggctcacaaccaggccagtgcgaagaagcttggatccggacccagagtcctgggggagcagccgcggcccgagacccccggcgcccagagtcctgggggagcagccgcggcccgagacccccggcgcccagagtcctgggggagcagccgcggcccgagacccccggcgcccagagtcctgggggagcagccgcggcccgagacccccggcgcccaggcccatgccaagcccggttccctgggactggccccgaagtcgctctcttgaaggtggatccccatggaccatgctccaggctcccctggatcccgggtccctctgatggccttggtagtggcctccctgggctgcagcagcccaaggctctcgcttgctccttgcagtcctgcagctgttcatcaccagattctgctcatcgggtgctgggcctgggccaggaagtgggactcagcttcccgggcttaggggaagccttcgaaggggtcttggccaggcagtgctgctgtcagagcgcgtggacaagccaacactgtttctggctgtcacggggctgggggcagggggtggttccggggatgctcagtgccctgcagtgcccaggatgtccacgggtgacggttgagaagcctcgtctccagacatacgggaaagctttgccaggggccaatgctggtgcgccctggagggaagaggcgttcttgggacgcaagagggcactgcagcccaggggagagcgggtgcagccgcaggtgtgtgactgatggcgagacggtctcctcagtgtggccaaagacccagagtcctgcccagtgggaacccaaggtccagggagcaaggcctcgggaggggcctcagggggcttgtgagacgggactgtgtgagcacgtgcacgtattccacaggccgcagctaacgagagggtggcggagtggactgtgggcggagagaaagctggcagcctttgccgtctgaggtgggcgagagcttggctctgcccagtggggctgggaagttctccctgctcccgcttccactgctcccaccctttattttcccaccagactgggcctggccttcagcccctgaggcaagcctgacctgaagtcctcctctcagcaggggctgcaaggccagtgcttctgcctctgctgggggtaaggcagggcacagagtggccccggacaggccaggagaggggcaaggaccccacacactggacatgaatgaaacacacggaaacgcttaacagctgttgtggggacagctaccatgcagccatgcccacctcgttcctccaaggggaccctggcatgggcccacgggcagtgccgcctgctccctcagcagtcaggagtggctcgggggtggcggtgtctaaaggggctggttgccatggctaccatagggttctgaggcccgtcatctggtccctgcctcagccaatcggcggcaggagcccgagctgcagcccagagtcacgcttctgcctcccagcc

SEQ ID NO: 27213 - DNA, 2750 bp, Artificial sequence
  DNA replication origin
ggcactgagcatccccggaaccaccccctgcccccagccccgtgacagccagaaacagtgttggcttgtccacgcgctctgacagcagcactgcctggccaagaccccttcgaaggcttcccctaagcccgggaagctgagtcccacttcctggcccaggcccagcacccgatgagcagaatctggtgatgaacagctgcaggactgcaaggagcaagcgagagccttgggctgctgcagcccagggaggccactaccaaggccatcagagggacccgggatccaggggagcctggagcatggtccatggggatccaccttcaagagagcgacttcggggccagtcccagggaaccgggcttggcatgggcctgggcgccgggggtctcgggccgcggctgctcccccaggactctgggcgccgggggtctcgggccgcggctgctcccccaggactctgggcgccgggggtctcgggccgcggctgctcccccaggactctgggcgccgggggtctcgggccgcggctgctcccccaggactctgggtccggatccaagcttcttcgcactggcctggttgtgagccgcctgtcccaggatggaacccggccttgaagcccttcccatgccatgctcagagctaccagcttgtctggggacaggatgtgggtagggacaccatcccaggacagcaggcagtggttagggaggatggtccaaggctggagcccgcctagggagggctgcggggcgctgcggcagagggagccaggaccgcacgggagcccaggctgctgggtgtggccatgtggccagggttccagcttgggtggctggtgggtgtcagagggacagggactcaagggagcctgggagccccacacaatccagcccgtgcctggggccagcagagggctggagttacagacgggcactggtgagagggcgagggcggccaaggactgaaggtggaggcggagccctaagcaggcccgcgggacacacagtggtctcccggcagctcccttgggctcccagcaccctgacgggggcacaggacaggagcagagttgccaagcgacccagagggcccgcccgctctccatgcccttccctccactatcctgctgctctgtgcacctgagcaggactcaggaagcaggcgagacccttggggtcaggggtcagacatggacttgtgactgggtgcctcaggccagcctcacatccactccaccctacccttcctggccttggcttccccgtctctatgtggagtgatggggtcactgacaccccttccagtcctccagttttctacccccaagggatccctgcccatagccgtgagggtccaccccggagtccaccctcaggtccacagcccattctctgcccgacaccgcggctgactgttgtcatggaaacacatggcctctgccaagcctgggacacgcgtggggaactcctggcccctgagggctccgagaggctggggctggtgcaggccggcccagggcagctctgcctcctgtggggttgatcttgctctgcacagatccctctcccactccaggtgcctgagggtctgcacgcctcagtgagggagaactggccgttctcagagacggagtccaacacttcaggaaggagcctgacaggtgtgattggtgaggatggcagaaggagggtctggtggccccagcccggcctggctctggaaggggtggggtgggcatagggagggcagggaaggggtggggtgggcgcggggagggcggggtgggcgtggggagggcggggagggcggggaggggtggccagcagccattcccaggttggctgcccgggctcccagctcagttctcagttccccacacacatgttggagccggtacagtccctgggacccctccccacaacccagaaggcagaatagcatgctggatccagctgctgggtctgtcccagacctgagtcacggtttggtcttgagggatgggtccggcatttacggaaggcctcttacctttttctcagtcaaggacttttgtggcctctgaccagaaagttgtcagggccctggccacacccagaccccacctcagtctggcctggcctcccctgcgggaggactaaacagccatgggttccatcgaggtgactggcagaggaggtaacctgctgaggccaaatgcagcttctcccactggccagctggtagcctggtcccaaacccacaaccctgagtcaacacaagtcaggacacactgataagcacgtgccaccatggccgacagggggaccgaggccagcgcctaccagcccattgccaagcctggcccctaacttcttggggcccccagagtctgacccaggaagccctacaggccttggcaggagccctgcttaccgtggggcttggttggggtgggaaagagcaggtggtgagtgaggggcagccaccgaggcctgagttgggaggtgctggacacacacaccatcagggagtcaggggcaggccgaggggctggagggggcttggcttaagttcacagctgaacacgggaactgtgcagggcagggcgtggccacaacatcccaactctggctagagctggggcacggaacagcactcatgctgtgggcagctgggctgagcctcatggccccacagagctgactgagcactgtctgtttttcataaagtgttttttttttgagacagagttttgctcttgttgccca

SEQ ID NO: 27214 - DNA, 1451 bp, Artificial sequence
  DNA replication origin
aggagaaacatatatatatggggttttttggagtaaaggaaaattctaagatattaagacatatttttatgtagatctgatctatctgtgtttggtgaatttaatattctacattgatttttcaaactaaacgagtttttacattttttctgtgctccttcccgggtagggtaagtggggcccgggagaacaagcaccgccccgcccgtgccgcccttcgcggaaacgccggggccgcacgtagctaacggtgccttgagctgctgctgctgtatgtggggtgttttttacggtccctaaagacggaagcggggcgggacgagggggtagacggatggcttttacagccagtcagcggtgggaggagggccaggcgcggcagatcggcttccggttccggtgggctctgaaccctgaaaggtgggcgcgggcaggtggggtgtgggggggcgccggggcagaaggggaggggcaggtgggtgcgggacaggggccggagtgagaaccgggggccggggtagggggtagcgggtgagagccgggggccggggtagcgggtgagagccgggggccggggtagcgggtgagagccgggggccggggtagcgggtgagagtcgggggccggggtagggggtgagtgccgggggcctggccaggctgcgactgactgcgagcccccacctcccgccaggctcgcgatgcctctacacaagtatcccgtgtggctctggaagcggctgcagctgcgggagggcatctgttcccgcctgcccggccactacctgcgctccctggaggaggagcggacgcccactcccgtgcactataggcctcatggggccaagttcaagatcaaccccaagaacgggcagcgggagcgtgtggaggacgtgcccattcccatctactttccccccgaatcccagcgggggttgtggggcggcgagggctggatcctgggccaaatatatgccaacaacgacaaggtgggtccgcaggcggccttcaggggctcctctcagggcttggctgtgccggctctgtgccggacgcccggggtacctggagagacctgggtgggccctggggattacagcctggaggcgacacatctccggcaaaggagcacgctgagtgaagaaccgcagttctggcaaacaggactgataaagtaggggtgaggtggggtgactcaggccgggggagcaaccagaggccgtggggagtcggggtaaagttaggatggggaggaggcctgtgtgatgagcagagcaggtgggagaggcgagcagagcaggtgggggaggcgagcagagcttcgaggctgcttgtggtggacttcctggcgggactgctgaagcctgtggggagacttgtgtcacctccaggttggaatgtgacaacctgtaaactgtggggtcgcacatgtttctgaaacacatgcagcaa

SEQ ID NO: 27215 - DNA, 1223 bp, Artificial sequence
  DNA replication origin
gagggtggggctgtgtgctctgctggcctgtgggtggctagagatggggagaaggactccctatggtcctgttccctggcgaggctgtggtgagacccatggcgcccaggagccctgagcccaccactggggccgggagctgtggactccgagacccctgctcctggcccctgtgtggccctgatgccagcctgcctggggcatggaggatccccctctgctgctgtggtcaccatagggacgggagacggaggtttcccccagagctgatgggcactggggatgcaggctcccgccccgcccctccctttttcctggctctggagccttgggtccctgagaagagcttccttggactggggtgctctgctgctctgggggtttggcccagaaggaacccctacccagccctgtccacccaccccagcgttcctgggcccccctctgggagcttcctcttggtcccaggagctgcggtggtgtctgccccctgcactgggctctgtgccctgtgggtgttcaggagactggactgtctctgctcctcatgcaaaccttgtgggggaagcaatgaccaggagcagcacctggcccctccctgaggcctgtgagtgtctcggatccgccctggagaagtgagtggctgagacccgggtggggccctcctacccttggctctgggggcttcccttctgggtcttgtccgggatatggccttcctgaaggtcttacctcccccagccgccctgcacttgaccaccaaagcaatctctaagcttataaaggagaaacatatatatatggggttttttggagtaaaggaaaattctaagatattaagacatatttttatgtagatctgatctatctgtgtttggtgaatttaatattctacattgatttttcaaactaaacgagtttttacattttttctgtgctccttcccgggtagggtaagtggggcccgggagaacaagcaccgccccgcccgtgccgcccttcgcggaaacgccggggccgcacgtagctaacggtgccttgagctgctgctgctgtatgtggggtgttttttacggtccctaaagacggaagcggggcgggacgagggggtagacggatggcttttacagccagtcagcggtgggaggagggccaggcgcggcagatcggcttccggttccggtgggctctgaaccctgaaaggtgggcgcgggcaggtgggg

SEQ ID NO: 27216 - DNA, 1793 bp, Artificial sequence
  DNA replication origin
cccgagtagctgggactacaggcgcccgccaccacgcccggctaatttttgtattttcagtagagacggggtttcaccgtgttagccaggatggtcccaatctcctgacctcgtgatccaccctcctcggcctcccaaagtgctgggattacaggcgtgagccaccgcgcccggccggtgctggtgcctttctctgagactcctgcaggcccacggtgcaccgggaccttcctccccgggccctgggacatcctgcctccaccccacctctgacccgagctaccccacagccccggggcctgttgacaggaacaaggctgcccagcaggggaggccccccaacatgggcccctgtcttggcccgtgcctgctggtgtcactgtgccgcctgtcccgtgccaaggtaaatgaggaggcgctgcaggggttgcccggcgccctgcccgagcccaggccacaggccgcttgcagacagcaggtaccttgttggcccgcagggagatggtgagggaacccccgctgtccatgccggtgttcaggcgcagccgcatcacggagggcgtgtccgaacacaccctcaccgagaccctgtccaggggctggaagtgcaccgacaccacgtccatgtcctcccgcgtgactgggtagtttgtgaggcagaaggggctgcggtccaccctgccactcctgcccaggtcctggtggtcggggctcggggacagcagaccagaggaggcattgaagctctggttttggctgctctgcagaaggggctggatggtcacgctccgtggcctgcaagctgccgagaggacaaggggtttggctggaggaaagtctggggatctggggaggggcagggccatccctccagcccttgtgcggcccacctgtgagggcagctacagcactgaaagccactgtcccgaggggccccaccaggctctcagctgtcacttgcagccaccggtcccagggcggtgagggcagcagcaggcggcagggccagggggcaccggtgcaggtgagcaccttctggaagttgctaggcagggtgaccgggcccacggtgagacgcacggggcagcccaggctcccattggacacgcagtcccgcagctccagcagaagctcccgcgtgtaatcggggacaaagaccctgcagcgaggggacacagctggctcaggctctgccattcctcagcccagggacgcagcgtgcccaggctctgctgttcctcagcccactctggtgggggccaggcatctggaccacttcccagcccaaccccaggactcagggccaggctctcgcacccactccaccgaatctgagaaggggccggagggcagagccgggctgccccccaggcccccgctcacttgaggtagctgggatgggagaggagggtctgaggaaggggcacgtccggctccatgatggaaatctcgaccacccgcgtgaccagcagttcaggctggaagacgtaggcacaggtgggagccaagccctagggaaagaacaggtgtgggcgggggcggtgtcagagaatgcaggtgtgagggcatggtctcaccagacgcccccggcatgcagggagcagggctggccccagagtgcagcgtggagcctagagcgaggaccaccccaaagaggtgaacggcagggacaggccatcgccgcaaggttctctgcctccatcccggagggcagcccccctcaccttcaactcgatcttctgggatgaggggggcaggtgggcggccacgaaccagtccccgggggccgggtg

SEQ ID NO: 27217 - DNA, 2099 bp, Artificial sequence
  DNA replication origin
acttgggcagggagcttgggctgcagagccctgggagaggcctggaggggctgtgagccctgggagtcggggactgggtgttaggacaaccttgaacagatctcttatctctgtgtacctgctgaaacttcacagccaccagctgggttctaggtgccctcaggctggcgctccagggccagaggggctgagggctttgccccagcagcccaggggctgtgtgtgctgcaggtggcctcccctgcctgcccccgcagaggccggctttctccgggacaccgtggtcctggggggctgtcctgcttcagctcccagcacttgagctttctctgcccacattatcaggccacagcctggtgggtgggacctggtggccagcagacacctggaaagcctggagtgcgtcgtgggtggagcctggccagcccctgcccagtcgccacgccaggttcccctggagcttggcctggatttgccgacaggctgctattggcaggtgtatcgtttcttctggtgcctctatgggagggtcacgaggctggcaggagagcctgctgctcacctgtctccctcctcaggaggggcctgggcctgagccagccactctccagtgagacctaggcagcgctcctgagtgtgtggggagggggagctgcagcagaggggagggtcccgccccctgctgtgtccactgtgcttttccttctgaagcctttgtcgttaattaacctcggagggaggggcccccaaagggatgtgccctccgccctgacctacccaggagaaggctgggacccagggagggaaggatgcccaaggtcgcaagggcacgaggctggagctggcacggggggctgggggtgagagcctgagtcctcgcctggggccatgagcaggatgtctcccacgggcccttctccatccccgcaccaggcgtgggtgcgttccctgaggacagttaggagccttgcccgcttggaacgcagagggcagctgtccccttgttctcatgactggccaggcttctggcctgggtccctcccacatgcagtatctccctctgggtaaggggaatttgggctccggtctcgccgtgtccaaagtcatcatagcccaagcaggcagccaacccatccagggatggagatgtgggaggctgagaggaggtgggaggaccgtgccttgatatccagggcatctgtgatgaggggcgggggctccttcctgacacctgctgggtccttcggcttcgacctgggttggccatggggagtgtagtcttctaaggttggagggggtccgggtggcagtgcgggtggggatggcagtcagagtggcgatggcagtgcgggtggcgatggcagtgtgggtggcgatggcagtgcgggtggggatggcagtgtgggtggcgatggcagtgcgggtggcgatggcagtcagggtggcgatggcagtgcgggtggggatggcagtcagagtggcgatggcagtgcgggtggcgatggcagtgcgggtggcgatggcagtgcgggtggcgatggcagtgtgggtggggatggcagtgcgggtggggatggcagtgcgggtggcgatggcagtcagggtggcgatggcagtcagggtggcgatggcagtgcgggtggggatggcagtgcgggtggcgatggcagtcagggtggcgatggctgctgaggtaccctgcggcttgtttggaagctgctgcagtgaggcggcagctgtgaaaagacccagatgccaggagggtgggatgtaggccatctggggagggacagcagaggatctggctgaggggccagagggtgtcggtgacctttgccaaggtcagagttggtgtgccaagatctccaggtgggtccccgggggcttccagccctttccatctgggggactcgtcctccccatctgcggccctggaggagggtcccggcctggctgacacctccttctcctcacagaggtggggctggtgtccgagcacttctcgcaggccccgcagaggctgtccttctacagctggtacggcagtgccaggctcttccgcttccgcgtgcccccagatgctgtgcttctacgctggc

SEQ ID NO: 27218 - DNA, 2194 bp, Artificial sequence
  DNA replication origin
gacgcgggccgggtagcgccgggccgagcgcggagccatgggccgggctggcaccgggaccgggggcgaggcggtggccgcggtggtggcggggccgctgctgctgctgctgcttgcccggcccccgcctgcctccgccggctacagcgggaagagcggtgagcgggaggcgcgggcgccatcgggggcgtggggccggggctgcgggcggggcgggattgtgacaccccgggcgcacctgtgcgctcatctggcgccggcgcggggttgggggtccccgccgcgggttgggggtgcacagtggccctttggggcgcttcgtgtcctaggggtcgaggcggacgggaccccgcgcttcctcctcggtcccccgatcggggttgggccacatcggcccctggagcgccccctcccctccctcctcctcccagagcgcccaggtccggcgcgcccggcgcggggaagtggaggggcccaggggactctgcccgggactccagctgggaggagtggctgggccgtgagctcaccggccgggtccggcctgagagaggggcagagccgggagaaagttgttagaccctgtagcgggggcccgtgggcgtcatggctccagcccttccgcagtgacccccagccctggtacggccgcttcctgccgccggcccggcttctgggaggagggactcccagctggcggaagaggggctgaggaaagggcgcccctctcccctcttgttgggaaactcgccgggctccctttgcatttctgttccctgagggtccccgtccctgactgaggtccaaggaggcggctggaccagggagaaggcgtagcccttccacggggtagggacgtgggtgtggagaccgtcaggccttggccaccctgagatggtgaggacttgccccggcctctgtggcctgggactctggaggggccgtgtcctttctggccggctggaagttcccacacgtccccagccacgcgggtgcccaggtgcccggcagctgatgcggtgctgttccccgacttcccggcccccagcccctcccctcccctgcccctgaaataatgctcctttgagctcctgtttctttcgggggctgtgcctcctgctttctgagcttggcacaggtagagatgaaaggcagttttccccgaggaccgtgccccggattaaattgctccatggccaggcgcgaagctcacgcctgcaatcccgcactttgggaggctgaggcgggtggatcacctgaggtcaggagttcgagaccagcctgaccaacatggagaaacccccttctctactaagaatacaaaattagccggcagtggtggcgcatgcctgtaatcccagccactcgggaggctgaggcaggagaatcgcttgaacccgggaggcagaggttgcggtgagccgaagtcgctccattgcactccagcctggacaacagagcgagactccatctcaaaaaaaaaaaagaaagacagaaagaaaaaaaaataacctgggtgtggtaatgtaagcctgcggttccagttacataggaagctgaggctgcggtgagccgtgttcatggcactgcactctagcctgggtgacagagtgagaccctcagaaataccaaaaccttactccgttggaaactggcaaaggaaattctcctgtcccagaactcaggcctggtgaggggttcctgggagatggaacccctgtgtgtggacagtggagaggcctggtgtgctggctcagcccctcactcctcccagcctgccgaggagtaagtgctctgtggcgttgtgggtggtcagggtctcccatgggtgcctgtcccggtttggaggacgtgggtctggggtcttcactcaggttcccaggacagggccagggacttgcattaccaccttccccacccagccctgtgtccgtggaggggctgtggggcaggcagggggctgtgtagctggccctcctcaccctgtggtcacctcggctcagagcacccctaacagcctggtatgtgtgggcaacttgggcagggagcttgggctgcagagccctgggagaggcctggaggggctgtgagccctgggagtcggggactgggtgttaggacaaccttgaacagatctcttatctctgtgtacctgctgaaacttcacagccaccagctgggttctaggtgccct

SEQ ID NO: 27219 - DNA, 1078 bp, Artificial sequence
  DNA replication origin
ccatggcccggccggtccccgccgccgtcgccccgggcacttccgcccgcaggccccgccccgcaggccgagccgggaaggcgagggcggggtcggggggcgggaccggggggggcgcggacgccggggggaggggtcacgtggggcgccggtaggggggaggggtcacgtggggcgcgcgggggacggaccggggcgcgcgcggtccggggggacgctggagggagggcgcgggatggagggatcgcgggggtcccaggacggagaggtcgcgccgggcgcgctcggaacacgcaggaaattctccccgaggcgtgggctccgcggggcttccccgccggttcgctgagtcccagctccgctcggccgggacctccgtggcaggctcggggagcccgcggggggcagaggcgccgacctccgcctgggaccgagaggaacccgcgccctgccctgccccgcccggcgcgcgtgggcctgagtcaggcgcctcagcacggggacccccgggccggccttcacgccgcagagccgctgcaggtgcgtgtcagatccacgcttttatgcacagacgagaaggctgcttgtgtttagggactgtagtacccgatcggggtggcggttcacacgggtgcgtggcatcaactcccggcgctttgcacctggatggattcccaccatgtaagatttgagccgaaaaaaggaagcgataaagcctagaaaactcggggaagctttttccgtcttagggccaagtcggcttttccaagcgtggcacagagtccagaagttccgccgcgtcgtgggtgggaggggggtgggggcgtctgcaaagccaaactgcataagcgaagtccaaaagacgagcccccgactgggaggtgggggacacagcttgcagctcacaccgcagagctcaccttaataagactagtaacagtgcagtaataaacagctctaaatcaatcacagaaacgctcccctagaaaatactgaaggacagctgccagggatacgctgatcctcctccctcagcgcagaaatgcaaattaaaaactactccagctactccggaggc

SEQ ID NO: 27220 - DNA, 979 bp, Artificial sequence
  DNA replication origin
aaatgcaaattaaaaactactccagctactccggaggctgaggccagagaatcgcctgaacccgggaagcggaggttgcagtgagccgagatcgcgccaccgcactccagcctgggcgacagagcgagactccgtctcaaaaaacaaaaacacaaaaacaaaaacaaaaacaaaaaacaaaacactaaagtgtccttcccaggatgtgagggtaaaaagtttaaaaaaaaaaaaaattaaaggaaaaccccattaaagtgacttctttttcctttcacctaacacattggcaaataaaaactgtactaacaggtgagactgtggcccacagacactgcttgcagcaggcagaggatgtgggagcctcgtgggaacccccccgacttgtccactgaagtaacagcagcaatgaccttccctcgggaattccacctctgcgtttttccctccaggtacgttcacggaagtggcacactgcatgcgtccagtgagtcaatgtggcaccgcctacatgcgtgtcactggccggtgggacattcaaatcattcatacggggtctaaacgagacagagcgtggccgagacaggaaagacaggaagcgctgtgctgcttggaaatggtccaccaggtgcagcagtagctgcaagaaaggaacaggaagaacggtgtgttcaaagctctaccatttgtgtagaaaagggagaaaaacacgtttcctttgtgtgtgtcaaaggcatcgaatgtctggaatgatccagcaccggctacactggttgaccttggaggaggagaggcggggtggggatggggatggccgcagggaccatacctgtttgtaccttttgaacgccgcagcgggtggtgagggtttacggagcgggggaggggaagctgactccacgagcccagacccctgaaggccagagcagcggaggtggagggtgttggccggggaggaaggaagccccggctgagcctt

SEQ ID NO: 27221 - DNA, 1483 bp, Artificial sequence
  DNA replication origin
ggctgccaactcgccgggcgcctgcagcctggggcctggggaggcgagaaggagccgcagagccggacgggcactggaggggcgtgcgggtgcgagccggcgccttccccaactcggacggaccccgcagcccgcgccccgaggcctctgggggagtcggaccccagcccgcacgtgcgcgcacaaaggccgagcggcgcgcgccccttcctcccctccgcgtccccgccggggcgcgcggccccactcacccgagccgtggcgcactagcaggctcgggcccggggcccgcgggccgcagcgcagcccccgcagcgcggagcgccagaagaggccgcccatgacgcccggcccgcgggccgctgtgagcgcgaggagcgggcgcggagggcggtgccagcccgagacccgcccccgcccgcccgggagccccccgccgccccggagccccccgccgccccggacccccgtggcccggcgctcacgggggaaatgttcaacgccaatttctgttaaaaatcagaagaaaaaacaaaataataatgaatccttctcgaattgcattcgtctttacaccgacgcaaccgttaactatcgttttaacgctttcccacggaggaaggcccactcgggaggctgaggcaggaggatcgcgtgagcccaggagattgaggctgcagtgagctgtgactgcaccgctgcactccagcctgagcaatagagcaagactctgtctcaaaaataaattcacggaccaaaaggaggtctagaagccctggtctgagccccctccaatggagggtgaaattcccacgtgagccccagggcgggagaaggaggcgctccggagacgctgactctgcggccaggacgagtaggcgggactacagacccgcgccaccacaaccagctaatattttaattttttgtagagatggggcctccctatgttgcccatgctggtctcaaactcctgggatcaagaaatcctcctgccttggcttcccaaggtgctgggattacagatgtgagcctggtctgtgaatttgaatggggaaaaatccgacctttattctcaaatggcctctgatgtgactgcattcctctaattcattcaattgcggatataaggaagaagccacattcatagttgcagggcctgtgactttgtcaccaacagaattcacaggtacggtaatatttgggtagatagcacagcatgctactatttgaaatggttaggtctcccactgctagaacttacttaatgagtcttgaaaaagcctgttctttttgctgctattgtgaatggaattgttttcttatttgaattgtccattgcaagtgtataacagacaattgaggtttgtttgttttcagacagagtgtcgctcttgttgcccaggctggagtgcaataatggcatatctctgctcactgcagcctccgcctcccaggttcaagcagttatcctgcctcaggc

SEQ ID NO: 27222 - DNA, 1346 bp, Artificial sequence
  DNA replication origin
ccgcgcgccccggcggggacgcggaggggaggaaggggcgcgcgccgctcggcctttgtgcgcgcacgtgcgggctggggtccgactcccccagaggcctcggggcgcgggctgcggggtccgtccgagttggggaaggcgccggctcgcacccgcacgcccctccagtgcccgtccggctctgcggctccttctcgcctccccaggccccaggctgcaggcgcccggcgagttggcagcctgggcgggtccggggcgaccgagggcccgggagcgcaaggaaggcagaggccggctgcagcactgggcggggagggggtctcccggccggggtgggggtgggggtgtgggggggtgagggagtcggggggtgggggtgggggtgtgggggggtgagggagtcggggggtgggggtggggggagccgctccgctggggcgttcgctgaaggccaagttaggccagaatctgactgggacgtcaggccccaagtccccggccccgccgctgcccggcccccccagctgccacctcacaggacgatccatgtcccagggctccctccatcggctctgaaaagtgagccgccgcctgcaatgcccgcaccagccgcagcagagccccaggctacacaaggcgccctgcaaactgggttttgggggaacaaaccaaccagggggtcttcctcccgtgggcttcagccgcctgctggggttaacttttcctcctggcctggcggagcccctttggctctgtccagattctgtgggacatacagggtctgggctcctctggaaaccagggacccgatgccggagggtagcttggctctggagcagcctgggactataggaaggtgaggacgtcttctgtttccctggcagcgtcccctccagaggaggacggctggggcggagctcagcgctgaccctgggtctggaagcgacaggccttgaaactccacagcagcacaggccccgtctcctggctcggacagaaccctgctaccttccctcttcaatcttcaggcccctttttgtccgtgtttccagggctcacctggtggggaaagtgtgtttctccctggttccctgccactcattcacctcagacacagggtgggctctgggttcttcctcatgtggaaagtcggggcttcagaccatgtctgtcgtcatccagaagggatggagtcaaaagtgaggctggagttttgcaggatctccagacttccctgaggccactgagctgggctgtgcctctgtggacctcagggtggtcgctgagctgggctgtccctccctggaccttgaggtggtccctgagctggctctgcctctatggac

SEQ ID NO: 27223 - DNA, 1082 bp, Artificial sequence
  DNA replication origin
ggatctccagacttccctgaggccactgagctgggctgtgcctctgtggacctcagggtggtcgctgagctgggctgtccctccctggaccttgaggtggtccctgagctggctctgcctctatggaccttgcggtggtggtccctgagctgggcagtgcctccctgaacctcggggcgatctcaggcagcctctgcctctgctgggaggagccatggcccctgggagaggctagaagccctggggacacattgccttgggtgtccctgacagggactatcatgggggtgtttgtggctgtgggcaccatccctgtcccttccagagtgccctgcatagaggcagacaccctgaagcctggtgacccctgggctctggctgggaaacccgggtcgtggggacgtgaaagggtgaggtggcagtgcctctgacctcttgccttttgaaggagggccctcctggacccgggagcggaccctggtggcggtgaagcccgatggcgtgcaacggcggctcgttggggacgtgatccagcgctttgagaggcggggcttcacgctggtggggatgaagatgctgcaggtagtgggactctgggcttgtgggtgtccctgtggggatggggttgggggatccttctcggcctttcacatcccagccagcgccggggcagggcctggctttggcagttgaaggggcaggagggatctattctgcggtgggggtgctgcccatgctggtgttatctgcaaggtgcctgaggtcagggcatcacagctgctgtgctagtgcccacgtttactgtctgcggctcctccttacctcaatgccacccaggcaccagagagcgtccttgccgagcactaccaggacctgcggaggaagcccttctaccctgccctcatccgctacatgagctctgggcctgtggtggccatggtacggcagggcaggggtggtggaagggcctgtgggtaaagggcgtgtgggtgtgtctttccccccagcaaagggaggggccctggattgagcccaggggcccttggtgttccccacttctccccaaccattatctctcgctg

SEQ ID NO: 27224 - DNA, 1105 bp, Artificial sequence
  DNA replication origin
gatacaccaggctgctgctgggggcaaggagggccatcacttggggtggtggcagatccacgagacctggctgtcttgctgtgctaggatgaagccaggtcggacatgacagctcacactggtgagagccgtgttctcccagggcacacagggcaatgaggtgttccctttgtgttgtgtgtaccgtgccatcgttgcctgttacctgacaccccaaggggttggcacggggcaacttggggggaaatgaggctcccaaaagctggggcctgggcgggtccacgaggctgtaagaggccgaggccaggctggaacccggtttcccagctccactgttactccttccctgtctgcagtcacaggcttgctcccctagacagagggcaacgggagcagcagatggtccctgggattcctcagggtgcacatgaagcctgagcctcacattgctcctgtcctggcacaggaatgtcatccacgccagcgactccgtggagggggcccagcgggagatccagctgtggttccagagcagtgagctggtgagctgggcagacgggggccagcacagcagcatccacccagcctgaggctcaagctgcccttaccaccccatcccccacgcaggaccaactacctccgtcagcaagaacccaagcccacatccaaacctgcctgtcccaaaccacttacttccctgttcacctctgccccaccccagcccagaggagtttgagccaccaacttcagtgcctttctgtaccccaagccagcacaagattggaccaatcctttttgcaccaaagtgccggacaacctttgtggtgggggggggtcttcacattatcataacctctcctctaaaggggaggcattaaaattcactgtgcccagcacatgggtggtacactaattatgacttcccccagctctgaggtagaaatgacgcctttatgcaagttgtaaggagttgaacagtaaagaggaagttttgcacacccagttccataacgttgttggatgtatgagccaggcaggggtccagagaccaccagcctgcaatccggagaacccaagctaggcgcgagccggtgctgtgatcccg

SEQ ID NO: 27225 - DNA, 1479 bp, Artificial sequence
  DNA replication origin
caggggcgaggctgttgacgcggatgttttggggaccccactccacagccaagtgccgcgtcatcgcgtctgcacagaagaaagttggatatgaaagggccgctctgccctctgcgagggcgcagggccaaggccaggtctcgctgcctgcagctgggctcagcttcaagtggagactgctggcctcctgggatggaagcagacggcccattggggacccacgtgggcaaacctgggcgggggggggtggtcatacccacagcggccttggcggagcctgcatgcacctggagcgcctgcccccggttccccagggtggcagtgatgttcacgatcacccctccgtggtcctgcaacacacaaggcccggggcagtgagcgggcgggtgtcgggggaggtcacaggacagtgagcgggtggctgtcagggggaggcccggggcagggagcgggcggccgtcagggggaggcccagggcagggagcgggcggccgtcatggggaggcccagggcagggagcgggcggccgtcagggggaggcccccgctgggagtacacccacccggaagaacttctcacagagcgcacaaggcacccacccggaagaacttctcacagagcgcacgaggcacccacccggaagaacttctcacagagcgcacgaggcacccacccggaagaacttctcatagagcacacgagacacattgaaggtgccgctggtatcgatgtccatcacggtcttgaaggcgttgaaggacaaggcgccagcggggcacaggaagttcccggccgcacctgcagaatgggagaccgcaggagctgctggagcctggggagagggatgccaagtgggtggtggccaggtgggcagagcggagggtgcaggagggagcccaggtgccctgtggcacagggaggagacccatgccctaggataaattccaaaatgaccagagcaagacgggcgtcctggctgcactgtgtccccgagaagagaagacatgctgaagccctggctccgtacctgcgactgtggccttgtttggaaatggggtgggttgcagagataatcgaattacactgaagtcacaacgaattagggtgagccctaaatccaatgaccagcatccttataacaagggaagaggacacacagacacacgccacgggaagacagtggcagacagtgcagcgacggtctccgagcccgggagggccaagggctatggcagtacccgaagccacgcagaaggcaggaagaggctctcccctggggccttcagagagcatagctctgccgacgccttccccttggacgttctggcctccagaactgggagattatatttcggttgttttacccacacaggtcgtagtactctgttagcccaggaaactaatacacaggatgtttttaaaagggaatttctgcagagtgaaaccagtgttggttcatcaattgtaacaaacgcaaga

SEQ ID NO: 27226 - DNA, 1205 bp, Artificial sequence
  DNA replication origin
tccatgtggctccctcaggccctggacccaggcaggcaggacacccttgaccatggggcaggggacatcccagcatcttgtctgtacccccaccacctgcgtggcacctggtcctcagacacctgcgtggcacctggccctcaggcacctgcgtggcagctccacgggccaggcccactgtccagttgctcctgccctggagttggggccgtggggagggaaagcgcagtaatagctgagtgttcagaggaggggctgggctgcaggcattgctggttcagattggtgctctccacctggctgagtgaggcggcaggaagcagcggccggaagattcctgcaggagtttcagaacttagtagccggctgaggacggcttccccctaaaacacctcggctgcctcggccacccagcacctgccagaaatgccggcagaggccgaggccgctacagaagagcaagtacaccagcgcccgcctcctgctcagccccactgggcagcacccatgtgtgggcaggctggcgcaggggccgggaggatggggacaaaggagacgccagccccgtgggtcccgcagagacctgcccatgcagtgaccagcgtccaaggacacagatgaccccaagaagcgggagcagtacctcacctagagcttagcagagaaggatgcgaaatccggcagccctttgacaccgtttgggaacgtcaaccatgccccgccatcggccaccagcacggcccccgtcacgtaggaagccagagggctggccaggtagagcacgctgtgggcgatctcggtcttgttccccagcctctgcagcgggctggcagtgaccttggtgctcaggctggcctgagggccacctggagggcagcagaaggctcaggccccgtgagccccaagacccagcaccctcccctctcccccagctcattccctgagaggcatctgggaacagcaaggacacagtcagtgtcaccaaggcctagcatggagcaggatcaggccaggcacagaacatagttgccaccatggaaccagcacagggcttttcaacatacaccctgccaaggttctggaagcttcatgggcaccctgtgccccaggagaggatctgtgggaggcctgggctccctgagagccttacccagtcgccggagcccctctgtgccactgatggggccaggggcgaggctgttgac

SEQ ID NO: 27227 - DNA, 1811 bp, Artificial sequence
  DNA replication origin
gtcccggcggggtcccagcccctcgccggcttgctgtagaggcaggcgccgggtgtgtcgcggcagtgcagcggccgcgaaggggtgttttgctgtatgtcatattcctcgtttcgccagagcgggggtcccgagcttcgggcgcgggacgcgggggtgctccgaggctgcgagtggaggcgtgacgtgacgtccctggcaagaggcgcgcggagtcaggccttacttagaacgtgttcccgccgcacagctaccagcgggcgcgaccgctacccacgcatggtgcggtcgagtaaacggcaccgcctggcgagcgagagacgcaaagggacatagccccctaggagctgagctcttcgggggtaaagcgttctcacgttgatgagaccaggaggcggcgcacgcctggctccgcggcccaggggttgcaggtgccccagggttcgcggggcgcagacgccgcagagggcgacgccctgcccgggtcccgcgcggacccgggggacgcagggtctgacacggagtgcggaggggccccagacacgcagtccatgtcccttgaaaccagaggcacgcgcggccacgcgctaggcctttcccttaagcctgtgaccaagatctccgggactcccagcgttgggacgggcgcgctggcccacgcccaagcgggaggatcgcttgcgcccaggagattgagaccagcctgagcaccaaagcgagacctcgtctctacaaaaaataagactcaagaagacacccagggtgaatcgcccgtctgcagccagcctcccgagcaccgtggccgcgtctgacaactgacctctgtgtctgggtgtccctgtcctcagagggacacgggacctcagaaaggaccacagcccggcggcaggcatgatggtgggaaagctagttaggacaggtgaggcactaaatttagcctgtcataatttgtatcagggaaatgatgaacttgtatttttacacaccatgggcaccaacacaagatatggtttcgtaagcagctttggcaagaaccaaaggaacggaacctctgcttccaagtgtacggtcaggagcagcgtgttaattaagtgagtcatcttccgtggcagaatcccagggtacatgggaccagacttcgcgaggctggcattaggaaaaggaatgtgagggatcctcctccccaaaccgtattctcattttcttgtaagagctgtacgtgttcatgaggaagatactgcattcaaagaacgaaatcaccagcagctttggcaagaattcaaatttgggctgatgccttcggccggataaaattttcagaagcagtgatagtgatgtgtcaacctttctaaataggggtgttagtgtgggcgaggcagagacagcaggctccctctgcttttatgtgccggcgctgccagaggcagaaggctggctttctgagagcaggggcccgcacgctctgtctgtgctagggctggaaaacgtccattgcgtgcccggctggtgtcctccatggaaccacagcctggaagcctgcacctccctgcctggaccagttagaggctgttcatgaaagactaaagggacaagttcccgtctatccgtctgctgttcagagctactatctgtgtcccctttgtaggctgtgggctgtagcagttccttcttttcttttcttttcttttttttccccgagacagggttttgctctgttgcccaggctgcagtgcagtggtgcgaccatagctcacggcagcctcaacctcctaggctcaagagatcctcccaccttaggccaggtgtggtag

SEQ ID NO: 27228 - DNA, 1527 bp, Artificial sequence
  DNA replication origin
ggcacaactggctccgggccctgcggagctacgcctcggagcgcccgtcggcggccccgacccgcagtccccgggcctggatgagcctgcgcccggggccgctgcagatggcggggcgcgttggagcgccgggccggccccggggctggagggaggcccgcgagaccccgggccgtccgccccgccgccgcgctccggcccgcgggggcagcttgcgagccccgacgccccgggcccagggccgcgctccgaagcgccgcttccagaactcgacccgttgttctcctggactgaggagcccgaggagtgtggccccgcgagctgcccggagagcgcgcctttccgcttgcaggggtccagcagcagccaccgagcgcggggcgaggtcgacgtcttctctcccttccccgcgcccacggcgggcgagctggcgctggagcaaggtcccgggtccccgccgcagccctcggacctcagccagacccacccccttccgagcgagcccgtggggagtcaggaggacggcccccgcctccgagccgtgttcgatgccctggacggggatggggacggtttcgtccgcatcgaggacttcatccagtttgctacggtctacggggcagagcaggtacggagcggcccgggccggggcgtgggaactgggcaggtgcgcgctggccggcggggttgatgtgggaccggtcgacgctgcccctggagtcgggaaaggcactgtcaagacctgacggtcctgctttttctgcttattcaccacttcggccctggatttctggttgaattgcgctggagtccctcttcccttcttaaaaggaggttctattctggggagtcagtttcttcccctccccccagcgcctcgtcagctggatcttaccgaggtcagctcctcgcctggggacacccccccagggggcctgatcgccacccccccagggtgcctgatcgacgtgcccctgaatgaagaagttccccgcgattcccccacccgagggcccagatactgctcggctgaattcacccaagttctagccgcagaggccaggctgcccagacgccttgagatcctactgatagacacctattttgagtacaattactttactgtgtgtggttgacatcttttctacttagatttcatcttttatttgggagacagtcaatgcttgtagagagtcctggaattaagaatttttactttggtgcctttggggaggaaggcaatgagcctcggagcttgttggcaaatgcagaagtctagcagaactccgttagggccacgtccactctcgtaggagaggtgaaatgcgtggacaggcactacgcacagtacagtgtggaaggggtccacgcggtcctcagggcacctgctcctgggggaaaggtgggccccaagatgcagttgttcctgtctacctcagcacttaataaagtttaagtggagataacagcagggccgtgtgtgttctgccaataacccggtggacatcaaataataccagtgctcac

SEQ ID NO: 27229 - DNA, 1156 bp, Artificial sequence
  DNA replication origin
cagcactttgggaggccaaggtgggtggatcacctgaggtcaggagttcgagaccagcctggccaaaacggagaaaccctgtctctactaaaaatacaaaattagctgggcgcaatggcacatgcctgtaatcccaggtactcgggaggctgaggcaggagaatcgcttgaacccgagaggcggaggttgcagtgagacgaaatcatgccattgcacttcagcttgggcaacaagagcaaaactctgtctcaaaaaaaaaaaaaaaaaaaaaaaaaccggggaacaacacacagcacgtttccccagagccatctaaagacttggcatctgagaaaacccttagagacactgtcaggcaataattctgtggaggagacagacaagacctgaggtcgaggtccaagggcatccgtctccctcactgcacctgctgactctgagggccccagccaaggtctacttatcctgcacgtgcatgaaggagggaaaggacccgccaccgtcacccctacaccgcctggccaaacatgaggaagtgagatggcctgttcagagcttcagaacttgacgtaagacggacagtgtatagtatggggactggtgagagtgtgaaaaggcacggccactgtgaagaaccgagtttaccccagcacatgacccactcctagatacaggccccaaggacttgaagacacgcatccacacaaagagttgtacacaaacgtgcccatcaccaggagaatgaagaaacgaaatacggcacaagcacgcaacggatcgtgctgggaaagggatggtgctggggaagacattgtgctggggaagacattgtgctgaggaagggatggtgctggggaagggatggtgctggggaagggatcgtgctggggaagggacggtgctggggaagggatggtgctggggaagggacggtgctggggaagggatggtgcggtgctggggaagggatggtgctggggaagggactggggaagggacggtgccgggggactggggaagggacggtgccggggaagggacggtgctgcggaagggatggtgctggggaagggatggtgctggggaagggatcgtgctggggaagggatcgtgctgaggaaagaagccaagtgagagcacgcgaaccctcaagac

SEQ ID NO: 27230 - DNA, 2104 bp, Artificial sequence
  DNA replication origin
agctgtggactgtggctgcctgtggttgccggtgtcttggcttagtgactgaaggggtgagagagtgatcgtccaaggacagcccatctccagatgtttcttagtggttgcccagccacctgacacgccaagctggggccttctcccagacaccgtccccttctctctttgctgtcacctgggccaatcccacagcagctggggcaccccgttctccttcccagcagctgacagatgggcctgggagggctcctgcgcctgtctgcttgagagggcggtgagctagtcatcgtgagccggccagggctctcctatctcactgcattagagcttgagccaggctggtggaggtggctgcagccgagggagagcacggctggcacctgtgaggaccatggatggggacacatggggcaacgggcccgtgagtgctgtcgaaccagcctgttccaggctctgggacgtagcacgaaacggcagtgcagaacccctgcccttgggagctggctttctagtgggagacagaccacaaagtaaggcaggagctagggaggcagaggagtggggaggcctccctgagaacgtctgggatgggaaggcagcatcccagcagggctgcacctggcatgtttggaggccacagggaggcagggtcagaaggagcaggtgagaggcaggcctcacaattctgtctccagctccaggctcctgaagaggatggtggggcatccctgagagctggtgtgaggggtgggacactgagctgactgcagagctgactgcagagtggagtgggcgtcagggaggaggtgcagtagcctcagggaggaggtgctgggacgtcagggaggaggtgcaggggcctcagggaggaggtgctgggacgtcagggaggaggtgcaggggcgtcagggaggaggtgcgggggcgtcagggaggaggtgcaggggcctcagggaggaggtgctgggacgtcagggaggaggtgctggggcctcagggaggaggtgctggggcgtcagggaggaggtgctggggcctcagggaggaggtgctggggcctcagggaggaggtgcaggggcgtcagggaggaggtgcaggggcgtcagggaggaggtgctggggcctcagggaggaggtgcaggggcctcagggaggaggtgcaggggcgtcagggaggaggtgctggggcctcagggaggaggtgctgggacgtcagggaggaggtgcaggggcctcagggaggaggtgctggggcctcagggaggaggtgctgggacgtcagggaggaggtgcaggggcctcagggaggaggtgcaggggcgtcagggaggaggtgcaggggcgtcagggaggaggtgctggggcgtcagggaggaggtgctggggcctcagggaggaggtgcaggggcgttggaggaggtgcagggaagtcagggaggaggtgcaggggcgttggaggaggtgcagggaagtgagggaggaggtgcaggggcgtcagggaggaggtgctggggcctcagggaggaggtgcaggggcctcagggaggaggtgcaggggcctcagggaggaggtgcaggggcgtcagggaggaggtgcagggaagtcagggaggaggtgctggggcgtcagggaggaggtgctggggcgtcagggaggaggtgcagggaagtcagggaggaggtgcaggggcgtcagggaggaggaggtcctggggcgtcagggaggcggtgctgccatggcattggacacatggcctctggggctgcggggtctgctttacttttgagtaatttgatgtcatgatttatgtttcgttcggaaggagagtgaaactagaataaaacgaagtcgaagatgattttggaattatttcatagcatttagaagaaaggaaaatgtgatcatccaaaccgcacttcagccaaagttcacttcaggtgttagctccatcgtggctgcagcagcctgtgttgtctgtcagccctgtctgcgtcgaggagtgaccagcaggatgtgctggcctagtttgctgggaagcacaaggaggctttcctgtcacagccacaggccttgtttcaggaatagaatgagatagagag

SEQ ID NO: 27231 - DNA, 1182 bp, Artificial sequence
  DNA replication origin
tttgtatttttagtagacacagggtttcaccatgtctcaatctccggacctcgtgatccgcccgcctcggcctcccaaagtgctgggattacaggtgtgagccaccgcacctggccacctggaggtgtattttcaattataaatcctgttgctgggctgccagtccaggccctgaaaggtcagtaggtaaactgaacgatgagtctgtcctgtcctattagttctagggagtctcaacaataataagataaaattaaatttgtattaaggctgggtgcggtggctcatgcccgtaatcccagcactttgcgaggctgaggtgggcagatcacgaggtcaggagatcgagaccatcctggctaacacggtgaaaccccatctctactaaaaatataaaaaattagccgggcgtggtggcgggcgcctgtagtcccagctactcgggaggctgaggccggagaatggcgtgaacccgggaggtggaacttgcagtgagccgagatcatgccactgcactccagcctgggtgacacagtgagactccatcttaaaaaaaaaaacctgtattaaaatatacattattagtctccagtcgagaaaggagagccacacagtaatttgaacagggacagtttaatactacaaagaatgggctgagtgtgggctgaaatcgcagtgctttgggaggctgaggtgggaggatcacatgagccggggaggtcgaggctgcagaggtgggaggatcacatgagcctgggaggtcgaggctgcagaggtgggaggatcacatgagccggggaggtcgaggctgcagaggtgggaggatcacatgagccggggaggtcgaggctgctgaggtgggaggatcacatgagccggggaggtcgaggctgctgaggtgggaggatcacatgagccggggaggtcgaggctgcagaggtgggaggatcacatgagccggggaggtcgaggctgcagcgagctgtggttgcaccactgcacttcagcctgggccacagagtcataccttgcctctaagaaaagataatgcaaacaaacaaacaaaaaatttaaaaaatcattagggaaaggaaaagaatgtcacaggctatgggagtaatgaggcactggttgggatgagtaaaaagaactctgcagagtgtagggacagcaggcacagga

SEQ ID NO: 27232 - DNA, 2159 bp, Artificial sequence
  DNA replication origin
gggctgacaggcgggcacaggaggcgccacgcagaggcccgggtctcctggcccaggctcacctgtgcaccagctgcaggttctcctgcctcaggcggctgtgttgctcaccggtggctgccgtgtccttttccagctccagcacacgcctttccaggaagacaaccttggcaatgagaccaggcttcagggtcaggcagccagaagcagaagggcctgcacccccaagggaacaacctgggaggccgcctggggattttctcagcacagaatcagatccacctagctaggctggtgttggatccaacttgtcccataaacccacaaaggtgcagctcctaatggggccggggtcttggggagcactgtcattcgacccacaaatgcacacagtgccgcagctctgagggctcggggcccaggggtgcctttggactggctggctggtgggcagcaagactcagccccccaacacacagttgggtctctgctcagccagatgcagctcacagaggcagcccaggtgcccatggatgcaagggacagacagatccatgtctcggtccctccctcagagagttcacaccaagatgagaatcagacacctgcggaggtaggagaaggagtgaagggagcagaggaggacttggcctgggtcagcagacttgagatgctagagaagttgtagggaggaggtggtggggatgcaagaggaggtgaagtacaggaggaggtgaggaggtacaggaggaggtgagagagtacaggaggagatgggggtataggaggaggtgggggagcaggaggaggtgagggggtacaggaggtgaggggtgcaggaggaggtaagggggtacaggagatgagggggtacaggaggtgaggggggtacaggaggagatgggggtgcaggaggaggtgaggagggtgcaggaagaggtgagggggtataggaggaggtgagggggtataggaggaggtgaggcggtacaggaggaggtgagggggtacaggaggtaaggggggtgcaggaggaggtgagggggtacaggaggaagtgaagggtacaggaagaggtgaggggggtacaggaggaggtgagggggtacaggaggtgaggggtgcacaaggaggtgagggggtacaggaggagatgggagtgcaggaggaggtgagggggtacaggaagaggtgaggggggtacaggaggaggtgagggggtacaggaggtgaggggtgcacaaggaggtgagggggtacaggaggagatgggagtgcaggaagaggtgaggggggtacaggaggaggtgagggggtacaggaggtgaggggtgcacaaggaggtaagggggtacaggaggagatgggagtgcaggaggaggtgagggggtacaggaggaggtgaggggggtacaggaggaggtgagggggtacaggaggaggtgagggggtacaggaggaggtgagggggtacaggaggtgagggggtgcacaaggaggtgagggggtacaggaggagatgggagtgcaagaggaggtgagggggtacaggaggaggtgggggggtacaggaggaggtgagggggtacaggaggtgagggggtacacaaggaggtgagggggtacaggaggaggtgagggggtacaggaggtagtgagggggtacaggaggtagtgagggggtacaggaggtggtgagggggtacaggaggtggtgagggggtacaggaggagatgaggggtacaggaggaattgagggggtacaggagtaagtgaaggggtcacagaaggtgagggggtgcagaaggtgagacggagtctccctctgtcgcccaggctggagtgcagtcgtgcaatctcggctcactgcaacctccacctcccaggttcaagtgattctcctgcctcagcctcccaaatagctgggattacagttgcccgccaccatgcgtggctaacttttgtatttttagtagagacgggttttcactatgttggccaggctgatctcaaactcctgacctcaagtgatctgcccgcctaggcctcctaatgtgctgggattccaggcgtgagccaccacatctggctgaaaagcgggtcttgaccacggcaaggctgccttgccctggctgctgtcacccattccattcaaggc

SEQ ID NO: 27233 - DNA, 1517 bp, Artificial sequence
  DNA replication origin
ccccagatggcctcgcctcccacactaaaggcacctggggtggccggagcagtgtccactgcacctaggcccagctgatacccacaggcactgcccgcttgtggcctgtggaccgcagcactcagagggcctgagcccgccaggtaacttctcctggtgcactctgtgttcatgcagctgctccacctgcagccactacacacaacgcgtgcgctcagagcccagaggcacggagcctcgggacggggcgtggaggtgccagggccactacacacaacgcgtgcgctcagagcccagaggcacggggactcgggacggggcgtggaggtgccagggccactacacacaacgagtgcgctcagagcccagaggcacggggactcgggacggggcgtggaggtgccagggccactacacacaacgcgtgcgctcagagcccagaggcacggggcctcgggacggggcgtggaggtgccagggcccaagggccacagcatttccaggaagtgagtgtctgatgagcacgtggtccgcggcagctgaacaccagagaactgagtgtgctggcggagtctgccttcagctgcagtacagtcagttcatggcacatcacccaaaggtgctcacgaggcttcctgagatgccaggtccacatgggagccaggacgagtctggctctggcagctgggcacatccgggccccagaggctgtgaggggccacaagtggggggggggcccactctgctcccagtcccctccaggctggggaagtgggtatagagaccagtcccatccaggtcacctcagagcagaggcagggcaggtgtcagctagaccacaggggaaagggaatattcccacagggcagggagaccctggccttcctgagatcttcacaaccatccgcaggagacaggactgaaccatcccaaagagaagggcacaggccctgcccactgacacagcacagcccacgccctctggccctgcctcgcacagagcctctcatccttgtggtgcctcacacgcaggagtgaacagatggccaaagatcaccagacacaacaggaaagctttcaacaggaagtggccaaagcaaacaccaagtgaggacccagggagacacatgatgcagcagacagcagggaaaggtccccgagccagcggcctccgcgagcagagagccaaagctgcagcgtcagggcagcctgctgcagaagagacaaacaacaaggaacagctcccaggaactgaaagcgtgggaaggacaatttaaaagtccgattgagatgccgggctcacgcctgtaatcccagcactctgggaggcagaggcgggcagatcacctgagatcaggagttcgagaccagcctgaccaatatggtgaaaccctgaatctactaaaaatacaaaaattagccggatgtggtggcaggtgcctgtagtcccagctactcgggaggctgaagcacgagaatcatttgaacccaggaggcagaggttgcactgagcagag

SEQ ID NO: 27234 - DNA, 1442 bp, Artificial sequence
  DNA replication origin
tcttctccacatagctttgcccctttttctaaactttcaggttattcctagccactgccggttctggggtgggcgggctgtcggaacctctcctgcctggcctgcagtttctggggtgggtgggctgtcaggaacctctcctacctggcctgcaggttctggggtgggcgggccgtcggggaacttctcctacctggcctgcaggttctggggtgggcgggccatcagggaactactcctacctggcctgcaggttctggggttggcgggccgtcaggaacctctcctacctggcctgcagtttctggggtgggcgggccgtcaggaacctctcctgcctggcctgcagtttctggggtgggcggtctgtcaagaacctctcctacctggcctgcagtttctggggtgggcgggctgtcgggaacctctcctgcctggcctgcagtttctggggtgggcgggccgtcgggaacctctcctacctggcctgcaggttctggggttggcgggccgtcggggaacttctcctacctggcctgcaggttctggggttggcgggccgtcggggaacttctcctacctggcctgcaggttctggggttggcgggccgtcggggaacttctcctacctagccggcaggttctggggttggcggactgtcggggaacttctcctacctggcctgcaggttctggggttggcgggctgtcgggaacctctcctacctggcctgcagtttctggggtgggcgggccgtcaggaacctctcctgcctggcctgcagtttctggggtgggcgggctgtcaagaacctctcctacctggcctgcagtttctggggtgggcaggctgtcgggaacctctcctgcctggcctgcagtttctggggtgggcgggccgtcgggaacctctcctacctggcctgcaggttctggggttggcgggccgtcggggaacttctcctacctggcctgcaggttctggggttggcgggccgtcggggaacttctcctacctggcctgcaggttctggggttggcgggccgtcggggaacttctcctacctggccggcaggttctggggttggcggactttcggggaacttctcctacctggcctgcaggttctggggttggcggactttcggggaacttctcctacctggcctgcaggttctggggttggcgggctgtcgggaacctcgcctacctggcctgcagtttctggggctggcgggctgttggggaccgtctcctacctggcctgcaggttctggggtggatgggctgttgggaaccgcctacctggtctgcaggttctcgatctcaatgctcttctccctctccatcttgcacaggagctccttctgacgccgggtctcttccaggaccatctcgcaggctctcagctcctgctccttcagctgctcctccagggcgt

SEQ ID NO: 27235 - DNA, 1228 bp, Artificial sequence
  DNA replication origin
aaatatatatatatatatatatatatatatgtataatatataaagactggcaccctgcctctctgtgcccaggcccagccctggtgacatggcaccactcagcagtgctgtcactgtaagcatggactcccaggagacagtgtgggaaacgctcctgctttaattccccgagaaacggctcttcctgcctggatgcaggagggcaggggccaccacagattaaagctgttactgcacacgcagaggccggcttcttcctccaggggggccacagggtggggtgggagtcttctgggcctggcccagcttccctcaaggcgtccgaggccatcagttgtctgagctcagaacccagcagacctgcctggctctgcagcttggtcagactaagacccttccaaggccgtaggattgcacctccaggcccagtggagcctggcagctttccagccaggttctggatcctgacgagctgctgagacagcatcaaggtggggcaggtggggcggggcaaattgggcagcacagggctgtgtgggcatcagggctctgggtcacacgcctctggggacgtacgtcccatgtcgggagagccgtcaaaacgtccccgggattaagagaagagtggggggcagggcgcagaggctcacgccataatctcagcactttgggaggccaaggcaggaggatcgcttgaacccgggagttcaagaccagcctgggcaacatagcaaggccccatctctaaaaaataaaaaattaaccaggcattgtggtgcgcacctatagtcccagttccttgggaggctgaggtgggagaattgcttgagtccaggagacggaggttacagtgagctgtgatcacaccgctgcactccagcctgggcgacagcgagaccccatttcagaaagaatttaaaagggcagtgatgtgcagggtggtgggaggacatcccccagaagagggggcagacacagtaccagcaccacaggcacgggaaggtgaggaggcaggtcccgacggaagtgggctcccgaggtcatgggcagccagggagtctgagagagctcagtgccactgcagccacaaagaatggcctgcggggagtggtcccatctgatcaagagtcccccaaaaacacaagccttgaaaactggaccacctggtccagcatccaggaagcggactgtgcatctgcggctctcgctctcccgccccccgcgcgag

SEQ ID NO: 27236 - DNA, 1335 bp, Artificial sequence
  DNA replication origin
tgcctgctttgtgagccacacaggcctgggtcaaaaagacgacggaccaccagcctgggcaacacacaaagcgaaacctgtctccacttaaaagataattagggtgtggtggtgtgtgcttgtggtccctgctacttgggaggcagaggcaggagcatcacttgagcccgggaggttgaggctgcagtgagctgggatggcacatggcgctccagcctgggtgactgagtccgtctcaaaaaaagaatgggcggccggacaggtgaaaataacaatggacggggccctgggagaagttcccgcctttctctgggccaccacctccaggttactggactgccagcaggtagaggggccagggtgccatccggggggccgctgagggggtccagacttcctatacctgcccttcagcagaggcaggctggggcggtcctcatgtgaggggctctgcacccacatccggggggccgctgagggggtccagccttcctatacctgcccttcagcagaggcaggatggggcggtcctcatgtgaggggctctgcacccacgtccggggctcttgttccagggcaggggcagagccgctcctctctatcctgccgggcaagactccttggtgctcttccatcgggcagaactgaccaagactcagaacattcaatgtcaggagccagctggggacaggatctgccttgggagacttggcaggcccagtgaccatcccactgcacagctgggggtgggggcgacactccagagggacacgttcgggcctcctggggggtgcaggcttctgggcacgtccaccaggcatgcacaccggccaccccaccctgctctcgctcacccacaaggtctctggcagcccttccgggaatgtttccatttcatcctgtgtcctcctgtctcaaactcctttgggctggagaccccagtgggtcatcgaggtggggccagctggactgtggacagccccatgtttaaaatctagcgtggaaactgaggtgctcctagaccacagtggggtatcaggaggaggaagctgctccccttcccctccctggctctggcctggcagcgtggagtgagttcccctccccacctccagcttctccctctaggcagagatgggtcttactggcaccacacagacccctgggtaggtgggagagcaggtctttttcctgggaggaggaacttggccttggacacacccacaccgcccatgtcactcctcagttctttttttttttgagacggagtctcgctctgttgcccaggctggagtgcggtggcgtgatcgctgctcactgcaagctccacctccc

SEQ ID NO: 27237 - DNA, 1360 bp, Artificial sequence
  DNA replication origin
agggctgcagagtgagagctggctctcctctctgcaacttggacaaggctctgggaccctgtcctccccagcttcctcacctgcatggcaggatactggccaagtgtggctttcgaaccacaggagagggtgcagtcaaggcctcactcagggaccgcaggttctcttcccttcccagtccttccctggcactgcctaggtggctccctggccaggggccagtggtctagccagcaggccttataacctccccaccagagaggcagctgcagttgaacctgttgatctgatgctgagggccctgccagctcactgcagagtggccagttctggccagttttgctaggccaggcccatttggggtgaggagagggtgggagcaccccagctctccccagtagcctgtcatggtgaaggaggaagcccattcacccagaagagggcctcaggaggcgtcttcaaggtgactgaggtttccccgcacaaggagagtgctggagggaatgggtgcgatgagagaaatgagtcactcgtgcctccgtgaggccagcctgtgattgtcttgaagattctgagtcacaagacatcaggcacacaggcgtgaattgtaaatgactgcacagcagaaggtaagtgactctggattatccagaccattgaccgagccctgctccgtgccagtgcttcctggcctgaggacacgactctcacatccagacagacctgagcagctaacgcaagtgcgcagaagctcgccaagtgcccagaagagccaagaggcgagccatgaatcccccctggaggagaagaggatggggagggccaaacagaaagaactgaaactggaggcatctgttcaggcacccagagaaagcctcacgcgcacaaagcagcaaacagaacaaaccccagtgccatcatggagcccagacttgagcacacagggaccctggcgtggagcacgagggtgccaaggcccgcaggtggctgacttgtgtgctctggtgccatgctcagatttgatgggatgaccctgcaattgcctgctttgtgagccacacaggcctgggtcaaaaagacgacggaccaccagcctgggcaacacacaaagcgaaacctgtctccacttaaaagataattagggtgtggtggtgtgtgcttgtggtccctgctacttgggaggcagaggcaggagcatcacttgagcccgggaggttgaggctgcagtgagctgggatggcacatggcgctccagcctgggtgactgagtccgtctcaaaaaaagaatgggcggccggacaggtgaaaataacaatggacggggccctgggagaagttcccgcctttctctgggccacca

SEQ ID NO: 27238 - DNA, 1602 bp, Artificial sequence
  DNA replication origin
gtcctcgggtggcgccctcccagtccgccgaccgcccgggccacttctcctgccctcgctgctggagacggccgggcccgaggcctcggtccccgggaggcgccgcgctccaggattatcagggagtggggcggcccgaggaggagctggaactacaactcccagagggccttgcgaggggcacggaggggcggggcctgcagccgcggcgtctgcgcatcagcggcgtcacagacgcgtggggctcgcggggagccgggctggggccgtccgtgtcccgcggggctctgggcggccgctcgaccgaggacccacgactccgccccgaccccgccgtgttcgcgagacccggagaccccttcgcgccttccaggaccgcccctttcgcgacgctgcgtgctgtgcttggtcctggcggccaagagcggcggtggcaaggggaccgccctggcccgagacgcggcctggcctcgcagcgtcgcttgggcacagcctctctaggccccttcgtcctcggtcgcggagggacgccattaaacggccacgccgggctcaactgggacgcggcccacggcgcccaaccagggcctgggggagggaagccggggcgactcctgggtccttccaggacccttgcgcaggcctcattctctccccggaggtccccttcccgctgccctgaggccactctcctgccagcagctgctgggccggctctcgggagaatgccttggcgtcaagcttatcaggctgcagggcgggacgcgagtgctgagggcagccagactcccgctcttaggtgcacttgaggagcctgagaaggcagtggctctgcgggagagggagacacaggagcagggctggtccgccgagattccggagagacggttgtgggccgattctgtggcgagatttacaagtgggaggttgggtgacgattgctcctgggccagaaaatctaagccagtctcagcaagacctacaaggccagggccagtgctcctcagaggatattcatgctccaggaaagccaaggatgggcctccgtcatgctgagatgccgcagcagggacacctgtgtcccacgtggagctcggcttctagctgcagtcagtgcagaagctggcaggaggggtttatttctgtcctcggaagcttttggtaaggacacttcattcctgtgtcttggacacctccccctaggtctgctgccccctctgtggagacaggcagggcagctggatgtgccgtttgttcccagactatatccatgccaaagcatcccaagggcaggaaatgtgtccccgggggccagtgggggtctgggggcacagagggctgcagagtgagagctggctctcctctctgcaacttggacaaggctctgggaccctgtcctccccagcttcctcacctgcatggcaggatactggccaagtgtggctttcgaaccacaggagagggtgcagtcaaggcctcactcagggaccgcaggttctcttcccttcccagtccttccctggcactgcctaggtggctccctggccaggggccagtggtctagccagcaggccttataacctccccaccagagaggcagct

SEQ ID NO: 27239 - DNA, 2539 bp, Artificial sequence
  DNA replication origin
ccgggcgcgccgtagccgcggggcccgggccgggcgctacgctacgaaggcagcgtaaggcgggcgccggacgcgggcaggggccggggccggagccgggtcggggcgccccgcggctgaggagcgggaggccgtccgggcagcgcggccggcggcgagaggggccccgccgctctccggaggcagaagttgtggatcggccggcgggggcgagcgggcccgggggccggggccgcgctgcccgggccgcgaggacgaggcggcgccgccgggctgtggaggtgagtcccgtcggccgggcccggccgggcgcccagccggggaccccgggcggggagcgcgggcccggagggcggcggggagcgcgggctcggcggggcgcaggaggcctcgggggccgggcgcgccgggctccgagccagggcagggacggcagggcccccggagtggggtcagcccgccgcccgctggcgcctccaggctggtgggggccagggctgggcgatgcttcgcagaggaacccagaggaaggcgggaagtcggcagggacctgggccatgtgggtcacttgaggccagccccgggggccgcgcacaccggaggcggcctcggccctgcctgcccttgagtgcccttatatccgggcccatcgtgcggtcctggccgccttagggatgttgtgcttggtgcgggcatcactcccctcacttggggaacggcctgggggcggccacctggcgtggaggggctggcgggagccccgtctgtgccagccatgccagtgttctcttccgtgttcctctggggctgctgcggcaccagctgggaagttgcaaatctgctgtcctcccgctggctgcagaaggggcccctctagtcctgaccgggggaactcttgtgtggtcagctggccctggccgggcgagctctcggggcccccttactgctctggagtttgttaccggactgcaggtaacaagacccggaaagcaatggtgaggcccagaacctgaggccaggcctgggtgtgtggggccagtggggaagactgggactccgttgggtgctgaagagttgtgtgcttctccttcgggaaacccggatctcttcctctgcccaggtctgaggggtgcggaaacgtgagtcacagttcagtgtgggagtgccccgtaattgcctccgcgtttccagagtctggggctgggcaaggatataggggtgattctcccttccggttctgagtgacttctcaactgtgaagtggggcaagagaaattgtttttctggcctgtctgggggaggcaggtcctgcaggaaaccagcttggcctggccttgggttgggtgtgccttgcctcctccgaggtccttctgcttgcgggaggagcacccctctttttcctgcttctgtctgtgtctgaggctctccagagctccttgattggcagaggagccagtgacctctgagtccccaggagagcccgaggctcagtaactgcataactgcgcagggcctcttgtctgggcctccacagaccgtggtctctgagagcaggaagtggctggtcccctgtaatgctgcatctgtgtgacagcctcaagccctgctggctctctctccgggcacccctcacttgcttcttgccctggccttgggcagcactccggtaaccccagtgccacaggtgaggaaccgaagctggagacagctgttcatggcaggggaggggccgagggaggctgagcgcctggtctctccctcctgctggttccaccagttcacacgaggcaattggagggaaggattctgctgcccggaaaatcctccggaaccacaggtgttgttcatgggcctgagccgctcagtgaagaactcggccgttggtggccgagttgcccctggtccagccctctggcccgcggtgtgatgcctctactcatggcaacaggcgtggacaggtgctgagaaggaggacgacatcattaaacaaaacagcttggggtctttgaaaaacagtgacagaaacccaggaaggctggtgacttgtcaggtctgtgtctgtcctgggtggccactcggccctggaccgtgaggctgaaatgacaggagacacggagggtgggcttgggtggtttcctcataagacacagaagaaggaggcccccaacccgggggctgcctcgtgcgctttgctctcctgttttcctgctctgtccctctggtcctgccctctgacccctggcacagcaggagtgcccagaagcccagtgggacttgttctctgcctaaagcccttccgcatccctcgtacccactcggtgtggatgtgggttttctcaccaccaggctgtgcctcagctgtgtggagccactggcctctcatgccccacgctggagagaacgctgaggtctgtgcggttctcatgtgaccctgtagctggtccctggctccccactgtgggatctgcctgcagcacttacacttgggaccgccctgtctccctgctggatgtggcgccgagggcagggtccgtttctg

SEQ ID NO: 27240 - DNA, 1649 bp, Artificial sequence
  DNA replication origin
agggtcagagtcctcctggtggaagctgaggtgcctgattaaatgcctccctttctaggcagcagcccagacgcggcacagagagggcctgggagcttgctgcagcttcaggtgagtttgttcccaagccctgcggctcgtttatgggtttgcttgcgctgcagaactgtttgtggagcagcagggttggagtgcccacggctggggggcctctcggagcccttgattcacagaacccctggaggccggcagccctgcctgccctgaagagcctcgttctcccagccgtttgggccgtggtcctgtcgtgggaggcgacggtgagggcggcccggggtcccgacaggggtgtttgtccctttggggacctcccctgtgctgtggccccggcccccagatggagctccccatccccacggcagcgctggggctggggctggtgaggagcctgtgcacggcccccaccgctatcctcagccaggagggtgcctggtccctggggagcggcctgcacctgtttctggagaatgctgtcctgccagttgtcatttggggcgggcggtcggagtccacgtcctcccccagggcggggccctggccttgtttcttgtagggacgatgggaagccctgtcctcagccctcccacccgactcatgcaggagcttcctgtccttggggtcatctcctccacaggggccttagcgtcagtggggacaaaggcagagttgcctgtcttcaggttgtgggcaccgactgagcttcgtcccggtagtggctggctcttgtttcctgcctggaccagcagcctctggtctggtgggtgcagttttagggcgcagtggggttgccgtggggcaaggccaggccaccagctgcctggacacaggggcccccgctttccatctgctgccccccacacccccagctcgggcaggggtgacaccggggcatccttgttggggtcgctgtggttcccatggtggcaagatggctctgtgaaagattgacggagatgtagggcccaggagcaggtgctgtgtgagtgggacacgcctgtgtcacctgcggggcaggggagggctcgggggtacagccgtgtacatgattagttagcgagacagtgaggagtgtatgcggagtggacacagctgtgggtgccgcccgcgcaaggctgggggtcgctgtgccagccctgctcccatgtgggctcccagctccccaggtagggacgctgaccccgggaggtgcctttgcctgcatccactggagcctcaggagcatgcgttccgtccccacgggtcacccccactgagcccaccacctaccgagaggcacctcgagaccctgtcctgccacgggtgggctgtcaaggccagcaccagagacccccagcagacctcagtggccgcagatggagcggggcggcaatggtcacctccgggactcagccctgtgctgagccccgggcagtgtgatcatcctggcccttctcgtgcacgtcccctggctggatgctccttgctgccctcacggggtgtgtgtgtggcatacaggacagggaccggccagttggccctgctcattaaccacttgtccccacagggcagtggcggcctcacctctgcaattctctgaggctggatctagg

SEQ ID NO: 27241 - DNA, 1366 bp, Artificial sequence
  DNA replication origin
cttttccgtagctgctcatcctgtactagcatctgtccatcatgagtggacggaacacagggggacccaggacccacagctgcactcgggaaggccagcagggtggatttcgggaagagcatcggtgccagtttcccacagtcacccttgcgatgggaccctcaggttggcacgtggctggcagctgtgtcccgggagctcttgctccttagtgggcctcgccagccagggcagggcccccggcacccctcacggggctcttgactcctctggcagcggatcggggcggttcagcgataccatctctggagatcccctggcgtgtgctggaaaaaccccggagagggcttaacagagccagctgtccagcctctgtgacagggacgtttgcttttctctgcagggtcctctcttctcttccgagcacccacgggaggggactgtgctgtccctgctctcctaggacaggcctccctcctgtccagatggggcccacagggtcagttgcctgagactggctccagctcaagaaaggttttctgagtgagcgcaggggagcaggaggctggtgagcagctcgcttcctgccctgggtgcagctgggcaccacttctgccttgggcctaaaggcatcagtgaggagcaggcggggcctggtaggagcctgtgtttctagcggcacgcgtgaccccaggtgccacgtgggtgagtgcgtgggtgggtgagtggcgaaggagctgaggttggccctggcaggtgtgcagtcctcacacagaacgggcagggctcctgtcagagccaaaccagctcagggcccagtgcaagcagcttctgtcccgtggcacctccgctagtcgccgctcccacccaagccctgccccgccctgacccgctcagggtttggctacagaaggggagtgtcggaaatgcccaacccgtctcccgtgagggactcctgcgtggcctgggctggggaacgcaggggccgtttgggtggttccggcgtctggcgtagccacgcgagaggccctgggttgatgcgtgggctccctgctagcgagcctgctccgtgcgtgctgggctcccggccttgcttccgtgtggcattcgagaccccgtggacctcgcctgcgtcctgcatgtttgagcgctgccccttgtggaggccgccagcactggtggctgcagggcctgtagtgtggcacgtccagagacccggcctggagaacgggtcctggatgtctccgtcatgttttacgttcgcttcacacggacgcagcgatgtctcagatacctcggatcacacagagcacgtcgccaaggcttgttttgtctgttcctttccacctgtcttacgtggatacca

SEQ ID NO: 27242 - DNA, 2418 bp, Artificial sequence
  DNA replication origin
caggaacagcttctctgcgtggagcagcacagcctgtgagaaacacagggccgccgggattgggcgcactagcccccatccccaccaccaaccagccaggccgaggccggggtctcagacctgctcagctcctgcaccctggggaagagagctgccacaactggaaggagcagggacccacttctctgcaagcacctctgccaaggagggggcaccctgagaacgaggccctctgcccccgggagccctccggggccacccctccccacctcttaccttcgggcccggggccgtgggggctggtgctgccggctgaccagggcacctccccagacgggcccccctgggccgctcctacaccagccagccgctgccgggggacccgggtagggcggtcccccggggaagctgtggtccgactcggtctctgcggccagggaggaggcggagctccccatggccccccggccggcggccgtgctgagagccggacctggtcacctctggccagcagcgggcgaagcggagcatggagggaagagacaggacggccggctgggcagagtgacacacaacaaaaataaacagacagagagagaaaatagagaagaaacagcatgattcacacacacagcccgggaggacttcccagcatgcccagccgcctggggtaggctgaggggacatctcagtgcagggcctgcggcccgacttcggcacccacagggctcctccctcggggccctaggacaccccccggcccccaaaagcccggcatcacgtctgtggtattcagagacgttttattccttggtgagaaaagagatcacacgcttttgctttatcacagaaggaagggtcaagagaacgtctacccaaaggtaggcaggggaggtagcagagggcgtagggagctgctgcaggccaggctggatgaagatctggggggccgcttcacacagctgcccacatgccactctggagacttccagaaggacgggagcccgaccatgccttgtgcacccacagagccaggccccgagaaacaaggaccctgtgaggctatggctgagggcgggggccggttcctggggtctcccctccagaggggcgagagccacccctgctgggaggcctgggagaggcacaggctgtccagggcctctgacacgcggcccacctgtgcttctgggaaggccaccttaccccctctggctgaggagaaatcaaatacagttgagaacgttaatcctgagacgggaggaccctgcccgtgcaggcagctgctctccccagagtccgatacactcccctctccctgccaagattggggccaagatggcgtcccggcaggctggccggctgtgggttgaccagcagttcctgctgtcacacacgtcacagcccttcttccagcttctgattaagtctctgggacacacagccagcgtcagggtagagcttaggaggaaagggtcaagtaagtgtcaaagctgccgtgcgtgggggatcacctgagcccaagagtttgagaccagcctgggcaacacagtgagaccctgtctttatagaaaactaaacactatccgggtgtggtggtgtgcacctgtagacctagctactcaggaggctgacgtgggaggatggcgtgagcaccacagctgcattccagcctgggagacagagccaaaaaaaaaaaaagcaccaaagaacatatcctttggagctcagggaggcctgggggcagccctaggtgagcgggctggggggggtgggggtgcagttccagcttctcccccgcgacgatggggagcagcagagggcagggatgtggggggcctttccagtcagtgctctgacacccgggaggggcctgcagctctgaggccacaggggctgagctcagcgaggcacgagcacctgggatcgcacagcagacgcgccagcccttccctggttcctccccacagccttggggacagaagcttcaagggcaggggctgagggggtgagacagagaattctggatcccctctcctttgaggcctggggcagaagccgccgagtcccccgtgtggtgataacgttcgcctgaaccacttcactcggcacgagggtccgttttctctgaaggtgctggggtcgtgggagggttgaagcattgcgggccctgcaccctggagaccctgccatcctgtggtggctcaggcctgccccgtaggcagaacggtcacaggacacacggggccagtgtggggtgcggaccagagcccagccctaagcctggtccagcccgcaagtcaacaatggcttttacatttttaaatggttggaaaaaaatcaaaaaaaaaaacaatactctgtgagaggtgggagttccatgaaattcaggcctcggggtcagcagggcacagcctg

SEQ ID NO: 27243 - DNA, 2522 bp, Artificial sequence
  DNA replication origin
gtggggatgggggctagtgcgcccaatcccggcggccctgtgtttctcacaggctgtgctgctccacgcagagaagctgttcctgaagcttctttttgggctggggtcgctggcggctgcaggctctgggcatattgcctgctgcccacggtttcaaagctgccagcactcgctgggctccgcctgctgcccccccgggggtcacaggccacatggcttggtggccgaactccacgtgctggctcctcacagctgtcaccatggccttggctacccgctgcgtccctcaggagctgccatcaggttctgaggtgcctggtctggaggcagtccaggtggtgaggtctggactggctggaccccaccgatgctcctgccgtcaccccgtcctggccctcactggaggcagggacactcaggggcccggggcctcggggccagtgctgcagtggccgccgttgctctcacagcgggtccaggcctggcttctgaaggcaatgtgcctgcgtctcacactcaaaagggcctgccaggctgcacctggcggcagctcccacgggggacgatgtcctgctgtctgttggcccccaggtgggagggacgggcgtggagctgcaggcagtgggcaaggccatggcaggtggccaggcctgggaaccagcctccaggtggcatccacgctgaggcctgagctccggccgacaaggactggggatgcaggggattagccaggggctgtgtgggggagccctggagccctgtctgcgagttaccccgatgaacagggagacgcggcagaggcagggccggggaggggccgtgtgggggagccctggagccctgtctgcgagttaccctgatggacagagagacgcggcaaaggcagggccggggaggggccgtgtggggcctggtggtcggcagaggaagggtctgtgctcctcctgcgtgtggtggcaccggagcgcctcccagttcctggtgttaccgcaccagccgcctcccagtgagcatctccacgtgtgccgacaacagctttgttgaggtagaacttaccagactcacctgttaaaagagtgcagtttggtcactcttagtggtttgtagagttgtgcagccgtcattgcaatccagcgttgcagcattccacagcccacagggacccccagccccacagtccagtgttacagcatcccgcagcccagagggaccctcagccccagacggccactgaccggcttcctgtcttggtttgccttgtgcagaaggtgcgtggatgtggggccacaggacgtggctggctgggtttgccttgtgcagaaggtgcgtggatgtggggccacaggacgtggctggctgggtttgccttgtgcagaaggtgcgtggatgtggggccacaggacgtggctggctgggtttgccttgtgcagaaggtgcgtggatgtggggccacaggacgtggctggctgggtttgccttgtgcagaaggtgcgtggacgtggggccacaggacgtggggccccgtgtctggcctcttcactcggcaccgtgccctccagattcatgcacctgcagcccgaggcagtttcattcactgctcctttgcgggatgaaccgcattttatctattcatggacgctaggactgcttccacgtggcttctgtggacaatgctgtgaacattgtttacgaggttttgcgtggacctgttttcatttatcttgcatagatacctaggagtgggattgctggggcgtgtggtgaactttcataatgtcttgaggaactgccaagccatcttccgcagcggctgcattacctagttcccaccggcaacgctggggagggtcctggcgtctccactccctcgacagctcctgccgttgtctgtccttgtgattctggccgtcccagggggtgggagctggtgtccccttggctttgatctgcgtttccctggtggccagccatgtggggcctctctccctgtctcatccacccgtgcctgtctttttttcattcattcacttatttatttatttagagacagggtcttactctgtcacccaggctggagtacagtggtgtgatcacagctcactgcagcttctacttcctgggttcaagagaacctcccatctcagcctcccaagtagctggaactacaggcgtgcaccaccatagctggttaattagaaaaaaaaaatttggccaggcgcagtagctcacgcctgtaatcccagcactttgggaggccgaggcgggtagatcacctgaggtcaggagttcaagaccagcctggccaacatggtgaaaccccatctctactaaaacaaaaattagctgggcgtggtgacgggcacctataatcctagctactagggaggctgaagcaggagaatcgcttgaacttgggaggcggaggttgcagtgagccaagattgcaccactgcactccagtgtgggcgacagagtgagactctgtctcaaaataaaaatacaaaccctgagcttgggagggt

SEQ ID NO: 27244 - DNA, 1360 bp, Artificial sequence
  DNA replication origin
ggcgacgacgtgggggaggcgacgtgggggaggcgacgtgggggaggcgacgtgggggaggcgacgggccgctccttactgcacagaggccaagctggatggaagatcgaggcaactgtacagaaaaatccagcacaaaagacccgcgcgccccagttatctgggcgttgccgacactcagctccaattcaaaagggaggtgatgaagccgctcgctgcgtgcaagacagagcccgccctgaagcagccgggacagcagcacccggagcgtggaggccgcgggcctgtgactggcgcagccccagtcctgggaggcggcccctttcttaggaaaagtgaggagcaggaagctgcattctgtcccccggggcctcggtcaaagccaccagagccctgaggccacaccgagaaacacagatgccccgtccggccggggcagccccgcaacctgtgcccagacagctctcggggcacaccggggtgccagacttggtcggcagctcctcctgctgtgcccagggcgggggataccatggggggctctgctcagtgctctgaggggcaggcgtggtgcctccctcgagctgggctgcagtctcctggtctggccacagcccggcgccggtcagccttgccagggggggtctacccttgttgcctctctgtgctgagccgccggtgcccggcccgtagatgacttactgattgagggcgccaggcactctgtcagctgtacagggacctcagccccacgccggccgcatggccgcatggccgcaggctgccctggctctcccaggctccaccagcctgtgcaccaccccttcatccatgtgggggagcggtcatggggccacagcacctgctgtcctggggcgttgggagaattcagcggccaccagggcagcgagccaggcaggcagctcttcagtaaacgccagggctgtcgcgctgaccctccccagtcccggcgccctccgtcggagcacggcaggggtcgcctgtgcatgcacgtggtggggagggctccgcgtgtggaggcccagctgccttcccgcagtctgctcgcccaccgctctcgcccatctctagcctgggggtctcctcaccatgcaccttgggggcctgtttgcagcagcagacaggagctgcctggagcccaggccccacagcagcgggcacgggcaggagtggccccagggatgccgacccaggggagggccaggcaggaggccagggtgaaagagaaagagcggcgtggcgtcatcatacaccacggcctgaccccgcaggccaggtccaaagtctaacacacgccccacatacccggcacagcagaccccacgcctgccccgcggct

SEQ ID NO: 27245 - DNA, 2537 bp, Artificial sequence
  DNA replication origin
ggccaggtggaggcgcggcaggcacgacgtggaagccggccggggccaccacttccgggaccaccagggcctcaggagggatccgtggcagcgagagcctgcgtgggcccccgcagacggagcaggagctggccacgggcgtgttgtgcagcgtgcaacgcggacacgcccagccccctctgggctccgccgctccctcctcctcctcctgctcctccttctcctcctcgtccttgtcctcgcactgccccctggcgggctccgtggccaccagccccgcagtcctcactggacctgcttcctcctggcagctgcccttgggctcccccaggatggcgggtggcttggggaggaccccgttgaggactggcaggaaggcagccccaggcgcaggctccggggtgaagccgcacacctcgcaggcctccttgcccaggaagttgcggaaggtgcagcgggcgcagggccatttctgctcctccacgctgagccgcaggatgtggttgaggtcgggcttgtgccggggagcctcgcagatggagcactggcgctggccggccgggttcaggaaggtgcagcgcacacaggaccactctccgaccgtggccatagacccgggcgagtgggtgtggctgcaagggaaggtgctcatcagggccaccctgtgaggtcctgagtggctggaccccaccctcctctcggcctggggaaggcacccgtctgtggctgcagagctacggggccgagggcctagggctgagcatttgaggcaggcggcggtgggggctgcctccacccagaatggatccatggctcagggcccctcttgcccgttggaggctcagcagaccccttgagccacacaggatcctacagagagggctgagcaccccacagccgggctgctgttccagggcactgctttctctgtcaccaggcctgtggacggcagatagcagggggtcccggccaaactcaggaccaggtcgtcctgggcgtggaagaacaggtgctcagacctacggaagggcaggtgcatgggccggggcctggggaaggcacaggctgatctgagcaaggggcctccccacaccacagcacagcctccgagacagactggctgctctgcctggcagaaaaatcaattgttcttgtaaatatggcctgaatcttgtgctccatctaaacccttttggttcaggaagaaagaaaacctgcctcttcataagaagcacaaaaacaaaaagtctccgcgagcaacacgggtgttctgtggagccgagcgaactccgtgatgctgccttccctgcgctcagccccgcgtggcgagggctctgagctgcccctggcagagtggacgggggtggactgggcccggcgaggctcagggcgtccagctggagcagagagacccaaggccgggaatctgctctaacagcgggcttctgtgaaagcccaagcaatctgcccgtagacagccaggcctctccccgccatcaccactcggagaagggcatggatgcagctgtggccggcgggctcccggccgcacctgcacgttcctcggcctggctgccgaggcggcacagcccaggcgtccggcctgggcccctgtgggtggcacagtggccatgatctttgcagcccccactccgggaggtgccttcacagactctgcaccccgctgaccgcaggtgcaggcagaggtgggctgggcctcctgggacacaccctccctttggccctgtagttgtcaccgactagcaaggacagcctcaccagctccagagaggagaatgagaacccgggtccccaggaccaaacaatcgccagcggggtgtgtctgctgggagacacctttcggagtcatcctggcaaaacccaggtgggtcaggaagacgtctgcacttcaggagggtttcaatgaagtcagaacaaggcctaaagttcaaacgtggccccgggacacgggtgaggagggcgaaggcaggccacggcccttctgtggctggagacgctgaggggagtgtcactgaccccgcagtctgcgctgtgccggcctctctcggtgggccgaggtggaagggggccaggggtcaggggtcagcggtgggagacctcggcagggcccccaccctccctgcccttctgccctggttctggtctccacaaccccccagccactctagggccaccctcacctctgcagggcctgggcaggttcatgggctcagagacccgaaacccttacaaagatgttgttttgaactttagagatggggtctgattgcccaggatggtgcagtggctcgcgcacggctcactgcagccttgacctcctgaggccagaccgccaaagcctggaagtaaaagctcgcgtcaggagcccaaagacccaaagccaggcctgagcgaagcccttttggaattctcaacccagaacgctcctgaagtcgcagccacacgtgctcagcaaggagccctcactactgcaggatggttaccttcgaagggagcgggctcagggcagacgacgt

SEQ ID NO: 27246 - DNA, 825 bp, Artificial sequence
  DNA replication origin
agcaaggaccaagggtcaggaggccaagctggaccccagggccattgggagcttggagcctcggggcggagggtgctgccctccccatcacgtcttaggccttgtgggctcctccccagcccatcgccagagcccaaagcctaggaaggggagggcgggagcaggaggctcaggagcaggaagagggcgagggggcgcctcacctcccggcagaaggccacgatgttctcccagagtgccttggcctcgccctcgtctgtctgccgccgctgctccacgtgcatgctctccctgcgcctcaggggcgcggccccccgccgctgggccaccaggagctgaggcgtgtggcaggcggcgcagtgcttggcccgcagtgcgttgagcagggtacaggcagggcaggcccactggcccgggcgctcgggcaggacgcgggcggccttctgggccgaggacacccgtccgcagcttctgccgcaggggctgggcttgtcggccccacagtcggggcagtgggtggggggctcgccatgctcctggaagccgtgcagtttggagcagccgcaggccgagcacctgggggccactgtggggtttctgagcgtgcacttggcacatgaccaggtggtgaagtcggggctggaggggctggcgggcgtgtaacgcacggtgtctccggccaggtcaatgatgtcactgcccgaggtggagctgccggcctctacgcggctggtgccaccctccgtggcctcttcctccagcacactcagccgcttgccagacagcaactctgctaggcgggaggccccagcccagcccgagccc

SEQ ID NO: 27247 - DNA, 1514 bp, Artificial sequence
  DNA replication origin
cttcgatggcgcggcccgcctggagcgcaaagtaggagccgtgcagcttggccagcgccttctcgatgagggccacccacagctgcttccgctgcgcctgcagagggccgggtcagaggccacccccgcccgccccccacactacccgccctgggagaagaggaagcagccggccttgttttcggggctggggtcagaggctgcccctgccgcccgtgcccaccctgcaggccgccccacctgtgagaagaggaggcagccggcctcatcacagggcagcatgtcgtccaccagcaccgtggtccacgtgccgtccttgcacagccgcacctggtaggcgccctctgcacacaggctgcgcgtgaccatcacccgctccaccaggtccggccgctccgccagcaccgccagggcgctcaggaacctgcgcagagcctcagggtgacctcgcggggaccgcggccggtcgcccgcccacccgccccaccccggccttggagaaggcctcaccagcagttccccagcagcccctgcaggatgtctgagggccgcagtgtgtggaacacagaccacgtggccctgtggtccctgaagacggagcagttgatctcctggggtcgcagccactgcctcacacgctgctgcacgctgtcacccgcggggaagccgacagactcgggcccgggagggaagctgtcatccacgaagctcacattgttctgcagagaccacggccatgtgctcaggctgggcagggtggcctcgctccacctggcagggacaagaccccacccaggagagcgcccaaaagcactgcctgagccccaaagggacgggtggagcgtggacagccacagacctggcgccggccctgtgtcgaggaagccctcagccctagtggagaggccaccggctggcgacaggtgaggagcaggggacgtgtgggcccagggggacagcgcagcccccagtgggtggcagcacgactctggccctggccctgctggggagggtgcaggctgcgccccagttgacccgtgggtgatgccatcctggactctagagggcggagcacgggtacatcccgacctcgcacttcagcggggtctccacgctgcccctgggaagccctcgcctcctgcggcacatcagacggggctcggggccctcctggccacggtggagggttgaggggggtgaaggtcgtgcatctcggtcaccagcaaggaccaagggtcaggaggccaagctggaccccagggccattgggagcttggagcctcggggcggagggtgctgccctccccatcacgtcttaggccttgtgggctcctccccagcccatcgccagagcccaaagcctaggaaggggagggcgggagcaggaggctcaggagcaggaagagggcgagggggcgcctcacctcccggcagaaggccacgatgttctcccagagtgccttggcctcgccctcgtctgtctgccgccgctgctccacgtgcatgctctccct

SEQ ID NO: 27248 - DNA, 1233 bp, Artificial sequence
  DNA replication origin
tgagggtcccctgtcggtgagggtccccgtcggtgagggtcccggtcggtgagggtcccctgccggtgagggtcccggtcggtgagggtcccggtcggtgagggccccggtcggtgagggtgccccgtcggtgatggccccggtcggtgagggtcccggtcggtgagggtcccctgtcggtgaggtccctggtcggtgagggtcccggtcagtgagggtcccctttcggtgagggtcccctgtctgtgagggccccggtcggtgagggtcccctgttggtgagggtcccggtcggtgagggtcccctgtcggtgagggccccggtcggtgagggccccggtcggtgagggtccccggtcggtgaggtccccggtcggtgagggccccggtcggtgagggtccccggtcggtgagggcccctgttggtgagggccccggtcggtgagggcgccccgtcggtgagggtcccggtcggtgagggccccggtcggtgagggtccccagtcggtgagggtcccggtcagtgagggtccccggtcggtgagggtcccctgtcggtgagggtcccggtcggtgagggccgctctgccacacaggttcctcatgggtgcctcctgtggcgggggcaacatgaaggtggacgattcggcctacgagagcctgggcctgcgcccccggcatgcctactccatcctggatgtccgagatgtccagggcaccaggtagggccggcctggctgagggtgggtggggtgccggtgagactcgggcagtgtggttcagatcctcacccctgtggtctgcaggcttctgcggctccgaaacccgtggggccgtttctcctggaacggcagctggtccgacgagtggccacactggccggggcacctgcgtggcgagctcatgccgcacggcagcagtgagggtgtcttctggatggagtacggcgactttgtcaggtatcggcaccgtggggcggtgtgcacgccgcccccgccctcctagggccgagtccttctctggagaacaagcctgtccctcctgctgacctggggtggggcggcttgttcgtggcccaaatgggacctggagcttcagctccaaggtgccaacctcagaattcaggtccacccaggtcagcagattccagcgccctgaagagccggccctggagggcttcctattataggcctcagggatgggcccccgggggccgggctgcaagaggacggt

SEQ ID NO: 27249 - DNA, 1369 bp, Artificial sequence
  DNA replication origin
cttttatttggtccattggagcctgagtcggaagccactgtggagaatcctatggtaaaggaacgggactgacaattgataaaatagtctctgtgtcacaagagctggccgtatttacagggttaaaaatattcacagctcagagtacagggaggccaaaggggagtgggaatgtttctccaggtgaaaaggccccggaagcccctgccggggtaggagggggagtgggggcgaggccggcccgctgccgggagtgaggggccaggagggcacgcagaaagctgggctcagacgtccacacactcctgggcttctgtggggaggtgggagcggctgagccctgcccgtgcccacgatgtgctggggtccctctctggcagggccgggccgagggacagggttggctgaggagcctgctggtcccagtgtgcccggcagcagtgagcggtgctgagaactggtgcccacccacagcgggcctggcgcccgcctgcacccagtcatggcttcgatcctggcgggcactccaggatttgcatagtgtcgctggggggctggccaagggccccttcttctgagacaggcaccgccccgggactcgccgctccacaccagggctccagggaccccgcctgccctgtgggggacagggacccgggctctgggggaaaactgaccttatgccccgtgaggggtggtccctgatcccaccccagggtcttggcctctgacacccagatttggttttgcggacagagctcctggctgcctagcccgcaggagaccctgagcccacagggaggggcagcctggcctcggcccccgtcgggtgttggggctggcaggtgagcggggctggttcacagcccgcctggttcgaggtattctgcgtggcggccaggaggcctggccaggcggactgtggggttcagggaggggaaggaggggggcggggggcccatgggaagctgagccctgggctggcagctccctgggcggggtcctgagattctggctcaagcgtcctctgtcggggtctccctcataaagtgcgtgtgggggtggggggtccgtctgtgcacagcccctgccccaggcatggtggtcacagcggtcggggcccatgcagaccggcgacctctggcgtgagtggggggctgtgggtccccttggaggctgtccagtcactgaggaaggcctgggctgccttgcgatgtgccaggcggtgggtgatagagaagccggcgttgccctctagctgggacaagatcaccaggacctgcctgggggaggggaccggtgaggacctgtggagggcagggtggggatgggggcagggctgtgcccacctgtacaggggcaggagcag

SEQ ID NO: 27250 - DNA, 931 bp, Artificial sequence
  DNA replication origin
cgggctgtgaaccagccccgctcacctgccagccccaacacccgacgggggccgaggccaggctgcccctccctgtgggctcagggtctcctgcgggctaggcagccaggagctctgtccgcaaaaccaaatctgggtgtcagaggccaagaccctggggtgggatcagggaccacccctcacggggcataaggtcagttttcccccagagcccgggtccctgtcccccacagggcaggcggggtccctggagccctggtgtggagcggcgagtcccggggcggtgcctgtctcagaagaaggggcccttggccagccccccagcgacactatgcaaatcctggagtgcccgccaggatcgaagccatgactgggtgcaggcgggcgccaggcccgctgtgggtgggcaccagttctcagcaccgctcactgctgccgggcacactgggaccagcaggctcctcagccaaccctgtccctcggcccggccctgccagagagggaccccagcacatcgtgggcacgggcagggctcagccgctcccacctccccacagaagcccaggagtgtgtggacgtctgagcccagctttctgcgtgccctcctggcccctcactcccggcagcgggccggcctcgcccccactccccctcctaccccggcaggggcttccggggccttttcacctggagaaacattcccactcccctttggcctccctgtactctgagctgtgaatatttttaaccctgtaaatacggccagctcttgtgacacagagactattttatcaattgtcagtcccgttcctttaccataggattctccacagtggcttccgactcaggctccaatggaccaaataaaagcgttttgttttgtaatcacgcctcctcctcctgctgttgccccgcgcagggccctgtggaa

SEQ ID NO: 27251 - DNA, 1903 bp, Artificial sequence
  DNA replication origin
acgggaggctgaggctgctcgagcccccaccggctcccgagcctggcactggccagcagcgcccggggccgacagcagccatatgttgggaagaggagctgtgtgtgtctctctgcggcccccggggctggccttcctgggcctgtcacagatgattttccccgcctgagtggcaggcgggctggcgggcggggtggcggggcctccaactggcaggtggggtggtggggccccatgtccagcccccccatagccctcagcaccagggctggccactgttggggtagatccgggtcctgggccttggcctcccaccccccaaaacctcactgagcacccccggcctgccatggccacccctgcccaggtctaggtcggggtcctagaggagccctggccggccagtggggagcgggcactcctgccaggacatgggcaggcagccaggggtccacactgggcagcagtgcgccccgggcaggcgggagagggcctggagccgcggcccagtcagcctggagcccagagctgtggaaggaggcgaggaggccacggctaatttgtacactaaatgcttctgacagcgatgcctcataagtgagaacttgccactgcccaccccgggaaggctgtggccagcagcgccaacaagaggggccaggagagggcaccgtgggggcacagggctgggacagaccagatacaccagagagatggtgctgttggtgggggtgagacccaggaggagatgcgggggaggggagaggcctgcacagagaagggaggggagggctgggcgggggccgggcagtgacagtgggaaggagtcagccccgacagctgccaccaaggtctgccccgcgccagggctgtgtgtcctgcccagccaatcctccctgctgcctgcaggacgctcgcatcttttccccttacctgctgccagccgcctcctccaggcctccgcagcagcccctcacgtggccccggcccaacacctggcagggtctgtgctgtgggaccctgagtcctctgcagacgccccccctttccctcatcacctccctgtgggagctgctcccgggggctttcaagtggagaggaggctgctggctgggctagtggggactctgggcagctgagggggtgggcacggaccccttgcctgctgtgcgggactcctgcaagaaggagggtccttcttgtgggcctctgtcctgggccaccccaggactggggtggcagaagccagagaggtgggtggtggtgggggtggggccagggacagaggagcagggtctcgggaggaacgggggtcccagataccccaggactagacagagccagctctgtgccaaacaggagcgggcacgagcccggcccccacccacaggaggagtgtgacgtggcgcagtcgcggagcagcagggccggcgtccgcgggcaccgaggtgagatgtgttctggcagctccccgccgcccgaggcccgcccggagcgaacactgctggtggctttaattgctttcacattcgatacgctgcccgtgacagcctcttaccccgcgccggccgcaccccagcccccaactccgtccagggagacagcagagcctccgagcgggcgctttgctcagcagcacccgtgtgggggcagaggccaccctgggacgaggctgggaggggacaggaaacttttctccccacgcgccccctcactccatctgctcctgccgggtgactgatgggttcagacagagccccccgtgcggatgcctcgctggaagaagctgcatgcgctgctgtcccgtctgcccagtccttcccggccctggggctgcggccgcagggtctgacccctgcccccgcccagtcactccgtccttcctggctgcgtccatttggca

SEQ ID NO: 27252 - DNA, 1656 bp, Artificial sequence
  DNA replication origin
cacctgtgcccccacccccccaactttctggcccatggcccccatctgcagaatgggcagtggggtgctcagtgtccgggcacttctgctctggtcctagtgggtgccctgatgtctccttagccagtcccagtgcagggtgggatggggaccccatggcccctccttctgcctccagccagaagctcatttttggccattaacctcttctgcccggtctgcccacggctgcccgcctgtcacctccattaacaatgggactctgtgccgggggctcacgggcaggacggagagctgggctcagagaaggcagcggaggcagcgctcggcatggccagtgcccgggggcaggcctgtctcatcccctcagtgtcgacacacagccagtgtcaggacaggtgcaggggccggggtgcctgcacccacacagtgagggcagtgtcagggctgcagccaggctggaggccccacgcaggtcctgagaccggggcaatctatccagcggcagcaggttggagcccccacgtggggtcagtaccttgcaaggtgtccggacacagctgatgtctgtcctttcaataacggaccccagggcctgtggccaccctgagcacttcaagaaccccaggtctacagagcataggcctcctgggggcttcctccttgctgcccacttgaggatccctggttgagaggggcagcccagccttggcggaaggggtcatggatacacgtgagggccctcggcaccagcctgaggctgctggccttgatgggcgggtacacagtgggggtgccaggggagaacggagggggctgggcaaccgagtgggccagagcgcccaggacaacggcccaagggtgtggggggcacacgaagagcctgcggagctctggggtccctgggtccatccacctgagggaacgggggccctgttaggaggcgcctgaatgggggctccaggagtcttccggctcgagcactaccagggatagtcctccccagcagccctgaccatcccagagtccacaccagagagtcccctccccacccgcctcccggctctggaagaccccagctgggcccttccccatgcactacactctcatagacgtgccgggtcactggccaccctgggccgggtgcggggctgaccctctgtgtgtcctgagcctctgggacggaggagggtacaggacgctccttggagggctgagctgctgtggtgggagtgagccccgtcccaggaggctgggatgtagactgacagagggggcagccagccaggcgggtgggacgggaggctgaggctgctcgagcccccaccggctcccgagcctggcactggccagcagcgcccggggccgacagcagccatatgttgggaagaggagctgtgtgtgtctctctgcggcccccggggctggccttcctgggcctgtcacagatgattttccccgcctgagtggcaggcgggctggcgggcggggtggcggggcctccaactggcaggtggggtggtggggccccatgtccagcccccccatagccctcagcaccagggctggccactgttggggtagatccgggtcctgggccttggcctcccaccccccaaaacctcactgagcacccccggcctgccatggccaccc

SEQ ID NO: 27253 - DNA, 1505 bp, Artificial sequence
  DNA replication origin
ggacctggggctctctgcaggctcagccgcaggctcccgggctgtccccagctcaggtcggggtcaggggtgccttggggaagaagggaggaccccacggggcttctgggtgtcacccctcgaatggggcagagaagagagctcagcagcatctccgtggccccggtccggctgctggcagagccccctggtagagcacacccagggtccatgaggaacagcccctggttctggggtgggcgtggggctctgtctccctcctgcctccatgccaccttccctgacacagccgcacacgcccgtctgagggaagtccctggggcggggcaggggactgggaggggtgctgtggatggcagagcatgccagccttctctctgcccacctggcctggcccagctgaccagctgaccgtgcaggcagctccgggccgggagacagcttgggctgccgtcacgccagcagccccgtggagagcgggggccaggaggccggctgcttctgtacatagactctactctggacgtgttcagctgagcactgccccgggagactagggtccaaggtcaccctgacaccagtagtccctcagtggccagcccgagactgacccctttgaaggtctggaagaggccacagctgacagcacaggagaccaactggctggaggctctggccattgtccaggggaggaaagtagggagcagggaggcctggtcttggagcacctagatgtcagcatacaggaaataaagcccagtgaagctcaggggaccaaggagccccagagggggaacaaggccgtgtctagcgctgagcaggctgaaggagcacctccacccctcaccaccgatgggcctttgcagaagtttgcatgagaagagaagaggggcagcctcgagaggggccccggggcacaacttggacgtgtttctggcctcccggaaggactctggcagggaggatgagggggccctgcacctgctggtgggggtcctgagattcagccgtgcacgaggtggggggtgaggagcatgtgaggccagtacactgggtgcccagatgactgttcccatcacaaacagccaggcgaggccgggatatcagtgccagcaccccgcaaccacagggccccctgggcacgtcagcttcctcactgtggccatgacccacctgcttggtcccagctcttgcacactgggctgactttgggtttggagaggtggcttctgcttcctgaggcagtgactgggactctgttttggcacctgtgcccccacccccccaactttctggcccatggcccccatctgcagaatgggcagtggggtgctcagtgtccgggcacttctgctctggtcctagtgggtgccctgatgtctccttagccagtcccagtgcagggtgggatggggaccccatggcccctccttctgcctccagccagaagctcatttttggccattaacctcttctgcccggtctgcccacggctgcccgcctgt

SEQ ID NO: 27254 - DNA, 1611 bp, Artificial sequence
  DNA replication origin
cgcgtccccccgacgccgctcgcacctcccgaagttggcggcagaggcgggcgcgcgtgcgcctgggctccgggctccggggggcgctgcgacctccgaccgcgctcgcggcgggagggaaggagcagcccccggcccgaaccccgcgcccccgccgcccgcgcgccccccgccgccccctggcgcgcactcaccggcctcgtgcgccgggaccggctcagctctcggggcgcgcggtggagcggccgggaacccgggaggcagcggacggagagcggactgcggcgcaggtgtgcggccgagtcaggggcgcccggcgcctcccgcccccgttgcccgcaggctgccgcgggggtgcacagaggccgccaggtctcccgggtccccgccgcggcgtgatgggtgtcagcggcgcggggcgcgggagaggggccgtcagcgcttatccatcagggctctggcccctgacagccgccggcccacccgagccagggcccctgggggctgtcctgggggacaggggtgccgcggactgagccagcggagccgggctcccttccttgccctccctgggcgagccctgccctccgttctcttttcctctaaaccggaggctgcccggaccggcccctcgcaccccgccctgccggctgaccgcctccacctggggctggtctccagcaccctcccccttcctggatgcggacccctccagccctcactcccggctcctgtgggaggtgcctcagcgctgccccacgaggccacgcacttccctgctgtttgaaagaccccctccccacgggagtcccctcctgagaggacctggggcggtggaggagagaagcagggccagggctgctcccagccccacctcccgggctgcaccaagttccaagcagctccctgagctgccagaacgtaaaggcctggagccccactgctcagctggggcctaggggaggttcgcctgaccggcctgctccctcccggacacaggcatggctggggcagagcccctgacttcgctcaggggagacgtcctaaacccgacacttgcggtaggcgggcgtctcggggtctccagccagaggggagtgtgctactccctgctgactctgaaacagcacagggagcccggcccacatagctccccaggacctggggctctctgcaggctcagccgcaggctcccgggctgtccccagctcaggtcggggtcaggggtgccttggggaagaagggaggaccccacggggcttctgggtgtcacccctcgaatggggcagagaagagagctcagcagcatctccgtggccccggtccggctgctggcagagccccctggtagagcacacccagggtccatgaggaacagcccctggttctggggtgggcgtggggctctgtctccctcctgcctccatgccaccttccctgacacagccgcacacgcccgtctgagggaagtccctggggcggggcaggggactgggaggggtgctgtggatggcagagcatgccagccttctctctgcccacctggcctggcccagctgaccagctgaccgtgcaggcagctccgggccgggagacagcttgggctgccgt

SEQ ID NO: 27255 - DNA, 2545 bp, Artificial sequence
  DNA replication origin
ctcccggcgccgggcctcagtttcccccacgggagccgcatcccacccccagagccccagcgcgtccgcggggtccgagtcgcggccggcgcggggcggggaggggcgggaagtttgcgccctacacgcggcctcgcagacttggcggctccgctcccggccgggcgcaggtaggagcggcgggagccgcgggggcggccagttgggcgtcgcggggccggctggacgcggggcgcgggggcagcgggtggccaggcgtgtggggggcgcggggggcggccgggtcccccccaccctcttctcgaagtccaggagcagcgcggggggagggagggccgccctcaggggccaggcggggagggcaggggccgggtctggggtctggggcagacgcctgacctcgcgctcgccgcacccgcctgtgtggggcgccctgcgttcccgggggggggggcagcaggatctgcgggtggccgatcagggtccccggctgctgggtgccccctcctgccctgtgggggtgcctgtgccccccgtgccaccggttctcccccagctctcccccaaacagggacaggtgagtggggccgggtgtcggggcctggcacagggctgctggctgccccgggagcgattgccgggtccggctgggacgcgcgtgtgagtgcgtatgcgtttgtgtgtgcgtgtggctgctgtccaggggtgtcttttgctctgtgtacacacaccaggtgggtgccagctatcctccgggtccccaaggggtcagcagctgctgagacagccccttggacaagcccctgacccgggagcccccggtccctgctgggaggcgggatgggttgtggcatcggctggcacagctgtgtggctcccagggctgggtgatcgatggcccggcacagccgcctctgtcgccggagcgcccacacccatttgtcatccacatgggtggggggggcggcgggcagggagaaggggccgcctctgcacccaccacccagtccaggccgggtctgcagcccctcggggagccccaggacctctcctggcccagcccctgcctcccgaccgccaccctgtctcagccacagaccagctggtcagcctctgcctgcccctgcagcccgtgactgccctgcagggccccaagcctttggacgagtggacttctccagccctgttggtcgtccccccaacggcaccaacacagtgttttgggggcagcagacagcagtgccccagccctaccctgctcaacccactggccatgcatgaccacgggtgcgacccccagccaggtctgcgtgtgtcctggggagtcggtgtgtagggcctgtgtgagcatgtgagtgccgtgttggagtggtttggaaagcccccccacacctggatgggtggtgagtgtgttatcacggacaagcagccgtgttcaccgtgatggagtgtgaggtgtgtgcagccagggccccgcacttggtggcagactccgttctgagcttaggtggcacagaggtggcttctccgggcactgggtgagggctctgtgtgagcctgtgggctgtgtacacacacccaaagcccgtgtgcgcaggcgtgctgtgcaccccacacaggcgcgtgctggggcggtggacagcccaggtggcggcccagatggagtgtggcgcgcataccagcgccgtgtggggcgtggggaggagcgggtcttggctgagtgtggccgctgcaggctcggccgctgacctgcccgaagccacccagatggagctgggctgagcaggtggctgagccgtggggccatgctgggacgtccactccccacagcctggcctggccccacatgagactgaccccctaagagacccccagtgcccacctgacgccctgctagagcaggctctgtgccgcctttagacacacacgcatacacacgcactcacacatgcatgcatgcacacatgcacacacaatgcacacacgtgcacatgaacacaagcatgcacagaggcacatgcacacacaggcgcacacacgtgtgcacacacacgcacatgcacgcacacacacgtgcatgcacacgcacacatgcacacacacagacacacacaggcacacacacacacacgcagcatcatcccacacagacccttccgttggtgtctcatctcagtgccttttcctaggctttgaacaggcagattggcaggggccagggttgctggagggaatgagaccaggaggctgacgtccacccgaagtgagctctggtcacgctgattcttttagccactcacatgctgtggggagatgggtgtgggctgaactatcctagaaattggccagcaagtcggcctggcctcaggggtggggatgtgtgtagggtcaaccgataaaataaaggacgcctagttaaaatcgaatttccgataaacaatgaacacctttctagtgtgcctttccaatattgcctaggctacacttaacactcagaaatgacgtgctgctgatcggcgtcagatgcagctcgctgtcctggact

SEQ ID NO: 27256 - DNA, 962 bp, Artificial sequence
  DNA replication origin
gagggggctgcacggctgggaaggccgtggccgggggcagcagggggctggccgaggccaggaagggcacatgggctgcagcggccagtgagggccccaagtaggagaagaggccggggctgagcgggtagttgacgcccagcagagacaggtggaggctgtgggcctcagggaactcccctggggcaggcgggggatagcaggggacgctgccctcagggcctgctgaggccatgtcccccgcacccacgccccttgggtcccctcccatccccggcttccacgactcaggcaggagcccactggggccgggacccttccgggtggccctagccacagggggtggtggccctggggaccccttggccctggacttggggcctccgccacagtgcagggagtggatgtcggcgaccacgaggtcaggcgcgggggcagcacctgtgggccgtgctccctggggttgcctgccggggtcggactccccagggcggtctggggtgggtgcgtggggcctaggcgtggtggagccacggcggcacgcccagtctggggagtctagcagcagggacagggagtccttgcagaggctgtacttcatgtggttgtagaggtgtgacttctccaggcaggtgaaggggcactggaagcatttgtagttgtagggtttgccccagggccgcgggatgtagtgtggcttcttgggcttccgagaccgcgccctcgcccctgtgcccacgcggcatgagcccgcctcccgcgacatggcagcctgctatgaggcagggccgggcaccatggccacctgtagatggggccacagtcagtgccaagcctgcctctgactaactccccactcctctccatccatggctccccaggctccagggactggagcctgggtgctccccccaccccgccgcctctgccctgcaacgtgccccccgagccccatccttcgg

SEQ ID NO: 27257 - DNA, 864 bp, Artificial sequence
  DNA replication origin
tgtctgctcagtgggggtgagaaactgaggtgcagtggacatatggggtgcagtggacatatggggggcgggggctgaggacagggagtctccctcagactcgggacttgggaacagttcctggctgcccagagccccctgcagcccctccaggaagcctctgggtagaggggcccggctgggacctgtccccacagcactccgcgcctggccaggcagcaccccagctctagctgccccgaggcagggtcggggctgatgctatctccctggtagttaatggggccgctgccagcctgcttggactggccccagcccggctggacgcaggcaggaactgcttctcctcctgggggggcgatgtgggctccagagcccattccagggtgggcgtggagggtgtggccagctctcccaggagagaagtgatttgctgtgggggtcccgggtgcccctccctgtctgcccatcccctgcccgtgggagggccaagccaggccctgctgggagggaggcagtgagctgtgaaggctgatacctatcacggctgcaggggctggcaggggccagcagagcccacgctgggtgagcagcctccagccacagagccccggggccaccgtttaaccgcaggagagctgatatgagcgcggccttgctggattcagaggctagaggatgttcaggggtccgtgcccacccccgacacaccaagacacaggccgagcagcccagtccacacgcctctccacccccgacacaccaagacacaggccgagcagcccagtccacacggctctcctggctcagctcccgtcgccgatgtcccgccccacccccagaccccagccccgcggggagggc

SEQ ID NO: 27258 - DNA, 1703 bp, Artificial sequence
  DNA replication origin
gcgctcatatcagctctcctgcggttaaacggtggccccggggctctgtggctggaggctgctcacccagcgtgggctctgctggcccctgccagcccctgcagccgtgataggtatcagccttcacagctcactgcctccctcccagcagggcctggcttggccctcccacgggcaggggatgggcagacagggaggggcacccgggacccccacagcaaatcacttctctcctgggagagctggccacaccctccacgcccaccctggaatgggctctggagcccacatcgcccccccaggaggagaagcagttcctgcctgcgtccagccgggctggggccagtccaagcaggctggcagcggccccattaactaccagggagatagcatcagccccgaccctgcctcggggcagctagagctggggtgctgcctggccaggcgcggagtgctgtggggacaggtcccagccgggcccctctacccagaggcttcctggaggggctgcagggggctctgggcagccaggaactgttcccaagtcccgagtctgagggagactccctgtcctcagcccccgccccccatatgtccactgcaccccatatgtccactgcacctcagtttctcacccccactgagcagacaggtgagcatggccttgctgggggcaacagcacccgtctcccaggtgtggagacacgacctccttcgctgtcacccgtggggagcaggacaggcctcatggagggtgcctcagccagcaggtcacccgcctgtggtccagacccaaggaccctgcttgggggtggcagcctggggctgccttgccacttggagtaatgaacttgctggttgtggggggaccatgggggacccctggaggggggtgggctgcatggcatctggccgtgtaggggacgtgggaatagtgtccgggcagagggcgcagcctgcaacaaggcgcggaggcaggaacaccacagcatggggagtcctcaggggacctggtttttctttcatagaagcttcaggggccaaggccggagactgcactctccctcctccacccggcccagctgcgtccctgccagtggctcctcccacttcctccagttctagtttccaacaacagaggctgcagccacccagccccgaagcagggcccagcgagacagggcccaggtaagagacccctccccccggcctctctcggtggggcaggtggaggccctcggaataggctgcctcgcccctaaggggtcagaagtctccctgacctaggggctcgggtagaagggctgtgtgtgggtgaccgcccccccgccgtagaaaggggttccacaggcagatggatttgagaaatgttgcttatctgtctgaggcccatgagctcatctggggctcaggggaaaacccacagcgagctccacgggtcatgtgtctcccagactcaagtcccaggcacctagacactagggtggccgctgggcttggtggccaggtagaccctcaggaccaggaggacccggcctcataggaagaaactggaggagtgactttgccattcccacacacagtggggccttattctctctcttgcagccccaagcgtgacccagctgcagagaagctgagacggtgattcggactgactggactctggcctccaggtgtctgcacctcacactggacccacc

SEQ ID NO: 27259 - DNA, 1598 bp, Artificial sequence
  DNA replication origin
ctgggtgggcccagggcctgatgggggccttgctgtgagtgaggagtttggggatgtgaggctgtttggcagtgcccgccaacccctgggctccctggggggctggacggggcacactttcggctgcccagcgggcatctgctccaactcagagggcaatgttattgtggcagacgagcagaggcgccaggtgaccctgtttccccgggctgggccacccatctgcctggtgtcagaggggcttgggcagcccttgggagtggcctgtgcaccccagggccagctcctggtggctgatgccaaggacaactccatcaaggtgtaccagggcctcaaggagctggcctgacctgaggctgggttggagcagccctcctgtgcctgaggccagctcccaggcccttggatcaccgcgggaggaaccctcaggatgggtggagcctccaggctatgggcattgcctgcctgatgccagcaccacctgggctgggccctgggcttggctcgagttctcctgctggtgaggctccggatctcaggagcagccctgagtctgcttcccaggctgcccctgccaggcctgcagcctccccagccagggctgctctctgctgtccccattcagtgccctggcccctgcattcatgccccccacaccccctcaggccctgtgcctggactttggggctggcagctgaagccttgagatcctgggccagctgccggcacacagctaggcagactctcccaccaggtgcccctgcccaggcctcctaatcgggggcagacaggcagggagggtgtggctgggctgggctgggcggggcggcctggggcaggggtgtggcccctaaatgtccccaacctcagagggacctagagtcctgagcctccagtagcttctctgggcctggcagaggtaagggggaggcaaccctggagtgtctggaggcccatggctggctgaaccctggatgccttttcttccgcgtccccatgaatgaaagctgtctgggccttcattctgcagacagggacaaacagctccatgctgtttgtcctcccagtgcagccgtgctgggagggtctgggggagcttcctacaaggagagactcctgctgctttggaaaactgagaaaaaataggggtctaaccctctcctcccattttacaagtggggaaatgaggcgtgaaaggagaggcgtctgggttactccgtgggtctggggtccagggaagggcctgtatgggggagggagctgggaggggacggtgtctggctctacccctgtggggtggggaggtggggctcccctgtatcacaggacatcccccctgagaggtccctcatatgtctgggtcctgtgggtgggggactaactgcgcaatgtagttaggtgctcaataaacggagttgccgctgaggtctgggctggggtcttgttcctgggatcgggaggggctggacgcctgtgtgttctctcctgacgatcgctggcggcagcctctgggctggtcctaccagggctcaaaattcccggcaccactggccttggggatctgggggcggcccctctgcagacaacagagtgacggg

SEQ ID NO: 27260 - DNA, 1533 bp, Artificial sequence
  DNA replication origin
gcgggcagccccccagaaggtccctgcctcccacaagcccctccctgggggcaggaaggacctgcctcgttgctcagggcacacagggcttcggcctccactctgacccccgcccacggtggcacccggcagtgcctggccctccctgacatccccacagccaccccagggcagggctccctcagggagcattttctctccaggatatatttctccaacgacatgggtgcctagaaacggggagagagaggcttacaggtcccggaggtgtggagaaactgcatcctgcactctcaggctgagggacaccagccttccaaggtggctgttgagtaggaagccacctgagctaccgcggttcccaggccctgggcctctcctccccctttctcacaggcccctgcggagccatgcagccagctggggctccttctccactgatgccttccctggcggggccccacagggcaggaggactccctagcggtgggggcactactggccggctggctgggccgctcgccttcctcagacacagaaagccccatctcgcctgcacgaagagtggagcggccaccctgagcagagaccccccacgctggagccacactcgagggagggacatagcttggcctgagcctgggtctggaggtcccagcgcccaccacgcccttagggacgagggaacagagcgggacgcctggaggtcgcagtgcccaccacatccttagggacgagggaacagagcgggacgcctggaggtcccagtgcccaccacatccttagggacgagggaacagagcgggacgcctggaggtcccagtgcccaccacgcccttagggacgagggaacagagtgggatgcctggaggtctcagagcccaccacgcccttagggatgagggaacagaccaggatgcctggaggtctcagagcccaccacatccttagggacgagggaacagagcaggatgcacacgtcggggtggtgtgacctgtaagtcctctcccgaagcttggaggggctctggaagaggcctcacacggaaatgcctggggcttaagaggcccctggtgcagctgctctcctcccctgcaggcagcccgcactggggctggaggatccagtcactcaaggcggtgggttctagctgaaaagggaccttctgggtcaggctgcagaactcctcaaatgcccatttcctcagtggtcagagagggcaggcggcgggtggatgcctggaggccagctgacgtgaggcaccaaggacatcgtgagagggacaaagtgattctgcctgcaaggggcccagcgtgtctggctgtgtgaccaccataggggaccacccagtacagcccacctttcacaccagctcagcccagggacccatcacgccctgctggggaagagctttcacagggactaaggaaaactgcccacagatatcgtcggaaaagaaacacaatgggtctaacagtaaacagatgttctagggggagctggttctgcggtgggctcactttgggtaaatt

SEQ ID NO: 27261 - DNA, 1161 bp, Artificial sequence
  DNA replication origin
gctctgagacctccaggcatcctggtctgttccctcatccctaagggcgtggtgggctctgagacctccaggcatcccactctgttccctcgtccctaagggcgtggtgggcactgggacctccaggcgtcccgctctgttccctcgtccctaaggatgtggtgggcactgggacctccaggcgtcccgctctgttccctcgtccctaaggatgtggtgggcactgcgacctccaggcgtcccgctctgttccctcgtccctaagggcgtggtgggcgctgggacctccagacccaggctcaggccaagctatgtccctccctcgagtgtggctccagcgtggggggtctctgctcagggtggccgctccactcttcgtgcaggcgagatggggctttctgtgtctgaggaaggcgagcggcccagccagccggccagtagtgcccccaccgctagggagtcctcctgccctgtggggccccgccagggaaggcatcagtggagaaggagccccagctggctgcatggctccgcaggggcctgtgagaaagggggaggagaggcccagggcctgggaaccgcggtagctcaggtggcttcctactcaacagccaccttggaaggctggtgtccctcagcctgagagtgcaggatgcagtttctccacacctccgggacctgtaagcctctctctccccgtttctaggcacccatgtcgttggagaaatatatcctggagagaaaatgctccctgagggagccctgccctggggtggctgtggggatgtcagggagggccaggcactgccgggtgccaccgtgggcgggggtcagagtggaggccgaagccctgtgtgccctgagcaacgaggcaggtccttcctgcccccagggaggggcttgtgggaggcagggaccttctggggggctgcccgccgtgcgcacgaggtagtttccacagcccagcagcacatcattttacattttcatctttattcttgcttaatacgtgaatcatggtttgtcaaggtttcaattggcgtgaccttgctaatgagattgtacagttctcctcgtgctacacctttaagcacacctctctaatcaggtttcttaaaactaagaagcctggagttcggttcggccccacagccgcgtcag

SEQ ID NO: 27262 - DNA, 1228 bp, Artificial sequence
  DNA replication origin
tgggcgtggccgtgctgggcacctggtgccactgccggcaggagcccgaggagagcctgggccgcttcctggagagcctgggtgctgtcttcccccatgagccctggctgcggctgtgccgggagagaggcggcacgttctggagctgcgaggccacccaccggcaagcgcccactgcccccggtgcccctggtgaggaccaggtcatgctcatcttctatgaccagcgccaggtgttgctgtcacagctacacctgcccaccgtcctgcccgaccgccaggctggagccaccactgccagcacggggggcctggctgccgtcttcgacacggtagcacgcagtgaggtgctcttccgcagtgaccgctttgatgagggccccgtgcggctgagccactggcagtcggagggcgtggaggccagcatcctcgcggagctggccaggcgagcctcgggacccatttgcctgctgttggccagcctgctgtcgctggtctcagctgtcagtgcctgccggtaggtgtcccgggacaggcaggtggcaaagagtggggtcccatgagtgctggcccatccctttgtctgcagtgggcacagaggcccagatgcgctcttcctgggcccgggccccctcccactcctgcagcccgggctttggccccatcctgctctcccaaccctcgcctctcagagggtgtccctcacccctggggtagagccaggtctctgggcagcctcagggattgccaggggccctcccagaaggtgtagagggtgaacctcagtggcttaggtccctgaaagagaaatcagaaggtgagcacagacatgactactgctgcctgggggtgctcctgagggcacacaggcccgctggcctccctgtagccctgcctgtgcccccagcaggcctctggacactgcagcgctcatgggctgtgggggtgtcatccacttgctggccccgtgtgcctgggggagtggtctacaggccctgcttctctccacaatcacaggtgctgctggccaagggtcagttgaagcccaagggccctgaggggcacgggggtagccccgagctgtggctgagaacagagggcccccttccacaggggacctcatctgcctggcggaggtgccccatggggagcagctaggggtcacctgcagttgccccctgccttagacccgggggtgcatactctggaagcctggggtgagaagcta

SEQ ID NO: 27263 - DNA, 1007 bp, Artificial sequence
  DNA replication origin
accacaagggagataccaggacgctgggcccacagggagaggcgggctccccagagcctcagcccggctggctcctgcacacagccccttcagaaggaaaggggggtgtacctgcgaggcctgccctgcccaggccccagcgcccctggagttcctgcttctggttcaggggagggccgtgtctccagagcatggagaaggtagaactggctttgtggggcggtggctctggcccgggaaggctctgctgcccaggaggggtccccacgcccacccgggacaccgggctccaccccagtccactcacgtcagccacaggaacgagggcgtcggccagatgcccgatgcggcttctcccgtggagccaggacagcagcatgaggcccagggccacgtccagcagcacagaggccaccgtgttggccttcctggaagggaggtccggcccggccggcatgagggtggccagcacagcctggggccgcaggaggaggcctgcctggccggaggggtcagcgtggtgcagagggggatggagaaggggccagagggcacgcacccagccctgcagagaccagggcaggcccacacctcatcagctgggcagggttctccgccttccgtgtactgaagattagcgtgaggtgctccagccggtgccggagctgttcgcacgtggagagtttgctcccgaggaaggacaggggccagagcttgaacactctgcgtgggagtggagaggagtgatgtgtccctctccagatcctcctcccaccgtcccccactgtgcaggggaccacaaacacccaggccacactcctgagctcagcaggacagggggcaggtgggaggggccctcggtggcccaggtggtggtaggcagcgctcaacgcgcccacctcacagtgcacgtgactaacacggagcctggcctcctcgcaggtgctgaccccgggccacctggtcaccacatgctcccagagccggtgccaagaagcgcctgccag

SEQ ID NO: 27264 - DNA, 2339 bp, Artificial sequence
  DNA replication origin
gagcttgtcttcctgctgggggtggtacctgactctttggcccaccctcgggcctctgtggaggcctccttgaggcctgactgggtgggtcttgtgtgggctgcaggtgtgcactgggcctgcttgtggccaggccaggcctctgggggcagcatcaggcacgtctgtgtggctgtgggggtgcagggagctccagcccagaaggaaggaggggcggggctggggaaggggctcggcagctttgcctgtggtcgtccgcacctgccaccggcctactttgtcctagacctcccttttgcaaaagtgctcagaaatataaatatttaatttaaaaatgaaagtctcttcctgctgccaagctcttatcctttaaatattaaataagctctatttataaagaatgttcttttctcagccgggggtggtggctcatgcctgtaatcccagcactttgggaggccaaggcgggcggatcatgaggtcaggagatcgagaccatcctggctaacacagtgaaatcccgtctctactaaaaatacaaaaaattagccaggtatggtggtgggcacctgtagtcccagctaattgggaggctgaggcaagagaatggcgtgaacccgggaggcagagcttgcagtgagccgagatctcaccactgcactccagcctgggcgacaaaacaagactccgtctcagaaaaaaaaaaaaaaaaaagtgttcttttctccttcttgccagtcctgctgtggctgaggccttggcccaggcttggaaggggcctgcgcaatgggcaagtgggggccaaggtgtcactcactgtctccttagtggggaggctgaggctcccttggggtctgcccgctggggcacagcctctggatgctgagtttcttcctgggcggccaagaccctgcttccctgtttgctcttgggggtgcctgtgccctcaacttgacgccatcctccctctggggacctgtcctcctgcctggtcgctgtggccctgatgggcttggcactgtctcgctcacctgtggtcatcccgggcagcccccagcctctgcgatggggtggggcctctggaggggactgtgtcagctgtgggcttccctgcagggctggagccgaatcagggtctgccaggcctcagtgcgtccacgtgtttggggccgagggctccagtgggtcctgtggccgaggtagtgagaggggaggaagatggtagaggtgggtgcaggcagggggccacgcggatgccctgtgggcccggccatgtcacccaggcctgcagagagaggcctccagaccagcctcctcagaccccaatcccggagccatctgtgaaggggagcccgtgtgctgtccacgctaggacgcggtagaccctggaggagggaaggctggccaaggtgggagcccatcacgaaagagcctggggagatgcaggtgctgagcctggctgcccccgccccagcgtggcccctgtgtccctgcagcacgtggccgaggagctccagcatctgctgcagtggctgatgggtgctcccgccgggctcaagatgaaccgtgcactggaccaggtgctgggccgcttcttcctctaccacatccacctgtggatcagtgagtgcagggcaggcgggggccccagggaccccagagcttgctgaagagggtagggacccagccagaccccgccccctgtgcccccaactctgctccccagcgtcctgtgtgtgtgaggcctgctgtgctcagctgagggctggggcctgggcacctcccgagggctgaccccaccctgccaggctacacgcacctcatgtcctgtgtgtgtgagggttgtgctgggccgagggctggggtctgagcgcctcctgagggcctaccccaccctgccaggctacatccacctcatgtcccccttcgtggagcacatcctttggcacgtgggcctctcggcctgcctgggcctgacggtggccctgtccctcctctcggacattatcgccctcctcaccttccacatctactgcttttacgtctatggagccaggtgggcgtgggcttccccctccccaccgccccctgggaggtgcagaggctccggctgggcgggcgttcgagtggggcgggggcggggcggggcggggcggggccgggcccgacagcactgcgtcctgtaggctgtactgcctgaagatccatggcctgtcctcactgtggcgtctgttccgggggaagaagtggaacgttctgcgccagcgcgtggactcctgttcctatgacctggaccaggtatggggcagggttcgtggctggaggggctgactgcctcc

SEQ ID NO: 27265 - DNA, 1401 bp, Artificial sequence
  DNA replication origin
gtggcttctgccagcgctgcctgggagcagtcagctgtggggcgggctgtctcctgctgcaggccacgtgggtggcctttcaggaccctctgggcagtgagtgctgcgctctggagtgggcgaggccctatcctggccagtaagacaccctcactgccctggagcacgcagctgggtgcgtggtggaaggaccccacggcaggtggggtcacgcaagaggcctcccctggtgcctggcactggggcagacagtgggaggtgagcagaaccacctccagcacctgcttgattcccaggcctcgatcccctctgcatgtgaggctgtggggaggcacctctgacctggtgagagggccgggtgctccgcctccagctttgctccagagcaaggcccaatggcagactccgtgccctgctcagggtggggtccctgctctccccaggaccctgcagcctctgggcccccttcatcgtggcccaggatggggtcggactgctctgcccccaggcgcgtctggccgggccggtcctaaatgctcctctgccacagctccggctcctggtggtcgccgtgcagggcctgatccatctgctcgtggacctcatcaactccctgccgctgtactcactgggtcttcggctctgccggccctacaggctggcgggtaagtgctgcgtattgggcagctggccctgggtaggtggaggggaaccacacctgtgggccctgcagaagcaaggacagcatgggccactgtgcctccagcctggaagccgtggtatgcatgcgcaagcgggcagggaggacagggcctcctagtcccagaggtctgcaggaccagctgcctccagggaggtggagagagactcagagactcacctgccgcgcaggttcagaaccctggagacctgaggccacaggcctttgttcttctgccttgggattttctgggcttgggagtctgaactgcaggccaggggccaagcgcggcaaagtcagaggcactaggagccagcagggcggccaccatccagtaagtgccccgtccgctgtgccggaaaaccccgtccactcaacagcacagcctgcgcccgtccctcactggggctcttccctgcttgccggacacctggcttctttcagtggagtctgcaggaggcttttttttttttgagacggagtctcactttgtcgcccaggctggagtgcaatggcgcaatctcggctcactgtaatctctgcctcctgggttcaagcgattctcctgcctcagcctcccgagtagctaggattacaggtgtgtgccaccacgcccagctaattttttgtattttagtagagatgggggtttcaccattttggccacgctggtctcgaactcctgacctcgtgatcctccc

SEQ ID NO: 27266 - DNA, 1837 bp, Artificial sequence
  DNA replication origin
gcccggtggctcacacttgtaatcccaccactttgggaggccgacgcaggcacatggcttgagcccaagagtttgagaccagcctgagtaacacggtgaaaccccatctctactaaaagtacaaaaatgagccaggcgtggtggtgggtgcctgtaatcccagatagtcaggaggctgaggtgggagaatcacctgagcccaggaaggttaaggctgcactccagcctggaaaatagagacccgctctcaaaaaaaaaaaaaaagaaaaaatgtgaaaacatacacatggcatgtggtcgtggggggatgtaggtgaagggtgctggaagcatctgtgttattctcacagcatttctgtaagtctgaatctgtgaagtactggtgagacccttctctgtgggcggccccaactctgaaagggaaggtgtctgcttctgagggtgccctgagggtccataaatggtcctgggcaggccttggaaaagctccagcccattgccctgtctgggtcggcaaggcaggggggaccagagctctggtggagggatgaggggcaccccacaggtgtaggctgtctccaggcaggggctgtgcagcaaggacagacggagcctgcaggtgcaggcggcacctcttggtggctgcgagtggctggggtgacggtgttccattggccagctctggcgccaaacctagctggccctcgggataggcagtcagcccagtgcccagcagagggggtgaccgctgccaggcacgacccatgacatggccatcacagagcagtggactgagctgtgtcaagaccttgacctggtggaagccccaggaggcgtggcagcccagtgagcagctggggggagtgggaggtacaggttgggggtgttggtggacccggtgggcagctggggggagcgggaggcacaggttgggggtgttggtggacccggtgggcagctggggggagcgggaggcacaggttgggggtgttggtggacccggtgggcagctggggggagcgggaggcacaggttgggggtgttggtggacccggtgggcagctggggggagcgggaggcacaggttgggggtgttggtggacccggtgggcagctggggggagcgggaggcacaggttgggggtgttggtggacccggtgggcagctggggggagcgggaggcacaggttgggggtgttggtggacccggtgggcagctggggggagcgggaggcacaggttgggggtgttggtggacccggtgggcagctggggggagcgggaggtacaggttgggggtgttggtggacccggtgggcagctggggggagcgggaggtacaggttgggggtgttggtggacttggtgggcagctggagggggagttgggggtacaggtggaaagggtggggggcgaggtgggcagctttgggggacaggggacacaggtgggaggggtggcaggccaggtgggcagctggtaggagcagggtaggccaggtaggcaactggagggtgagtgggggagagtacagatgggaggggtggtgggccaggtgggcagctggggggaggcaggggacacaggtagggggttggtgggccctgagtgcctctggttgcctggaagtccaggttggatggaggcctgtacacttcgggctgggaacgggctgtggggcccgccagctgggcccccagcactgcaggcgacagagaccattcttagcagctgtggcagtcgcaggctgtactgggccaggacccacgaggggcccaccccacatggagtccacagattcagagcaggagctgctcgccccacccctggaggcc

SEQ ID NO: 27267 - DNA, 1169 bp, Artificial sequence
  DNA replication origin
tgggagacaaagggagcagtttggggtgtccaccctgcccccggggagcccagcagccgccgggatgtcctcaaagtcctgctaagggggtggacagttgcccagtggggcagacaagccttggcccctgaagccctgtgcccagggagcacctacaagtttcagctactcagggaccccccccagtcctggcctgctgccaaggggaggcctcactcacatcccatgagtggacagagccaatcaccttggtggacacagcgtgcagtggatgagggcagtgagggatggagcgtcaacatggtcccatttctgtggacaaattaatgacaagggaatgtagctttgcagcggaaaatcctgcagacaagacctcgaccaagtagtcacgttggcatcactgggatgaacaggtgggctctgtgtgccaccctgggtggtgccctctgctgctgccacaagcatgagtggcatctcatcatgagggtcaccagcagacccagccagggacactcctgagtaacgggctccatccctaagcccccagaggctttggagactggcccatgacacgtgggacacgctggaatggggtcggtggcttggacggcatccctgcaaaagccccgggtttgagcaccgcactggctgccttgttctgaggaaatgcacgctgaaaattccagagccaaaatgggcagctgactcaaatggtgcagaaaaacataaagaatgtgctggctgggcccggtggctcacacttgtaatcccaccactttgggaggccgacgcaggcacatggcttgagcccaagagtttgagaccagcctgagtaacacggtgaaaccccatctctactaaaagtacaaaaatgagccaggcgtggtggtgggtgcctgtaatcccagatagtcaggaggctgaggtgggagaatcacctgagcccaggaaggttaaggctgcactccagcctggaaaatagagacccgctctcaaaaaaaaaaaaaaagaaaaaatgtgaaaacatacacatggcatgtggtcgtggggggatgtaggtgaagggtgctggaagcatctgtgttattctcacagcatttctgtaagtctgaatctgtgaagtactggtgagacccttctctgtgggcggccccaactctgaaagggaa

SEQ ID NO: 27268 - DNA, 1572 bp, Artificial sequence
  DNA replication origin
cgcgcccgagccgaggcgatgcggctgagtccgggaaacgaaagcccctcgcaggctgtgccgcctgcttccgcagaaccctcggagggagcggcggggtggccccgggcgcgtcctctctaaggcggtgcggccaatcggcgctcgatgaggcggaacttcctctccggggcaggggcgggacttccgcccggcggcggcggggcgcaccgttgggtcaccagtgagtctgcaaagtcgctgaggttctgggacagcgcggcgtcaccgagcgtgagccttccgcccggggacgcggccgccacagctcgggacgcggggagcgcggccggcgcgagctcaagacccggcccgacgtgctcactgcggcagcggcgcctcctggacggggacccagggcccggaccgcgctcttcccgggggcgccgccgagccctcgtccctgccgggcccggctgccgcaggtgcgtgggcgagcgaggcggctgcgtccgcgggccccggcgtggggtcgggggttgagtgggcacgtggttctttctggggtgacgagaaggtcctaccgtcgtggggatggtcctgcctctctcggtgaagttactcactcggaacgggtgagctttgtgatacgtgctctgcgttcagtagcgctgttacagtcgtaagtaaaagcagtaacgtcagcgccgacccagcgcagccctctccagaccgggtgcggagcccgtcacgtctgccccgccggcgaggagcagagcccggcaagaaccctcctccagaggggccccgaccagggctgtgcctccgggagcaggtgctgcttacacagagggacgccaggacgggcagccccacacctccagtgacctcccgtcccccagagctgaagacatggcctgactaagcggcgaccacatcgacgcaccagttttttcttttttgaaacagggtctccctttgtcgcccaggctgcagtgcagtagcgcgatctcggctcactgcagcctctacctccccggcacaagcgatcctccagcctcagcctcccgagtagctgggactacaggcgccaccatgcccggctaccttttgtattttttgtagagatggcgccttgccaagttccccaggcattaacccggaaacaacctggcgggtcagggagagcctcttctgctcagaggtcattgtgcccagacttgagccctggctgtgaagtccctgaggcccctcactccagggacgggaagcaccaaagatgtgatgtttcctcctcggtttctgagactgcctggaagcggggggtggatagtggtgagcagccgtctcctcctttcctgagaacataaatcagaaacgctttctgaggccgggcacggtgggtcatgcctgtaatcccagcactttgggaggctgaggtgggtggatcacctgaggtcaggaccagcttggccaacatcgtgataaccccctctccactgaaaatacaaaaatgagccaggcatgttggtacgtgcctgtaatcccagctacttaggaggctgaggcagaagaattgcttaaactcgggaa

SEQ ID NO: 27269 - DNA, 880 bp, Artificial sequence
  DNA replication origin
gccgcgctccccgcgtcccgagctgtggcggccgcgtccccgggcggaaggctcacgctcggtgacgccgcgctgtcccagaacctcagcgactttgcagactcactggtgacccaacggtgcgccccgccgccgccgggcggaagtcccgcccctgccccggagaggaagttccgcctcatcgagcgccgattggccgcaccgccttagagaggacgcgcccggggccaccccgccgctccctccgagggttctgcggaagcaggcggcacagcctgcgaggggctttcgtttcccggactcagccgcatcgcctcggctcgggcgcgcctgcatcctgccgcccgtccgcgcgttgaaggggcggatacaaacaacgtggacttccgagcccctgattggcgagcgtgtaggaaaggggcggggttagcagagccgtgatggacatgcaagcgacccaatggcgccggcgacggggcgggcgaggacaacggcgttgtgggccgggggcggggcggccggcggctctgggatttctctgggaggcagccgcagggaagggaatgatcttggtgaacttataatcgaaccaatggttccgggaaagcaggaggcgagtggccaatggcgacggcgatgaggcaggcgtccgctgtctccgcaacgccgtgtgggaaaggcgggggaggggcggtcatgacagacgtgcagacaggccaatggctgagggaaggagggcggcgggcgacctctggtgactacgggaaggcagggcggggtggtgaagaggcggtgcgaccggaggtctggcggcgccgtgtggaacgccgtgagggcggggaagtcgtgacggacgggcgggtgggccaatgggctcggg

SEQ ID NO: 27270 - DNA, 1398 bp, Artificial sequence
  DNA replication origin
gcgggcggggcggggccggcgctgggcttcgggcgcgcccactcggccgccgtggggcggacgcaacgggcgcaggtgcggggcgcgggctctctcacgccgcggcctcacccggcggtgcttcggcaggcggccggcgcggggcgcaggcggcgcggccatgggctcgcagggcagtccggtgaagagctacgactacctgctcaagttcctgctggtgggcgacagcgacgtgggcaagggcgagatcctggagagcctgcaggacggcgcggcagagtccccgtacgcctacagtaacggtaaggcccggcccgcggcgcgcgctgctacgcggggcccgagcccggcgagctgggcacggagctcgccctcggcccggcccttccaagcgccgccgaacgttcccaggaacgcctttgcctggcttccagactcggtagctcggtggctgcggggtgcccgtgctccagtcccgaggtgacgccggggggcaggaggacggaccagagggacgcgcccagcggggacggtgccatggacccggggtctgggggacggtgtcacgggtccgggatctcaggggaaggtgtcatgggtccgggatctggagcccaggggaaggtgtcatgggtcctagagaaggtgtcatgggcctggggaaggtgtcatgggtctaggatcatctggggtccgagggaaggtgtcatgggctcgggggaaggtgtcgtgggccggagggaaggtgtcatgggtgcaggatctggggtctgggagaaggtgtcataggtccgagggaaggtgtcatgggtccaggatctggggtccggggaaagatgtcatggtcccggtagaaggcgtcatgggccaaaaggaaggtgtcatgggtctaggatcatctggggtccgaggaaaggtgtcatagatctgggggaaggcatcatggtcctaagggaagctgtcatgggtctgggatcatctggggtccgagggaaggtgtcatagatctggggaaaggtgtcatgggtctgggatctcaggggaaggtgtcatgggcctaagggaaggtgtcatggtctgggatctcaggggaaggtgtcatgggtctaggatcatctggggtctgagggaaggtgtcatagatctgggggaaggcatcatggtcctaagggaaggtgtcatgggtctgggatcatctggggtccgagggaaggtgttatagatctggggaaaggtgtcatgggcccggggaaggtgtcacggacccaggtctggtggcaggtgctgctgggctgctcttgggaccctgtctcgagcgtgcacagatgacaggtccttataggcacgctgttcccctgaggtatttgcttactgctgagggagtcaacgctttgtgct

SEQ ID NO: 27271 - DNA, 1060 bp, Artificial sequence
  DNA replication origin
ggtgtcatccgccgggcgtttggagtaagcagggaaaggtgtcggcgtccagcatcctggtgcggagaacgctgccgaaccactgtgagaaggcggggagactgcttgtcaggctgagctgacttcctgggcggtcgggagaaggatgtgcagactgtggaactggcgggtgtcagggaccagaagttacgaaggcggtgggaagaggagcagctgtgggaagaaggactggctgccaagaccatgggctgtgggcatcctcagggcaggagctgggtggaagaggggcctcttcagtcctcttggcagtgaaggtaaacagatgtcagcagggtggactcgcactttgagcctaaggtagcgaggaggcttctgagccgacctggggatggcggcgcactctgatacaggcagtgcgcggctgtctcgtgctgagatcaggattttgagtaaagcagagatttctggacgtttgtccttcagaaattagcggagggacaagggcattggcgctgtggagaggtagggacccatgggtatggggcggaagaccagggcacgaccagacaccgccagggtgctgcacatgtaggtagcagggggaggtggtccaggcaagatgggatgggaggggctcaggagcagccaggttctagtgctggtgatgaggtgggtggtggcaggggcatgtggaagggtcttctgaccatggcttacagagggcttggtgctggggggcctggagttgtggaaagggtgaagggaagagttggtcccatattcccagatggcagagtggaaacagaagcactcggcccctgagcagccttcgccgtctttacagtgaacacagtcctcaaaccaaactgggaaggattcgaatcctggatgggtgatgtggtcctggctgtgtaaactgaccctgatgaaagacatgcccatcctgtgagagggacagccatctagcatcttttttttttttttaatttttattttttgagacagagtcttgctccgttacccagggtgtagttcgatggcactatcttggctcgctgca

SEQ ID NO: 27272 - DNA, 2504 bp, Artificial sequence
  DNA replication origin
tgcagacaaagccgcttagcacagcctcattggcacctgtcctggccgccccgctcccctcaggacatccaggtgggtcggcagaggagggaaggaggtgagcctctcacagggaccacagtcccggcccctcccctccccgtatgtttcagggacacgtcgggccagggccggttctgcaccatcttcaggtcctactccaggggcgctcaggtaagaccagcaccgctctttccattgcttttcaaaggatgtttctcctgattctttctgaatgtgagttgttgtcctgtcaaactcccaaggactttctttctttataaggatattctcacattggtttgtttatttgtttgttttgagacagagactcactctgtcacccaggctggagtacagtggcacagtctcggctcactgcagcctccccctcccgggttcaagcgattctcctgcctcagcctccccagtagctgggagtacaggcgcagtgggtgtacttggagctgtgtgtgtgcacaggtgtagtgggtgcactcagggccatgtgtgtgtgcagccatgtgcacaggtctggcgggggcactggggccatgtgtgcagtgtgtgcgcaggtgtggtgtacttggagctgtgtgtgtgcacaggtgtagtgggtgcactcagggccatgtgtgtgcaggcatgtgcacaggtctggcggacgcactggggccatgtgtgcagtgtgtgcaggtgtggtgtacttggagctgtgtgtgtgcacaggtgtagtgggtgcactcggccatgtgtatgtgcaggcatgtgcacaggtctggcgggggcactggggccatgtgtgcagtgtgtgctcaggtgtgtacttggagctgtgtgtgtgcacaggtgtagtgggtgcactcagggccatgtgtgtgcaggcatttgcacaggtctggcggacgcactggggccatgtgtgcagtgtgtgcaggtgtggtgtacttggagctgtgtgtgtgcacaggtgtagtgggtgcactcggccatgtgtgtgtgcaggcatgtgcacaggtctggcgggggcactggggccatgtgtgcagtgtgtgctcaggtgtggtgtacttggagctgtgtgtgtgcacaggtgtagtgggtgcactcagggccatgtgtgtgtgcaggcatgtgcacaggtctggcgggggcactggggccatgtgtgcagtgtgtgtgcaggtgtggtgtacttggagctgtgtgtgtgcacaggtgtagtgggtgcactcagggccatgtgtgtgtgcagccatgtgcacaggtctggcgggggcactggggccatgtgtgcagtgtgtgtgcaggtatggtgggtgcgcttggccaccctcgtttctgtctcctctgggcccccaagcacgcttttgtgctgactggatctgctggcgaatgtgaggccggaaggagggcaaggacgtgaagcccatgtaaacagacctgtcatggccactgttgttgctgcttcagtgggagggatttgagcgggtctgtcctgtctgtgatgcccctaagagttctggaagagccaggagagcccctccggggccagttcgtgagcctggagccccccatgtgggcccagggaggccgcctgggtctgggtctggatccttcttgggggaaggttcaggtctgtgccatgcagcttctggctcaggtgggtccgctctgggcaggaagctgcccaggtgcgagggggatggacactggagcttcgtcccatggcaagctcatttccttccatttctacactgaagtgtagtcggtgttggatctgatgtcttctacctgctggcggtgggtgggaaggacgccagggcgggctgggtcgcaccctgtcctgggagttccctcggagatgttggcagctccctcatgggagcagaagggcctgcaggctccgtgccatccctgtgagaactggagcaacatggccgtgattcgtggagcaggcaggtggaagacgggcaggctcaaggatgcattccatgggccctgcctgctattgaaagaggagttggggctggtgcggtggttcacgcctgtaatcccagcactttgggaggccaaggcagacagatcacgaggtcaagagttggagaccaacctgaccaacatggtgaaaccccatctctacgaaaaatacaaaaattagccgagcatggtggcgggcgcttataatcccagctacttaggaggctgaggcaggagaatcgcttgaacccaggaggtggaggttgcagtgagccgagattgtgccattgcacgccaacctgggcgacgagtgaaactccatctcaaaaaaaaaggaggagctgtgtgggtgatttacatctacaaaaatgccttcttgtcttccttttgcttttaagtatttcgtgatttttctgcaataaacatatactattttggtattaaaaaatatggggcgcagttatgttggatgacaataaagggtt

SEQ ID NO: 27273 - DNA, 913 bp, Artificial sequence
  DNA replication origin
cagggtggaggcacatggggagcatgaaagctggagtggggagggctcttattcttaagacaaatgagggcaacgatgggggtgtctctgggccccttaaggggcccagacccagaccccccagaagtctggggagcccaggcagaaggtggcacctccagcagggtcttgcccaggctggctgctctgagccccaggaccccggcccgaccacactcacctggtccctgctacactcgcgctcacaggtgctctgggcgtccacccacaggttggggctgagctggttggggcacacgcccgggtggctccccagccctggcagcaagccagcccccgaggtcagccggaggaggagcaggagcggcaggagtggacgtagggcgggcatgagggccgccgagccagggggccggggggtgtggccaccagcccctcctcgggctccacagagcccagcttcctgcaggcatccaccctccgggcctgtggtcggtgcccccaccaggaccccggggctcccttttgcccctgaggctgaagcctgcagcagatgcttgtcctgacacccctgctgggtgggtaacggggtctccaagttctcagaggccgtctgtgtgacgctggttcctctccagcttcagcctggcccctctgtctgaaccgtgcgggggctcccaggccctggtcagcacagggcagaggggaggaggttggggaggggccagaggcccatgagcacagagccactggccatgagggtcaccggggcggggaagggctggctctggctggagagggggaggggaggggaccctgtaacctgaaccccttcgtccacccctgggctgagatcaatctccttgacgaccctcagtagggtgggggcagggccagcagatcccagcttttg

SEQ ID NO: 27274 - DNA, 2012 bp, Artificial sequence
  DNA replication origin
gccgccccgctgcgggtcgtagtgccagaggacaaggtgtggggaagtggggcccgtgcaggcctgcacatccggcaggcactcggccggggctgggatgctgggggctgcgtccctggccggctctcgctggaccacagagagtgggaagtcagcccgcagcagcccagcagcgttgcgcgcggtgcaggtgtacaggccggcgtcttcgggccgcgcgttgtagagcaccagctgcccgatgctggtgaccaccacgttgccatacatctgatcagggcgcatgatcaggttctctcgctggtgactctgcttctcccaggtcacagcaggcggcgggcggccgctgacgtcgcagtggaggctggccgtacccccaacctgcaccgcctgtggggaggggctgctgtacagggcaggaggcacgggcgcggccccaggtgtggggcgggcagtggtctccggcggccccgggctgctgggcggccagctgagcacgtgcttgcagggcacgatgtggaggtgcaggccccgcaggcaggcctcggcgtccatatagcagcggttgtagtaggtgaggccgtccgaggcgcaggtgaagctgggctccttctcacagcggtcgcggcagcggcacacgggctgcccgtcccagatgtcgcagtccgagccctgctgtgggcacacaaagccctcgcaggaggccgctgtcgtcggcgcagctgggctgccggggaagcgtgctgccacgcagctgtgcagtccacacacgttgatgcagcacttctcagcagccgcacagtcctggggatgggggacacttaggtgggagccccaatgccccccgccccggggctctggcctggcccctgcaaggggaggcccaggtggggtagcagggagccccccgctctgtggctgcctccccggggactcagtgtcctttccatcctgtgtgaggagccacctcgccagaggtgccacctggcttaccttccagaatcctcacacccacaagcaagttccgttattctttacgttgtacagacgaggaaactgaggcccaaggagggcgtacagtgctcaggaccacccagcaggtggtgcgggccaggacaaaggctggacatcggctgcagcacccccaccaccatctgcactggtcccggatggaaggagggtgggaggacagggaggacagtggatggaaggagagggtgggaggagaggatggaaggagagggtgggaggagaggatggaaggagaggcagtgacggggtgggagaagaggatggaagaagtggatgggaggagtggatgggaggagtggatgggaggagagggtgggaggagaggcagtgaaggggtgggagaagtggatgggaggagaggatggaaggagaggcaatgacggggtgagagaagaggatggaaaaagtggatgggaggagtggataggagaggatggaaggagaggcagtgatggggtgggagaagaggatggaagaagtggatgggaggagtggataggagaggatggaaggagaggcagtgacggggtgggagaagaggatggaagaagtggatgggaggagtggatgggaggagagggtgggaggagaggatggaaggagaggcagtgaaggggtgggagaagtggatgggaggagagggtgggaggagagggtgggaggagaggcagtgacggggtgggggtggtcgccgaggatgatggtgccccagggtggaggcacatggggagcatgaaagctggagtggggagggctcttattcttaagacaaatgagggcaacgatgggggtgtctctgggccccttaaggggcccagacccagaccccccagaagtctggggagcccaggcagaaggtggcacctccagcagggtcttgcccaggctggctgctctgagccccaggaccccggcccgaccacactcacctggtccctgctacactcgcgctcacaggtgctctgggcgtccacccacag

SEQ ID NO: 27275 - DNA, 2565 bp, Artificial sequence
  DNA replication origin
gctgagccgctccccaccgtgcctctggcgactgctggtcctttaacaggaggcgcgcgtgctcctgggagttgtagtttatcagcttccgacgtgccccgcggtatctggactacagctcccgacgtgccccgcggaagcccggccaccgcccccgacgcgacccgcgccgcgtccgcggcggggagttgttgctgccgcgatgctggtggcggcggccgcggagcggaacaaggatcccatcttgcacgtgctgcggcagtacctggatccggcccagcgtggcgtccgcgtcctcgaggtggcctcgggctccggccagcacgcagcgcacttcgcgcgggccttccccctggccgagtggcagccgtcggacgtggaccagcgctgcctggacaggtgcggcccccggggcggccacttctatcggtgcggcggtccggggcctcaagagcccacggcccgcagccccggaggaaaaggatgcggctcgggctctgagggtgcggggtgggagcctgggggtgcccccggggcaggccctagctgtgcggcccccgcggctgcggaagtgggtggacctcggggtcccccttcccagccgctttggtctccgctcctcaacgtgccccccagcctcccctaagaaattctgtgggggcgtcggaaaggcgggtgcacaggactcggcccccacccaagcgttcgcctcctgcagcatcgcggccaccacgcaagcccagggcctgaccaacgtgaaggccccgctacacctggacgtgacgtggggctgggagcactggggcgggatcctgccacagtcgctggacctgttgctctgcatcaacatggcccatgtcagccccctgcgctgcacggaggtctgtggggagcccagcatgggtgtctgccgtggcaccactcaccctgcatgggggcagctgggatgccagatttgcccccatcacagtcggggtgagggtctccagcctcccccatcacagtcggggtgagggtctccagcctcccccatcacagtcggggtgagggtctccagcctcccccatcacagtcggggtgagggtctccagcctcagggcctggcttctgttgggggcagcacctcactgccgtcctgttcctactcaccaggggctcttcagagcagcaggacacctgctcaaacccagggccctgctcatcacctacggggtgagtgggcctgtccacggcgggcctcccgctcccagtcctagctgctgtctcctgccctgctgagagtcctccctcctgggctccctgccccccgcccagccaccagcacggcctcccctccacttccagtctgtacccctccctgggtcatctgccagcctccctacccccttgcccaccaggctggccttggctgactccctcttggggacagggagggggtgccctttcattctccaaaccccagcctgcaagtctgtcccaggctctctgggaaataccccgaccttggtccagtgggctgtgtccccatgcccacagccctatgccatcaatgggaagatctccccccagagcaacgtggactttgacctgatgctcagatgcaggtcagagctagaggcggggggtctggctcaggtggcaggtggcttgggtggcaccccccaggccatgactccatctccccaccctctgcaggaacccagaatgggggcttcgggacacagccctcctggaggacctgggaaaggccagtggcctgctcctggagaggatggtaggtgggggagcgggggcccaggcaacctctctaggggttgagggccgtcctccagcaaagtgtttctccaggtggacatgccagccaacaacaaatgcctgatcttccggaaaaactaagcccctccttcacccccgcacacctgcatccctgccggaggctctgtgaggcacgaaccctgcctccctaggccggaccttgtggacgacagccccacccagtctgtgctctcagccgctggccgaagggcccagcctgctcagaataaagcatgtcctgctgccggcttgctggtgtctgccccacctcctcctaggagcaccttgtgaggttgggtgggagacggggtctcctgtggggtcaagggcttgggacgtcctgatccttgctgctggagctcgggcagtgggattggggccgagacagctgctgaggcaggatggagctggttggggatgcaggggcggacaggcactccctggtgaccttgtaccaaagcccaagccccagtgggtgtcaaggccccagcggaaactggctgggcatggggcacctggaaggatgagggtcgcccgaccagcagcagcaagccaggaggtctgaggcacagggagtgcgtttattcaccaggacggggtggcgcaggcccctgcgggggctagtcctggaagcggttgagcagctcgcaggcctgcttctccagcagctccaagatcttcttgacgcgcttctcgctggcggcgcggacgtagctgccggcgtccagcacggccacgccatcgcgcacc

SEQ ID NO: 27276 - DNA, 937 bp, Artificial sequence
  DNA replication origin
ggagaccaaagcggctgggaagggggaccccgaggtccacccacttccgcagccgcgggggccgcacagctagggcctgccccgggggcacccccaggctcccaccccgcaccctcagagcccgagccgcatccttttcctccggggctgcgggccgtgggctcttgaggccccggaccgccgcaccgatagaagtggccgccccgggggccgcacctgtccaggcagcgctggtccacgtccgacggctgccactcggccagggggaaggcccgcgcgaagtgcgctgcgtgctggccggagcccgaggccacctcgaggacgcggacgccacgctgggccggatccaggtactgccgcagcacgtgcaagatgggatccttgttccgctccgcggccgccgccaccagcatcgcggcagcaacaactccccgccgcggacgcggcgcgggtcgcgtcgggggcggtggccgggcttccgcggggcacgtcgggagctgtagtccagataccgcggggcacgtcggaagctgataaactacaactcccaggagcacgcgcgcctcctgttaaaggaccagcagtcgccagaggcacggtggggagcggctcagcggtgtgtggcggtcccaggcaggggactgaacggcgagcttggcttgctggtttacaggcgcctcagctcaggcaccctgtcgcccatggccgtccagggttttcagggcacctgtgtcactctccgaaatttgtgtcagcgctgcgccagactgggcgccttcccttggtttcgggttttctctacttttaaatttctggcgttagcgagagttcgatgttcaaatgggaaaaaaaactaagtgcgccgcccgggaatcgaacccgggtcgcaagaatgggaatcttgcatgataccactacaccagcggcgctgtctaag

SEQ ID NO: 27277 - DNA, 1720 bp, Artificial sequence
  DNA replication origin
cagcggcgctgtctaagacagttgctgcccgcggagacaagagactgtgacgcgggaagtcctccgggcgtgcgccgccgctggcgccgggctcagcgcaagggagctggcgactgcataggaggacccagctggcgggaccgcgagggtaagagtctcgcggtgccccccagtgccggaggggaaggagcgggcgtgaaggacgcgagctggaggacagtctcgattcgggcctgagccgtggaagccgttggccttcgtgagccgatgggggcgaggccctgtcggggcggggctggggagagggcggggctgggctggggccccctgttggtccgagtttagggcggggttgccggaggggcggggccatatcggggcgggtccgagaggggaggcggggctggggggcgggacatgagtgtggactggcgggttggggcggggccagagcggggttgcggcaggggcggcaggggcggcaggggcggcaggggcggcagagggcggggcgggcggtcccagcctgcagaactgggcggtctgcgggaggggcacgaataatgccccagggtttctctgtgacactggggtaacagcaccagctcagggcccacggatagcgtgaggggtcggtcggtgacccccgaaatcaagtcacaggccgcgatttatgtgcgcccgagggttggggtcccagcctcagagccgggctcttctccagaaagtgccaagcgcctggctctgcattcaggactggcttagcgcctttgctgagccgtttttcaccaatgggaaccccatatcgctctggctagggcaaggacgttggaaggggtaaaccagggagggccagtcacgtggctcagggtaggagagtggcttacaggctgccagtctgggactgggaacgcgggccatggggggctcagggagtcaggggtcagggacaaccctgccaggagatgttggtgtccgccgtggtggtgactggccagaccctgcagcaggctctgcggcccaagcccacgctttcctcgcctgactggccgcctccatctctctttctgtgggctgagcactttccctgcgcctccttcaatgcgcaccctgcccccaacccccacctcgaggagagccccaggaggagggacctatgatgaccagtggttctcctggggcccatgcacctctcctcacccagatttcacctgggcttccctaggcacaggaaagaggagcccgagatcagtctctctgcgcctccctgcttccccccttgaatggagctgcgttcaggagctgcctacagtgcccagcgcatggcaggtttagtgttgcctgacttcagatatggcctattgttggggctggatgtttgggcctcgtggcttgaccaccaatggctgaagcaaacgctagctctgctgagctctgggccagcccagcttgtccttgccgcctgcagtgggccccaaaggtggggggccgccttcgggagcctgtgtgagctcgggttatgcccttccccacatggggcttccctccccagcaccgccctcactctaactcagctggtccttgctgccaggtcttccacaggagcatatgccctcaggctgtgcacaggccccccagcaccccgtcctgcctccctggcctgtgtgagtgattgcgctgaaggccactgggagaagccagggcaggacgcaggctgcac

SEQ ID NO: 27278 - DNA, 1372 bp, Artificial sequence
  DNA replication origin
gcctattgttggggctggatgtttgggcctcgtggcttgaccaccaatggctgaagcaaacgctagctctgctgagctctgggccagcccagcttgtccttgccgcctgcagtgggccccaaaggtggggggccgccttcgggagcctgtgtgagctcgggttatgcccttccccacatggggcttccctccccagcaccgccctcactctaactcagctggtccttgctgccaggtcttccacaggagcatatgccctcaggctgtgcacaggccccccagcaccccgtcctgcctccctggcctgtgtgagtgattgcgctgaaggccactgggagaagccagggcaggacgcaggctgcacagatgacggggatcacactggccttccttgaaggacacgatgcccgatgctggtggggggagggcagagccaggtggggggaggggaactgggggagtggggaaggtgggggcaggggtgggggtgggaggtagaaaagagtccgtgaggagtccttcctagggggcgtctcaggcttggcctccctggctgtggcttgccatctcctttgccctctgagggccacaggcctggcccaaccctgcagagaaggcagctggggatggaaacctctttccttccgctcttcagccatgctgaggaggggtacagggccaagagacacctgggtcagaagcttccctgagggcctcccagtaagtctggagctcccagaagggaggagaagcagggccagtgcatggggtgggggctcctcgggctggccccccaccaccaagggcctcccctcacccctccatgtggtgcatgttgcttgcctggaaatttagacaggaagactctgggccctgccgcccacccgccacagctccgttttcagccacagcatccctgacctctccttggagaatgtgggggccactggacacgccaggccctgatgccggcacaggcagcctcctcttgttcctggaccaaactgagagtcgggctgctatttctcgtggcccagtaacgagatgcagatgaactggtgaggaagagggtttttatttctgcagccggttacaaggagaaggcctggaaattatcaccagaacaagtcaaattacaaagttttccagaggttatgtaccttccaacctagatgtctgtgtgtaagtgtgcattcatctgaagacataagtggttaacttttttcttttttcttttttttgagacggagtcttgctctgttgcccaggctggagtgcagtggcacgatcttgggctcactatttttagtagagacggggtttccccgtgttagccaggatggtctcgatttcctgacctcgtgatccgccc

SEQ ID NO: 27279 - DNA, 922 bp, Artificial sequence
  DNA replication origin
gctctgtgctgcgggccctgtgccgggggcatccctgtgctggggggatccctgtgctggggggccctgtgctgggggcatccctgtgctggaggtctctctgctggggggatccctgtactgggggggggtccctgtgcctgtgctggggggctctgtgctgcgggccctgtgctgggggcatccctgtgctggggggatccctgtattggggggccctgtgctggggggatccctgtgctggaggtctctgtgcttggggggatccctgtactggggaggagtccctgtgctggatccctgtgctgcgggccctgtgctggggggatccctgtgctgggggccctgtgctggggggccctgtgctggggggatccctgggctgggggggtccctgtgctggggggccctgtgctgaggggccctgtgctggggggatccctgtgctgggggggtccctgtgcttggggatccctgtgccggggggccctgtgctggggggctactctgtgctgtgggtctctgttctgggggctctgtgctatggggggtatctgcgctgggggctctgtactgggggactctgtgctgggggtgtctgtgcaggggggctgtgtgcaggggagctctgtgttgggggctgtgtgctgggggactctgtgctgggggcgtctgtgctgggctcctctgtgccgaggctggaggcaaggatttaccattcatacttggggagcctcagccaaggtgcctgcagaggcctgggccagtgtgaagggtcacccttggcttgggtcttgggactgggtctaagaagagaaaaagcggctcatccccctggacttgggtagagacatgatgccctgggagtctcccttccaccccaggagtcagaaccctggctgcactctgccccacgtcctgg

SEQ ID NO: 27280 - DNA, 3048 bp, Artificial sequence
  DNA replication origin
agcaagctggtcgcgcagcgccgcacaggtgcgcacgggccggggaacgggaacggggacggggcggggcgcggcggcggctgaccgccccccggtgcccgcaggtcccacgcagcagcaggtggagggccggctcggcgagctcctgaaatgccggcagcccgcgccgccgacctcgcagcccccgcgggcgcagccctttgcgcagccgccgggaccctggcccctgtcgaggtgagacgcgcgcggccccggcccggcccggcccggcttcccctcccccgccggccgccctagagcggagggtgaccttggggaaatgttagtgaggtccggccacgtgctgcaggcggggcgggcgctccgggcgcggggggtgcgcgggtcctgcccactacgcgcccgcgggcctgcgcctcgcacttccgcctcacctggccgggcccgggcccccagcggggagaaagccggccagttcctgggtcgcaggggcctccagcgtccgaggtcggtgcttcgggcgaccttgggttgctgctggaaccctgacgtgcagcaggcccaggccacggttcgcggagagcgtcgggcgctggtcctcaagatctcccggctctgcccttgcagagctcagtgggggagacgtgcgtgcgcttccctcgggcagggccgctgccctcctccgcccttcaccccagacaccctggggcagtggggcctccccccatccggttgcttctgcttttcctaacccagttaggaaactccgagaccacaggagcctcagtccggccactgtggcctccccgtgaccatgacccagaggttggacagccccgcagggctggacgtttgactttggctcagttcctccaccgttcccttcatttatcctgtgcctctcccaggcctgtggattttgctgtggccccaagccggcccgaaggctcctggaggtggtagggtcatggcctgaggcggtgctggggaggagagctcgggccaggagttcagggcagctacaggtgggggggtgccgagccaccctcagcctgccccctgcctacctctcagaaaggtgtggaggttccagcggggcgggggctctctggggctccatcctagtgaggtaagtgccctctaccagaggcgccttctggcgggaggtgagtgggcccctaggtgcttccagcatcccagctctgctgggacgctccgcggacatcacccttggtcctcgtggccgctctacttcccaggggaggaaaccgaggcacacctgtagccaccacctggtccccaggcagggagcatgaggctggagtggcccagggtgacgccgtctctcttaacctggggaaaccacctttcttctctctccaagaccccactgctagggagggcaggggtaaggctgtggcacagttaggaggagttagggaagaagatggaaatgcttcccagagttctccatgggaccccaagggtcccagtgggcaacaccaggcccactggctgttgtctctttttttttttttttttttttggagacagagtctccatctgtcgcccaggctggagtgcagtggcgcaatctcagctcactgcaacctctgcctcccgggttcaagcgattctcctgcctcagtctcttcagtagctgggactacaggtgcgtgccaccatgcccggctaattttatatttttgtatttcaccatgttggccaggatgggctcgatctcctgacctcatgatccacccgcctcagccccccaaagtgctgggattacaagtgtgagctaccgcgcccggcctgttttcttaaagtccccatgtgaggtcctctgtcagccagtgggacctgtgggagttgagtgggcttcaccccgtgtgcagtggggctagaggagccctgggcagggcaggatgtgtgctgccctctcctccctggggtcacccaccttcccacccccaggccccagcgctgggagcttctggcagcagtgggatctctgcatgaagcccccatcctgctcctgcaccttcttggggcaaccaccttccctctgtttctttttttttgaaatggagttttgctctgttgcccaggctggagtgcaatggcaggatctccgctcaccgcaacctctgcctcctgggttcaagcgatcctcctgcctcagcctcccgaatagctgggattacaggcgtgcactgccacacccagctaatcttgtatttttagtagagtcagggtttctccatgttggtcaggctggtctcaaactccctacctccggtgatgcgcccacctcggcctcccagagtgctgggattacaggcgtgaaccaccgtgcttggccaaccaccttccctctgaaccaccccaccccatgctgccacccacctcgctgttttttacttcatttaatttttttctttttgagacaaggtcttgctctgtcacccaggccggggtgcagtggtgcaatcatggctcactgcagcctcaacctcccaggttcaagtgatcctcccacctctcgacttcctgagtagctgggatgacaggcgagcaccacacctggctcatttttaacttttatgtagacaggtctcactatgtggcccagggtagtattcaattcctgggctcgagcaattctcccgccttggcctgtggaagcgttggggttataggtgtgggccaccgcgcccggccctgccctgccttttcttctccttggtgctttttgctactcctcatctctcactgactgggcgcgggaggggggtgtcggggtccctgcacatctcctggtgcacccagagggtcaaggcttgtcacccatgatgtatgctggctctggttcctgccaggcatgggtctgggcactgcccacgacagtgacagaccagataaaccttggtttgtttttttaatttttatttttattctgagatggagtctcgctctgtagcccaggctggagtgcagtggtgtgatctcagctcactacaagcttcaccttccgggttcaggcca

SEQ ID NO: 27281 - DNA, 1601 bp, Artificial sequence
  DNA replication origin
atgctggctctggttcctgccaggcatgggtctgggcactgcccacgacagtgacagaccagataaaccttggtttgtttttttaatttttatttttattctgagatggagtctcgctctgtagcccaggctggagtgcagtggtgtgatctcagctcactacaagcttcaccttccgggttcaggccattctcctgcctcagcctcccgagcagctgggactacaggcgccctccaccacacccggctaatttttttgtgtttatagtagagacggggtttcaccgtgttagccaggatggtctcgatctcctgacctcgtgatccacccacctcggcctcccaaagtgctgggattacaggtgtgagtcaccgcgcccggccacctttgtttgtttttgagacagagtcttgctctgttgccaggctggagtacagtggcgtgatcttggctcactgcaacctccgcctcccaggttcaagtgagtctcccaccccagcctccggagtagctggtattacaggtgcccgccaccatgcccggctaatttttagtatttttagtagagacagagtttcaccacgtatgctaggctgatcttgaactcctgacctcaggcgacccacccgcctcggcctcccaaagtgctgggattacaggcatgagccaccacgcccagcccagatacacctttgacaagttcttcctcctggtgggagatggataggggaggcagtaagataaactgaggcgatataagtaataagatgaaacggggccatgtgatcacccgaccccagggcagatggagggtgtggggaccgccacaggaagggacaatggaatgaaccccacagggcgagaaggggcagcctgcaagagacgggggtggggaggcccagtgagggcaggctgaggggctggcttgggggctgtactgggtcagggccatggactctgttgttggatttgctatgatatcctggtgctgcccccacccagcatgtaatatgctcaggtggattctctcccaagcccagcttcatgggctgaaaaagggatgggctgtggaggggagaggagaggatgcactccacagccttcacctccctgggctgaagtttgcccggagcagtgtccctggaagtgggagaggttggcggtgatccataggtgctcgccgggccggtgccctttcccccagagagcagcagccttacgtaaccagagcccctggggcggtgcctgcctcctggggcccatctctgcccgagagccgccacctccgcccttcgattcacagcccctggcaatgttcttgtcttcttagacattgataatccaacctccaagctttcttggagtttctggctttccgaggtgggagtgggttgcaggcaagggggctttccaagtggacaaactttattccctgtggtttgtgcagaaactcaggcagcgggcaggcctgggaggtgcccctgcccctgtcccatctccacctgcacgttttaagatcctctgtggccaccagaccctgccagccctggggccggcaggaccctgcgcccctcaagacactcctctttattttagtgcc

SEQ ID NO: 27282 - DNA, 1612 bp, Artificial sequence
  DNA replication origin
agaaactcaggcagcgggcaggcctgggaggtgcccctgcccctgtcccatctccacctgcacgttttaagatcctctgtggccaccagaccctgccagccctggggccggcaggaccctgcgcccctcaagacactcctctttattttagtgcccctctcagctgaggaggaaccgagagcggcgctggggcacctgagcccaggaaggcaacaggccggccgggaccgcgagtgcctggcggagcaggcgcagcccaggactcccggctcccacctccggctgtaggtgcggccccattccctccacggccctgtcccgggctttgtgtgctcagggctcggccagctggggccgctcatccctgccctgggcccggctggccgggacgggcccaggggcccaccagacgttgcgtgcggcactgcgggagccatctcctttggcatcgccccttgtctcgggccggtggggagtgggcgagggttatagtcactctcccgactcagggactgcccatcccggcacccagtcctcatcccatgggacgtgggggcagccagggagagggcaaaggcccccgttcccgtccaggtccatccgtccatggagggaaacatcgtggagatggaggtgcttctgtggggcgagaatgtggcctagaactacacccagagtgggggggttggggcagagagacatggtcatggactgggtcgtggctcaggtcagaatctgggctgctgatgggatgcaggtggcagcatgggcacctgcaagaccctcggggaggggtactgagtggggcccgaccaaaggtttgggacactctaagactgaggcccccaccctacagtcactcacttccctcaggacacagggctgcaggtgtgagctgagctgccgatggcttggggactgcaagagaggcctgggccaccggctgctgtgggtggctgctctctctggttcaggaagtgcctaggctggccaagtctggggaaagtgggctggcccggggctgctcctgagttctgccaggcagcaccgcacctgggatgggcaccaaccatgtccgtctcctcccttcctgcagtccagggccaaggcttgtgttcaatcgtgtgaatggccggcgggccccctccacgtccccatccttcgaggggacccaggagacctacacagtggcccacgaggagaatgtccgctttgtgtccgaaggtagcgagcggggccagagggtgcggcataggctgctgggtcgcaaaaccatggacccgggatggccccacttcaagctgacccacagccgctgcatggctgtgcttttccttggcactctgcccttgtgtcctgtgaccagccctgtgtggggctggagtccagggtgaccatcaggccctgggtgggcgatggggtgcctgggacctggctcagcccgactgccctcctcccacagcctggcagcaggtgcaacagcagctggatggtggcccagccggtgagggcgggccaaggcctgtgcagtacgtggagaggacccccaatccccggctgcagagtgagccccccaaccctgtccccccaggagagaccccccagcccctct

SEQ ID NO: 27283 - DNA, 1413 bp, Artificial sequence
  DNA replication origin
agccgcgcgctacctcgggccatggcgccgccgctcgagcttcccgcctaggcctccgcgcgcccagcgcagagtacgccccgcgacgccaggcaacggctgcctggcaacggtgccacttccgccattacttccgccgtcatggcggcgccctggccacgtgacctccccggtgggagtaccccgctcacgtcagcggcctccagggttgctccagccgcgaatcccgctgccctttgccccgcgggcctcccaaggcagccccctgttagcccgaccggcttcgaagcccgcgccggttgcggatcctccgccgcgcccacctgtcagcgcctcggccggccggggctcccgccgcatgcaagcagcgaggcgaggtcgcgctgaggcctggccatgccacggacggccgggcctcaccctgccgctctctcgccgtccagaggcccctgctccacacctgggtaccctgggtcctgactcaggtgggctgggtcatccccgtccatcagggaaggtagtgcgggcgcccgcggaggggctggttcccacgttcgtcctatcaggttccccacgtactccttcgcccagtgtcctgcggccgggcccggcggattcagaatgggacctggcgttctgagacacagccccagtgccggtagtggggggtggtggactgcactccggggccatttaatgtctttaggccttgagtctcggcttcggtcccagtcaacgccaacgggagaggaaagaggaaccaagtggggtccccagacttccaagcaaggtgggctggctaacgtccctcctacctgtcgcagggcagctgggtgagaagctaacggcttgaaggaacagggctacaaggggagtttgtgctgggcctggcgtcccaggctgtggactggaactggacatgagaaccccccctacaccctcccaagtcaaagacactccaaaaagacagtttctccactttattagcctggagctcctccctgccagccccaggggctggtcgctggtccctgggcacagtgagcagggctgaggtcagacgggttcggcccttggccatggcagcttggttgggacagccgggccaagggaaaaaaaggtgcaaaagtccaaatgctggcacttcaggtgtggccggcacccagccaggcgcagtgggtgggcagggcgccatgcttctctcctggcgacaggtcggccgtgtagcagcgccccctcccagcagccactaggaacagctggtgattctcgccaggaactgctgcgcccaccactcgtctaggtcaatgggcacaaagtctgtgggcagagaaggctgggcagtgatgctgcctcccaggccagccggcaagtctcccctggagctaaccacaagccgctcacccggactcc

SEQ ID NO: 27284 - DNA, 2002 bp, Artificial sequence
  DNA replication origin
ttcagacacttccgggtggacgagtggaagcgctccgccaagcagggggacgtggccgtggtcacggtaggcggccgggggctcgcccggagcccacacccctgccctgcccccaggagagctgccccgcccccgagggccccctcgcccccgctgcacttcttctgggtgctgtcggtgatgcgggctcccgcttctccaggacaagaccctgaagggcgccgtgtatcgcattcggggctcagtctctgccgccaactacatccagctccctaagagcagcacccagtctctggggctgacgggacgatacctgtatgtgctctttcggcccctgcccagcaagcacttcgtcatccacctcgatgtgtcctccaaggtacggagcccgcggctgggggctgcgtgggagccccggcacccctgcggcccctgtctcctcacggccctgctccgtccccacaggacaaccaagtcatccgtgtgtctttctccaacctcttcaaggagtttaagtctacggccacgtggctccagtttcccttggtcctggaggccaggacacctcagagaggtgacaccaagatggggtgtggatgatccaggacaggtggctggagggagttggtgcaggcccagtgaggctcctctgcggcctggaggacaacctggcgggggcacaagctcacagttctgggagtcgcgggctgtcaggagggtgggcgctgaccctgagtgcccatcctgcagatctggtgggtttggccccctccggagcccgctggacctgcctgcagctcgatctgcaggacgttctcctggtctacctgaaccggtgctacggccatctcaagagcatcaggctgtgcgccagcctgctggtcaggaacctgtacaccagtgacctgtgctttgagcctggtgagggccgcacctgcactccccactccatatctcacccatgctctcagccctggagaggcccaagtccagggtgcttgggaaaatacagtgctcgagctgtgctgtctctgagctctggccagaacccatcccagaggcagccctggggtcagaacccatcccagaggcagccctggggtggggcggtggctgggctggtggcgtggcagtgccttggcgggtgccctgtgttcaggtggctaaacagcctcccttgacctggaacaaccctgctccttgtagccatctctggggcccagtgggcaaagctgcccgtgactcctatgcctcgggaaatggcattccctgtgcccaagggagagagctggcatgaccgctacatccacgtccggtgagtggttctgcttctttcgagggaggcctcggtggtgggagggtgggtggcccttgggcccccagacactgactctccctctgcctgccaaggtttccaagtgagagcttgaaagtgccttccaagccgattgagaagagctgttcccctcctgaggcaggtgggtctggggggtcagcggggacccaggttaaggcctgtagggtgcgtggggctcggtaggagagggcagggctgggaaaggacccagtggtgtgctggctgcagctggtgcagggacccagggaagcccgtaggttgtccgagttcccagaaccacgagggtgggaagtctgtgtgaggggtacccgggggccccaagctttctagctggaagaggagactttcagggcctagggtggaagtggggatactggctgtgggtcctgcagagccggtgaggctgggccacttgctgctgccctccccaggcgtcaccctcaccaggcatctgcacagctggcccctgggtcactggggttctttgctctgttctagtcctcctggggccggggccacagcctctcccttgcccggtggcctccagcaaacctgtgcggttcagtgtgtctccagtggtccagacgcccagccccacagccgtgagtacccccttcgccctatgagatggggttggggtgtgat

SEQ ID NO: 27285 - DNA, 1619 bp, Artificial sequence
  DNA replication origin
gggccggggccacagcctctcccttgcccggtggcctccagcaaacctgtgcggttcagtgtgtctccagtggtccagacgcccagccccacagccgtgagtacccccttcgccctatgagatggggttggggtgtgatggcccaggacgctgatgggcacttgtcccccagcagtccggccgggccgccttggcacccaggcccttcccggaggtcagcctgtcccaagagcgctcagacgcctccaacgcggatggccccggtttccatagccttgagccctgggcccagctggaggcctctgacatccacacggctgctgccggcacccacgtgttgactcacgagtcggctgaggtgcccgtggcccgcaccggctcctgcgaagtgagtgcccatcccacagcaggcggggcctggtgaggtgtgggctggggcagctggtagcccgccccgagatgcattcagaacggatgtgcctccaacggtctcctcttgttcagcctcctggcaaggagcagagctggcgggaggcggctttggggaagaatctctgtccacaaagagtaaggcagggcttctgctcacccccaatgcgtcagccccaggtggtctgtgggggaccctcgaaggtctggcagtgcaactggagtcccagcttccaccttaccacagccagcaggagccacccaggaccagggcagtcttcttgagaggcaggacccagctaggggttggcggggctcggagttggtcgggcattctggggacctggctgagcctcccaggactttgatgcgaatggctgtttcagggcttcctcccagacccagtcctgaggctcaagggcgtcatcggctttgggggccacggcaccagacaggtgaggctcctgcggctgtgtccagagcagctctcgttggccggctcgagcgctgagtacagaacggggagagaggagagacctatgtcctgtggtggctgtgtgtgggctcccgagcccccctggcacagcggtcccgtccccctgcagtccgctgcttcccgcgtgctcaggcatctgccccgcccacagctgctgtcacctcctggtgcccgggggctctcagggtcacgggcatctcttactcactggctgggctaagtgctccccccgaagacccagagctctcacgtctttagagctctgatgatccagaccagcagtgtggggccaggctgtgggcacaacctgtaggtccctcatgggtgacgtgggccttctaggagaggagccccatggcagaggaggtggccttcccctctgcctcagtggccttgggcccttgtcaggccctgctgggtgcctgctctgagtgtttgggggccctttggccttttgttacccccaccccggagtttcttgcactggaggcggggcttagaggacaggcgtctgtgcatgtgtgtacacgtgtctgcttgagtgttccagctgttcttttgacacatgcagcctgtgactcgtgtatgtagtgtgtgcagggtgtgtgttctctcttgcccctgggtggctgtgtgcccaggtgtgtgtgccaggcctgccaccccctctccctgggctggagtgggaggtgag

SEQ ID NO: 27286 - DNA, 904 bp, Artificial sequence
  DNA replication origin
tgaaaccctatctctacaaaaagttaaaaaaacaaaacgtgagaccatcctggctaacaaggtgaaagcctatctctactaaaaatacaaaaaaaaaaaattagccaggcatgttggcaggcgcctgtagtcccagctactggggaggctgaggcaggagaatggtgtgaacctgggaggcggagcttgcagtgagctaagatcgcgccactgcactccatcctgggcgacagagcaagatgccatctcaaaaaaaaaaaaaaaaaaaagttagccaggtgtggtggcacacgcctgtggcccagctatctgggaagctgaggcaggaggatggctggagtccagctggcggggaggtcagggagggggtcaaggctgcagtgagctatgattgcaccactgcattccagcctaggtgacagaacaaggctctctctcaaaaaaaaaatgtttaaaaaggtgcccccaccaagatgccgggtgcttcggctgtgtggaggtgccattgatgcccaagcgtgggtcagctgcaggggctctgccacgtgaaaatcttacaaccgcatcaccagcagagagaacgaggcgaggtgtgtaaacgctggcttaaaccgactccgatggccgaaaagccgagacgtgaaatgtgagctgctggtggtggtttttgtgcagggcacgggggcggcatgaacaccagagtgcagggagccccaccacagggaggacacagagcagggacccagggtcacatgaagctggagtttcagaaaaccaagacccttccagctgtctgcgtgcatcaggacagccccaccccaacccgcagccagggccctgttaccgtcctcccgtggtggtccttgccaaccccgcagagaagggccccgctgtcagagaagct

SEQ ID NO: 27287 - DNA, 1416 bp, Artificial sequence
  DNA replication origin
ccggggcggtgtgggagcgagccagcatgtggtacacccgggacagcgtgtccaggaagcccaggtggcccgaggaggtggcagacagcacacggaggccatcggggctgacacagactgagctgacggggccctcgtgctctgtgggtggggtggggtcaggggcctccagggccaccccggggtgagccgcatgctcaggcttcgggtccccgacaccccagcaaatgcactccctgctgctcaaagtcccaggctccacacggctgcaagatgcagctccctcgaggccaccactcttaggctaggcgggacccaggctgaggggcttcacacactacccacgtcccaccgggcccttccgtgaggctgccccgcgggccgccctggcatcagccgccccagggctctggatatgccacttggccccgtggcaccctgtgcagccaggagccagggcggctgacagcagagccccggggactgggccttccccgccccagcatccaggcgaggctctcccggagttgggagagcgtgcccacagcatcacctgcctccaggagcaccgaggagaagtccaggggccagagccgcaagaagccgtcctcagagcccacagcacacatggccggggagacgctgaggctgctgatggcaatgccggggcctgggggcagggaggcgtcagtgcctcggtgtccctgccaccctggccacgtggtgggcgccctcttacctgagctgaaggtctgcttctgtgggtggggaccgcctggagtccgtgtggggagcaggcggcgggcatgccgcacgaccatgcgctgacagtcaatctccaagatgtggccactgcggctgcacacgaagctgcccgaggaggcggcagggaaggtgaggccctcagggaaggggaggcccaggcaccagggcccccatgccggggcaggccgtggggaagggcagggactcacagcatggcagccgagggctccgggcagccgtcccgggcctgcttgaaggccaggtcggtgaactgcagcgcgtggtgctcccctaagtccacggggcaggaacgcagcaccccgccacgcagccgccagagccgcacactgccctgcccgcacgacgccatcctgcaaggaatgaggactgagcactgccgcagctcgcagcgccctgacccaccgggagacgcagagacgcacagccaagccagggggaggtgctcgggcctcggcccccactccgggcccagaccctctcccaacatcgtggatgggcggctgcatcacctggtttcatcaaaaaaggtgacccggaaggcctggacgtcaaagtcagtgtgcgcctttgccagaacgaccacctcgccaccgaggcccacctggccggtgccccaggccaccaccatct

SEQ ID NO: 27288 - DNA, 2117 bp, Artificial sequence
  DNA replication origin
ctcctcgggcagcttcgtgtgcagccgcagtggccacatcttggagattgactgtcagcgcatggtcgtgcggcatgcccgccgcctgctccccacacggactccaggcggtccccacccacagaagcagaccttcagctcaggtaagagggcgcccaccacgtggccagggtggcagggacaccgaggcactgacgcctccctgcccccaggccccggcattgccatcagcagcctcagcgtctccccggccatgtgtgctgtgggctctgaggacggcttcttgcggctctggcccctggacttctcctcggtgctcctggaggcaggtgatgctgtgggcacgctctcccaactccgggagagcctcgcctggatgctggggcggggaaggcccagtccccggggctctgctgtcagccgccctggctcctggctgcacagggtgccacggggccaagtggcatatccagagccctggggcggctgatgccagggcggcccgcggggcagcctcacggaagggcccggtgggacgtgggtagtgtgtgaagcccctcagcctgggtcccgcctagcctaagagtggtggcctcgagggagctgcatcttgcagccgtgtggagcctgggactttgagcagcagggagtgcatttgctggggtgtcggggacccgaagcctgagcatgcggctcaccccggggtggccctggaggcccctgaccccaccccacccacagagcacgagggccccgtcagctcagtctgtgtcagccccgatggcctccgtgtgctgtctgccacctcctcgggccacctgggcttcctggacacgctgtcccgggtgtaccacatgctggctcgctcccacaccgccccggtgttggccctcgccatggagcagaggcggggacagctggccaccgtgtcccaggaccgtaccgtccgcatctgggacctggccaccctgcagcaggtggggtttggcaggggcagcacggcagggagggccgggaggtcctgaagctggggtttgtcagcgggggtgagaggggcctatagggacctggactttccagcctgtgtcggccccatgggtttgggccgcctggagagcccctgggcccttgagatccctgccctcccctcagcacggcccctgtcccacagctatacgacttcacatcatcagaggacgccccgtgcgctgtcaccttccaccccacaaggccaacctttttctgtggctttagcagtggggccgtgcgctccttcagcctggaggccgctgaggtcctggtggaacacacgtaagtgcccagctggccaccagccccacggagaccccacggtggaagctggggtggccaggtgggggtcatgtgcaggatggccagtgctggctggagccccaccctttgctgccccatggggacttccatggccaggctggttggctggaggtcgagggaacccatggtacctgggcttcggggctagggccagcggggtccctgtgtgtgctgcaggtgccaccgaggagctgtcaccggcctgaccgccacccctgacggccgcctgctcttcagctcctgctcccagggctccctggcccagtacagctgtgcggacccccagtggcatgtcctccgagtggcaggttgggccccctgcagccactctgggggactcctcagggcgggggaggcctggatctggtgcaggcccacacctggacacacatgccggtttcctggtgcaccgactgggtcctgtgggggggcgtggccgcctcagtaaccttgtcaaggccctgaggagactgtggtttagcgttcactggaccccaaggccagaggtcagctcgggtctgtgcccaggaggcggcaggcagcccaagctccaggtcagcagctggagtcagacccaggcatgggcacctgccctgtcctgcggccaccataacttgggccccctgagtggtcacttatgactactgctggcccacggggactcccagctcccctggcagcgcctggcgcccactggcaccttggcaatcctctgccggtgtgatgcgtctgtgctccggggctggtgtttcccgaaagtgggg

SEQ ID NO: 27289 - DNA, 2918 bp, Artificial sequence
  DNA replication origin
gacacgtcccagacgcggatctgacaatgggcggtcgtgctgcttcggcccgaggcagaggccaggacctggcaggcaagaggccaggcgtgagtggggaggccgtggctggctggagtggaggctggggtggccgtctgctccgtctttggtggtgagaacccgcaccggtccgggagctgggttctgccgggcacggtggccctgggagaggaggagggcgatgcaggcgggcacctgggcactgtggctgagggccagcgtggagatctccgcagagtggccggaccagtgctgctgggcgccagagtgcaggtcctccaccaccaccaggcggccgcacgtgtaggcaaagaagcctgtgcgcagagagggcggggcctgaggccgggccgggggggggggggggcggggaggggcctggggaggggccgaacagggggcggggcctgggccgagccgtggggcggggccaaggggttagcatcgtcccagctgcgccctccccagcgtccagtagccaaagtgcttcacaggacctcggctggagcgccaggaggcgctaccgggagaacagagccccacactgatggctggcgctcatttgccaccaggtcctggccttggggtggagacggctggaccacgcgcggccgcatcttggctgggggtgggggtaggctcttggcccccacctgtgtccggcctccagaccatgttggcccgcccattcccgctgtaaccgacgacagccttcagacgcagccacccaccgctggcgggaggcgggcaagtgccctgcgaggaaggagacccggatgctgctggggcccagcatggccacctgtgccccaaagcctgcacatgggaggctgtgttggggcacacccaggccagctgcagaggacacccaggggcagacggggaagctggggtaggaggtgtgggagctgtgggcactgtgccagggccaggaggggcacaggcccgtggggctctcatcaagggcagctgctgggtgagaggggaaggcaggtcagcaggaggccaccacagagtcccgtctggaggccagcggagggcaggggtgggggtgtgggatgaagttgcctccaggggacaggcgcccaagggccagagccatcacctttggcgaccaaaagcaaccctgaggaggtgctggggagccctgcggggggcctctgtgcttgctggggataaagagggctcccagaaaccactccccaccttggcagagtgggggctgcagctgaccctggcaggcgtgaaggccttgcaggaagccaggtaggtggtgcgtggggcccccgaattcctggtgtccctggcgcctggcagggaggaggcagagcttgtggcattacactgccctgagctcttcagagaccccacactacacgcagtctccccacaagcccctggtctaccacacagtgagaactgcacggcggggcacaggccggagccacagacgcaggcaaaccgtgtcccactgcaggtgaccttgcctcgtcacacgggggactcaccgaccgtcctcaggcccctgcaccggcaccagcgtccctgccctgccctccactgctcacggggttggccgggggaacggggaggcagggcaagcccccaggagcccactgccgcagcccaggccccgtctccagccctgccagcctcctcctccgtgagcacaggtgggcctgaggcctgcccaagcccctcggggtcacagctctcctcacagggtccttcctcatctgacggggacaaggtgcctggggccaagggggagaggaaaagctgcccccatcccgaccccaccgtgttccacctgatgaggctaaggaggagaggaaaagctgcccccaccccgaccccactgtgttccacctgatgagcagcgatggcacctgcaccccagagctggacgtgcgtgagtacctgctgccactgggcctgtgccctctcagacccccgaatccccccactcctccaggacccctgctgctcaccatcgccaccttcgggaggcctggcacagacgcccagccgtggtggagatgcctgacatggcttggggacctgctgccgggggagctcgctggccctggacgctgcgtcctccagcggtcctgcgcccgggcctggggaagaagcagccctgtgatgtttgggaaggaagaggaagggccactaggcagacacaggacgggccccagagtcagcgcagcacctgcaccccagctgagcacagccactcacctgtcttgcaggctgggggggccccggggaagctttggtcgctggagagggaggagagagggtttcaggagggcctggggggcctaggcagacacagctgagagtaggcacttgcctctcagtaggggccaggacatcccagaggaagacggcgtcccctgcgctgaggacctgctgctggtcaggagagaaggccacagcctgcacgggttccgagtggccgatgtacacctaggggtagcggcgtcacatgcaggaccccgaggcggggcatggatgctgccgtgtgcccagtccccagggacggtgagccccacacagtgtgaggccccggaggcacagaggatccttggggggtcactctcacccctcaccttctgctctccctgcccccacccacacctgcaggggtctccagggccacctgaggaggctcctgaccgccaaagccacctgcctccccacgcacacacctgggggcctgggctggcctgtgtggcgtagtcccacaccttgatggtccggccggcggcaatcagcaggaagcgggcgtcctcactgagcgtcaaggaggggcagggctcagggtggacaccgggcagctggaacacagtgctcttgggaaatgccgtgtc

SEQ ID NO: 27290 - DNA, 1515 bp, Artificial sequence
  DNA replication origin
tccatgaacacagaactggacctcagggtgcagggaaggagagaacaatgggtctcaaggccgatgacaagagccagctgggtccccagccgaggcagggccctcagcattgcatctcaggacctggctgtgccctcccggtggaagaagagaaagcccatggagctggggcttctgggcccatgcccgtactcgacagcagccagtgaggcccaggccacacccaagcctgtcccttggaggggctagcaggcggccggtctgcagggcggcctttgcgggggcggggcactggctgcaagccccagtcagggacaccaacacccacgtgcagccaaaacacgtaggggtgaacagctcacctggcgcctgagcccttgcacctcagctccgacacagcccccacggcccacaggcgcagccgccccgtgctgctgccgctgaccaatcgagaacccgagaacagcaacagccctaggggcaggaggagccataaggggccacggctgccttcccagaggccctgggtcacaaggctgcccggacgccagggctacagatgaggcctctgccccagctctgaggatcccaggtaggggtcctgagggccacagggcttctgcggggcactcaccaatgccaccgtcatccgcctcccaggacaagaagcagcggccggcacgcgtgtcccagacacagacctggccagagctggtgccacaatagagcaggggaggtgccccgtagcagagcgaggtcagctctccagcccccactgcctctgggactggctctcgacgcacctggcaaagtatgagagtggccatgggtcagcagtgtcccggggcccaggcagattccaccccacaaaacaacccctgggcccaaacgctgaacgggtggcacctgaaggctgatgtctgccccacgctgctgaaggagccagaaggtgacagtgccctggcccacacaggtgagctcgccggcgtcccaggggttgaaggccacaccatgcaccggctccgggaggcgggtggaggacacgaggtcataggtggccgtgccccacagggcgagggtgcggccatcgtggtcccctgggaaggacacagagcagccacgtcaggtgcacagatgcagccccccccggggtctagggaagcccctggcctccaccctccctcccactgacccagtgtgacaagaagcctgtcatctggtgagaaggccagggccagcacggtggtgctatgggggaaaatgagatgctggcagaggccgccagacacgtcccagacgcggatctgacaatgggcggtcgtgctgcttcggcccgaggcagaggccaggacctggcaggcaagaggccaggcgtgagtggggaggccgtggctggctggagtggaggctggggtggccgtctgctccgtctttggtggtgagaacccgcaccggtccgggagctgggttctgccgggcacggtggccctgggagaggaggagggcgatgcaggc

SEQ ID NO: 27291 - DNA, 1281 bp, Artificial sequence
  DNA replication origin
aaggaaaaaaaaaagatgaaaaaccccacatcgtctgtccctgcacctcccatagactggctttgctgactcagtctcatgggattgttctctgaggctcaagaggtcaggaggcccaggtagctactgggtcaagttctgctctctctgggtcaggtctgttcaggttctggttggtgttgggtctagtcctgtaaggcccagctctggcctgcagcctcctggtgctggagctgcgtctccaagaagtacacagcactcatctctctgggacctcctggtctggaagctctgtggcctcatggggttgggacagccaccgtgtcgccccctcacccgccagctgcagccttaggagaggtggcctcctgggcggaattggggcggcaggacaggtgccattccttcccctgctggaccaggttcctggcgtggcgttggtctagcagctgtggccatgggcttcctcctgtgggtgtaagagctctgcgtgtggtcagctgggccccacgggattgatttttccttgatgctgagtcccatcatccagttgcccctgggttgtttctttagaaacctgtctttagtatttggagatgacgatagccagcaaagaaagttgagtttgagacaggtgagggttgtttacttttctggaagcaggtttgctgaggtgtagtcgtcacagcacaagctccgtgtgtttcagggggtggcttttggcatattcagcagctttggaaaccccgtgcgtgcctagaggaaaccccgtgcgtgcctgttcctcggtcgctccctgcttcccgcctccccagcccctggcgaccgttgagtggctttctgtgtctgggtcttcccattcaggatattctgtaggaactggctcacctggcttctcaccctgagcatggtttccagggtcatcccagccgctgtgtgtgccaagccagtcatccctcttgatggccaaatactgttccattgtacggatagatcatgtgtgtgtccatccaccagggctgggaaattcgggtcctgagaccgtgacctgagcccgtggtcactggtggccttcctgtgatgtggaagtgcgaggaattctgggccccgcctgtgtggttctgcctgggcggttctgcctgggcctggactttgccgtttccttgtagggcccagggccctcccggggagatggactgagctgtcctggtctgagtccctgcagtccctcattgctcagctgaactgaattttttttttttttttgagacggagtttctt

SEQ ID NO: 27292 - DNA, 2113 bp, Artificial sequence
  DNA replication origin
acccgtgcattcaggccctgtgctgggcgctgtgcctggttcctcacctgcctcatcatctcctgactccaggaccctctctagggcagatgtcctcaccccaccccagagacgaggagcccggggcacaggtgaggcacctgtcttggaacagggcaccagtcagcccacttggcccccacctaagacaggcccaaactgcatccaccagcactcaccagcaaagccaacagccaggaggtgggtcccgggggacaggctcagggacatggcaaaaaagggcagtggtatcttctccaccacctgtgagcagccagcgtgaggctccaggcctgtgggctcagggctcagccaggccccacccaccaccctggatccctggggctcccagtgacacgcgggcagctgcgtgtacctgcttctggcagaggttgtagatgatcacctccttgtaaacaccggggcccacgtacatcaggagcgccccatcccaagggcagaaggcagcgagggagggtggcaggtggccctgagtctgcaaaggcgcagcatgctgcggtggggtggatgggtaccggccccacccacagtgccaggagcatggtttacctccgtggtggcaggcattgggaaactcaaccagtccacaagctcacagtggttccgcagccagtcggaggcccagacgctgacccgctggtccccactggcagccagccataggtctgtgccctccacccctaagtcttcacactgggaatggagtgggtgagggccgacaggtgccttctgccaagatggtgcctgcccccaccagcacccaggccccctctccccagctcttggggctgctttacctctttgcacgtgacacagatggtagagattggggcgccctggtggtcactcagcacacggaaggttgtccctgtgcaggggtggctcacagccacgagcccatccttgtctccagagaggacagtctgacctgggaccatgccgtcaccctgtgagcccccagcccggagactggacctgggccaggtcaggacggcaccatccccaacacacccaactcctcaccatcggtggagaaggcaacagtggtcagcgccaccgggtgggggtgcatcttgagctccatggccgtgcgggagacgctgaagatgcgcagggagccgtcaccgtagccagccgctagccgctgctgctcagggcggccacagcacggggggctccatgccaggcagaggcagctctggggacccacagtggggaaacttcagcactcacaggggccctgaggacacacacccaggccagagggaggaggcggccccgcccatgccaggccccccactgagcaggcccccatcccgcccccggcccgggcactccccacacacctggttcagcacctggaactggatcacaagctccatgctggccaaggcccacacccgcacactcccatcctcactgcatgtggcgcagtgggactccccggggctgaagaccacctcgttcacctgggggaagccgtagctaggctgggggtgttggcccctgggcagggtaaagggacgcaggcatttcctattccagcccccagggccgggctgtccaaaccagagcatgtgcctctggccccggccaactccacatggcggaaaggagcaatgccggcccccgtgtgtgtccctgcactagatctgggtgagtccaaaccaaagcaagcccactagccagtcaaacccggcgggataccgaggagaaagctgttctgacagcacctcaaagacaggagcgtggccgtgcatccctagcaggctacagactgaggctgaaagacaggagtgtggccgtgcgtccctagcaggctgcagactgaggctgaaagacaggagtgtggccgtgcgtccctagcaggctgcagactgaggctgaaagacaggagtgtggccgtgcgtccctagcaggctgcagactgaggttgcagcgagcgcgccatgcagtcgcattcctcctcccaaaaccgctgcacgctgattggggggaaatgcagacgtgtcattatgcaggtgccactgacagctgggactgctggactggc

SEQ ID NO: 27293 - DNA, 1619 bp, Artificial sequence
  DNA replication origin
gccccaatctctaccatctgtgtcacgtgcaaagaggtaaagcagccccaagagctggggagagggggcctgggtgctggtgggggcaggcaccatcttggcagaaggcacctgtcggccctcacccactccattcccagtgtgaagacttaggggtggagggcacagacctatggctggctgccagtggggaccagcgggtcagcgtctgggcctccgactggctgcggaaccactgtgagcttgtggactggttgagtttcccaatgcctgccaccacggaggtaaaccatgctcctggcactgtgggtggggccggtacccatccaccccaccgcagcatgctgcgcctttgcagactcagggccacctgccaccctccctcgctgccttctgcccttgggatggggcgctcctgatgtacgtgggccccggtgtttacaaggaggtgatcatctacaacctctgccagaagcaggtacacgcagctgcccgcgtgtcactgggagccccagggatccagggtggtgggtggggcctggctgagccctgagcccacaggcctggagcctcacgctggctgctcacaggtggtggagaagataccactgcccttttttgccatgtccctgagcctgtcccccgggacccacctcctggctgttggctttgctggtgagtgctggtggatgcagtttgggcctgtcttaggtgggggccaagtgggctgactggtgccctgttccaagacaggtgcctcacctgtgccccgggctcctcgtctctggggtggggtgaggacatctgccctagagagggtcctggagtcaggagatgatgaggcaggtgaggaaccaggcacagcgcccagcacagggcctgaatgcacgggtggcagcgacttttaaggagggaactggcccagctgcaggccgacagcctggcagtgatggaccccctagtcccagtggcacgtggagggcacagccaggagcccttttagcaccagctcccccgaccagcatcatgcccagtggggacagtctgggtgggttgggggagccctctgagtgctgcctggtcctggccctggcccacctgcaccgtctacccacagagtgcatgctgaggctggtagactgtgccatggggactgcccaagactttgccggccacgacaacgcagtgcacctgtgcaggtttacaccgtccgccaggctgctcttcacggccgcccgcaacgagatccttgtgtgggaggtccccggcctctgagatgcagcagggactgtggtggtgggcatcacgcctggtcatgccaggcacctggacacaggcttggcagaggcgccaggttgtcaatggcctcatgctgggacaggccaggattcacgtaaatcgcctggagcaagctgttgtaaatttggcgccctgtgaatactttcatacctgttgcccttttgcctaagaaatctttaatgtttctatcttgtaataaacatgggcatttattgcattattgctgcattgttgcactggctgtctctggtcactcctggcctgagctcagcctctgcccgtcccttaatcggctgtttgtcaaggcccctgtggtgccg

SEQ ID NO: 27294 - DNA, 1678 bp, Artificial sequence
  DNA replication origin
ggaccaggtcggggccgggttccgggtcggggagcggctccgggcggcagctatgaggcgggacgtgcgcatcctgttactgggcgagggtaggcgccggcccgggggtctcggagctgcggcggccgtgaggcggggtgagggtctcgggggtcggggggcgccgtgaccttggccctcgcgctgaccgcctcgccccgcgcagcccaggtggggaagacgtcgctgatcctgtccctggtgggcgaggagttccccgaggaggtaaggggcacgcccgccgcgggggtgggagcgggcccagccgggggtccctggtgagcgcgcgggtcccttgcaggtccctccccgcgcggaggagatcaccatccccgcggacgtcaccccggagaaggtgcccacccacatcgtggactactcaggtagcggccgtagcctcccgggggcccggcccgcagcggtccggcgggcctgctgggtccgcagtggagtctctttgtccccctagaagccgagcagacggacgaggagctgcgggaggagatccacaaggtacccgtggtgcgcgggacgagggaggggctgggcgcgggctcggcctaatccgcttcgcagcctgggggattggaccgaggtgctccgggtgtccttggccctgataattctgtgacctccgcactgagggttgtcggggcccctacagcgcaccccgctgggagccggcaccgctcagtccagtggtgctccagggataacaggacccttccccgcgggctctccctccctcctgccggggtggcagcagcgtttgctcttcctgtgggctctgtgtgcgccacgtccccgtgctgtgtgctccagcccaccgtcccggcctccgggcacccggagctcccagtaccagagcacgtgtgccggggacatctccaggcaagggcacaggccacagccacccagggcagcccctgctgttggcacccctcactgcggtcctgtcactctgtctgtagcgaggggggaggcaggggccaaggcggcggctgtcttgcagggtgttgggttgcaggtgtggccgtgtctgtcctgagccctctgctccaagggtcttgctgaccacagttatgcttctggggcctggtgtccctgcactggcagtgggcggggaagaggcttctctgagggttcagcagcagctcccagtgtgacactggggagtgcctgctctgccaacaccaggctggaggcaggttttagggaaggctgggctttcccggcctcagagctgcacccatgctacctgtgagcttctggggcctcctggagcctcgagatggcgtggaacggccagggtcgtcggtggtgagccagcagccctgtcacccacacctcatcactgttccctcaggcaaacgtggtgtgtgtggtgtatgacgtctctgaggaggccaccattgagaaggtgagccctcagtgcagaccccaacagcagagacacagtggccggtggtggcccaggtggaccttcacccaacccgtggccagtgccatcgctcacagcattttggggagcctgacgtggagttgcctgacgtggagtcacccggccctctcctgtgatcccacttcccctgagagggtctggggcgtcccgcagtctgagccattgaggccggcagtc

SEQ ID NO: 27295 - DNA, 1150 bp, Artificial sequence
  DNA replication origin
agcaccaggcacagccccctccccacactccccaggcacaggcgggcacccggcctcaccatccagggtcagccggtcctcccgcacgccgcccgccacgttcctgcacaccaccgtcttcacgtcctccagggcctgcggggccagggggtgcccaaagcaggatttctgcttccgagagaacgttgttgggagtcagccagccacccggagacgacccgttccagtcactaacggcagcggaggttcaagggggctgggcaccgagggtggggcaggggcacacctggaaagcgttgagctcttcgtcactgagcgcctggtccaggtcctgatctgagagcctgaagatgcgcgtcagcgcctgggcgcacgcgggcctcaactgtggggatgttggctcagcaccctcaggtgacccacgccgacctgccacaccgccccacccagcaccccctgggcccctggggaaccagcgtgcggggccccagccgatgctcacctgcttggcctcagggtcatagaggggggctgtgggatgcaggacggccttctgggcgtagtagaacagctctgagatgttcctcaggttcttggccgaacactgggaaagtgggaacagcctcagggaagtgccccgaggagggcaccgactgagaacacaaggaatgaaggaggcggccctgcctgggacctactcacctccacgcaggtctcaatctcgggaaactggctcatgatggggagcacggcctccatggagctccccgaccgcaggtctgacttgttgcccactaggatgatgggcaccctgggttgaaggcccatggtcaccaggggcaggggagccaggggtcccagccccttccacatcccctcattacctgggcccctgcgtggtccccccattcaccagtgggatccacttagttcgaatctgaaaagcaaagcctggctgtgaagtgaggctgcccgcgggcacatggctcccagctggagcatgagcctggctgggggagagcagaagggggaggtcaaggcccactgagggcccaagtcccggccacaggaacaaagctggtgggagaaggcaggcagcaggtgcagcctcatctgtctgaccccaatggctcccaaacacccccaagtc

SEQ ID NO: 27296 - DNA, 1261 bp, Artificial sequence
  DNA replication origin
gaacacactgaaaaggctttgcagctccacgggcgagagggcgccgtcgcggtcctgcagaaggagggatgtggtgatgtgtgtgccggggagggggcgggggcaggggcaggggactcgccatgctctcacctggtcgtgcttctcaaacactctctgcacaaactggtagccaaggtggttgagctccgtgctgcagccggggggcacgtggatcctgcagggaggccacagcccgtctagctcccaggagactctgcagcaccacgctcagcccatctgtcaccctgccagccccatcggtgcagccggaccctccctacaggacccagaggctcctgtacgcccccgaccttgcagctgcgataggggaggagggtgcccacctggctccagcacgtgggaggcctggctgaggcccacaggccacaccccaagctgccgaccccagcagggtaaacaagccacgcgagcggggttggcaaagggccagcccccccaccccccgactcagagctctgtggatgctgaggggttcagggcacagccaggcaagggcacgaccccagatggcctgctgagcgagaccttcactgaccctcagggagggcaggcctcaaaccccagcgtcactcatggaggggagagatagtcggcagtcagctcctgaccctcggggagggcaggcctcaagccccggcatcactcacagaggggagagatagtccgcagtcagctccagggcatcgctgtagccgaagcgccgcaggatggtccaggtggtctcgtgccggccgcgctggatgaagagcgtgttcaggaagaggaaacctgcaccgagacaaagcagggggagcaccaggcacagccccctccccacactccccaggcacaggcgggcacccggcctcaccatccagggtcagccggtcctcccgcacgccgcccgccacgttcctgcacaccaccgtcttcacgtcctccagggcctgcggggccagggggtgcccaaagcaggatttctgcttccgagagaacgttgttgggagtcagccagccacccggagacgacccgttccagtcactaacggcagcggaggttcaagggggctgggcaccgagggtggggcaggggcacacctggaaagcgttgagctcttcgtcactgagcgcctggtccaggtcctgatctgagagcctgaagatgcgcgtcagcgcctgggcgcacgcgggcctcaactgtggggatgttggctcagca

SEQ ID NO: 27297 - DNA, 1355 bp, Artificial sequence
  DNA replication origin
ggacagaccctgccccatggccacgtggcccctgcagggccccaccttgtagacgctggcacaatgtgcaaaggactttgggtcactgccatcaaacatcaagcaggcaacgtcacaggtggcgtccagcgatgtggccagcagaccatctgtgcccacctcacagagctgggacagacagcggccttaggaagggtccctggggctcggtccccctagggccatgctgggccagatctgccaggcaggcctgggtgtccccgggtccaccctcgggcacaggccgcgccgccccagcactcacgatcaagtacttctcctgtccattgacctgcaccgtgtcgatggcgtagccgggaggctgctccctcgtgtcctggtgctgagggaggtgaagtcctgacactcgctggctgcagtgccccccagattgccctgccctgcccctggagcccctggggtggtgggggagtctagggtgcttacccccaggccgcggccgagaaaggcctgcaggaaggcagacttgcccactccacgggcccctaccaccttgcacaggaggacgctccgctgcgtctgtcccttctcctggtccagcctcttctcacgagtgactgtgaggatagacacgggttagggcagctgccaggatactgggcccaggcccagggagggtgggtgcctacctgtgatggcatgggcctggtcctgctcacagagggtggggtagcccaggtagcctaggtgtccaaggcagctccggacgtccaggtaggtcaccaggctgggggtgggcgggaggcaggcacagtgttatggtggggagggtggtgcggcaggcgggcatggtgtgggccgcacttacgtccactggcagaggtatccgtgcaggggcaaccggccggcctctgtgcggactgtgcgtgggagctcggggccccagggcgctgctgggaacacactgaaaaggctttgcagctccacgggcgagagggcgccgtcgcggtcctgcagaaggagggatgtggtgatgtgtgtgccggggagggggcgggggcaggggcaggggactcgccatgctctcacctggtcgtgcttctcaaacactctctgcacaaactggtagccaaggtggttgagctccgtgctgcagccggggggcacgtggatcctgcagggaggccacagcccgtctagctcccaggagactctgcagcaccacgctcagcccatctgtcaccctgccagccccatcggtgcagccggaccctccctacaggacccagaggctcctgtacgcccccgaccttgcagctgcgataggggaggagggtgcccacctggctccagca

SEQ ID NO: 27298 - DNA, 1435 bp, Artificial sequence
  DNA replication origin
tccgagatagaaaacacacagtgaagtttaatcaggaacccaacctccggtcctctgctacaaccacggaaacggctccaaacttgaggggggaccccccaacgcctgcttttggcccaaagctctgccttccagccctcctcatacccactggccacctaggaccaggaaaggggggtagagccctgagaattctgggtctggggtcaccagctcccacacctgtgctccccggccccacacacatgatgcccaggggtgggcaatccctgacagcggtggccggcacttgggagctcctgctcagccacctgccacggcccaccctgggggtccggcaggagccagggcagtgcatggcagcataaggccccgctgcagatcgactgccttcagaaacaaaaagtcccggcgcaaaggcgttcccggagtggcagcctggcctgcaccccagctgtgctgcccctgcagagccccagcagcgaggcacacccaggtcaggggagggggcttgggtaccaggggcctcactggctcttcaccaggaccctgtagagtgagaagctgaggactgcggccacggcggccccgacaacccccagcagcccccggagccagaaggaagagggatgcagctctgcgtggaccaaatgtctgcaagagagaagaatcatctgcagatacctcaggcacatgcccccagcttgctgctgggcaccctcccatgtcctggactcacagggccccacaggcggggatcccagaccagaggcacagccggtggaggccaggccctggagggacatgcctgggcactgcctccctctgccacacaaagctccaccccgccactctggccccagttccaggcctgacgccactgctgcccactgctcggatgacagacactgctagtccccagttccaggcctgacaccaccgctgcccactgctcggatgacagacactgctagtccccagggctgcgctactgggtacccacgggaaggcggccatggtggcgagctgggtgaagatggtggtgctgggctcggctgggccagcacaggagaacggcacgggagcgggtagccggtgcttgcggcaaaactcggccggtgatgggccagacaccgcgacaccttcgggcaggtcggccttggaggagacaaagaggcagggggtctgcccgtccatgtaatggtgctgtgggcagagagtggtatgaggtacagtcctggggtggccgaggcacagctggagggacagaccctgccccatggccacgtggcccctgcagggccccaccttgtagacgctggcacaatgtgcaaaggactttgggtcactgccatcaaacatcaagcaggcaacgtcacaggtggcgtccagcgatgtggccagcagaccatctgtgcccacctcacagagctgg

SEQ ID NO: 27299 - DNA, 2190 bp, Artificial sequence
  DNA replication origin
cccgcctgtggggccctgtgagtccaggacatgggagggtgcccagcagcaagctgggggcatgtgcctgaggtatctgcagatgattcttctctcttgcagacatttggtccacgcagagctgcatccctcttccttctggctccgggggctgctgggggttgtcggggccgccgtggccgcagtcctcagcttctcactctacagggtcctggtgaagagccagtgaggcccctggtacccaagccccctcccctgacctgggtgtgcctcgctgctggggctctgcaggggcagcacagctggggtgcaggccaggctgccactccgggaacgcctttgcgccgggactttttgtttctgaaggcagtcgatctgcagcggggccttatgctgccatgcactgccctggctcctgccggacccccagggtgggccgtggcaggtggctgagcaggagctcccaagtgccggccaccgctgtcagggattgcccacccctgggcatcatgtgtgtggggccggggagcacaggtgtgggagctggtgaccccagacccagaattctcagggctctacccccctttcctggtcctaggtggccagtgggtatgaggagggctggaaggcagagctttgggccaaaagcaggcgttggggggtcccccctcaagtttggagccgtttccgtggttgtagcagaggaccggaggttgggttcctgattaaacttcactgtgtgttttctatctcggatcccagtctctgaagacaacttgctttgattcaacctagaatgtgttgtttgtctttatgtgggctggaaacgccacccctcctttcattcctgggtcactgttctgaggtctcaggcgtgtgcatatggcctctggaaggtccactctgggctgctgtggcctgggagcccagtgtccttggaggtcctgcggtctgggagtgggagcccactgcgggaggacggtgcgcgcccggcatggactggggggcgccggtgcctgagatgtttccccggtgactgaccccttctcagggtccagtgtgccctggcactgcccactcactccccagagcgtcctgccagcctggctgagctgcgccgagaacctgggcttgtgtgaccagatgtggtcactgcctgccacagaacggggtgaccctggggccctgacctgagggaagcaggatgggccagagggagggacgggctgggagttgagcccagatgcctgcttctcgggacccagggcgtggccttcccaaggtcacccggacaagtatcagaaggcctggtcccccccctcccatgtctgcctttagggagtggcaggtggggccccttcccaagtcctggcccacacgggccctgccttggagcttgtggcattggcccctgaggtccctcccgactgatggtatttgagcccgctgtacccccacggcctgtcttctgggactactgcaaccctaggagaagccctctgagtggcccttgcaggggctgccatagtcacacgtgtcttatctgtcacctccattgtggaggggttggcccgccttcccaggagcaggtcccctcatcccaactgcagccctgccccctgggggttctgctctgtgttggaatgccccttgtgcccagccctggcgccgccttagggcgggaggttttgctgtcctgcatggagttgcaagagtggtcaggggcctccagcccagggtgtggacgagtgggctgggcttggtcgtcagagccaaggcggctgcagcagcgtcttcctcctcctaagaggcggctgtagtggccatgcgggacgagggacttccttgctgctgcgctcggtggggggttgcggggggagggggtgtgtctgctgcaagcagggagctccagccggtggcaacatgaaccgcagggagtactgggtcagcctggagggggagcaagcagtggtcagggaaggcttcctggaagaggtggcatcctcacaggcctgagcccgggaaggctgtgagagggcgaacggtcttgcatggggggttttaggtgccccccatccccgtgactccatttaccagcggctgccgtggaggtagtccagtgtgctggagctgcgccagagcgggggtgggggccggcgctgagacgcggtgctagctggaggcggttcc

SEQ ID NO: 27300 - DNA, 1813 bp, Artificial sequence
  DNA replication origin
tgcagggtgcgcgcgtgtcttggccgcgcgtggcggcgtgtgcggcaggggcgggcaggcgggcgactcggtgacgcggcccaagcgcggcgccgagcggagcgggcggagcgggccggctggggcggagcggagtcgtccgcagagcagcccctcccggccgcggccgccgaccccggaccccggcccccggccaggctctatggacaggagctcgctgctgcagctcatccaggagcaggtgcgtcggggggtggtctggggagctggcaccgcccccaatgcggccctcctgccgctgagctgagcttgtgcgggaccgagctccccgaaagccccgctcggtacctacctcatccctccacgaccttggtccgtgtgtctgggaccccaggagaggactgactggaccagagctcctggctggagaagggagagtcggggggagggagggagggagggagggagggcgggcagctggctggtcttggaccttggccctcgctttccaggatgggtagggtggaagacgggggaacaactgaggagctggaggactgggacccaggcaccagtgccctgccagctcctgggatcaagcagggtcccagggaacagacaggcacggggcccctgtcccaaaagtgctgggagcctgagcctgatgctcccagccagcctggcccagccctttggtccaggggtcgggcccgcactcaggccttggctggcggctcctcactgcagcagctggaccccgagaacacaggcttcatcggtgcggacaccttcactggcctggtgcacagccatgagctgcccctggacccggccaagctggacatgctggtggccctggctcagagcaacgagcagggccaggtctgctaccaggagctggtggacctggtcagtgccacggtgggcaggcggcaggggcacggtgtcctggccagaggaggcgggcaggcagctcctcacggcggtgggtggggggcttgtggatgcggggagctgggtgagcctcacaggcaggggtgccatggggaggtccgtggcccacactcaggcccctgcccccagatcagcagcaagcgctccagcagtttcaagcgggccattgctaacggacagcgggcactgccccgggacgggccgctggatgagccaggcctaggtgtctacaagcggtttgtgcgttacgtggcctacgagatcctgccttgtgaggtggaccgccgctggtacttctaccgtcaccgcagctgcccaccccccgtgttcatggcctcggtcactcttgcccaggtgggccccccggccgctgccccgggagcctcccgcgctcctggccatgaccagcctaacactcgtgtccccagatcatcgtgttcctgtgttacggggcccgcctcaacaagtgggtgctgcagacctaccaccccgagtacatgaagagcccccttgtgtaccaccccgggcaccgtgcccgcgcctggcgcttcctcacctacatgttcatgcacgttgggtgagtagcactgctgcccggtgagccccgccccaacctgccattacatcagaaaggcttagccgcaaggcaggtgcggcaacttgaggtgacggctgggggtggggccggatggctgaccccacccttcgtacccgtttgcttccctgtggccaggctggagcagctggggttcaacgccctcctgcagctgatgatcggggtgcccctggagatggtgcacggcctgctccgcatcagcctgctctacctggcaggcgtgctggcaggtgaggcaggcgc

SEQ ID NO: 27301 - DNA, 2070 bp, Artificial sequence
  DNA replication origin
tacaagttgctgaggatggtgctggccttggtgtgcagtgagtaggggccggggggagggccggggggcctctcagcctgcagccagggcacctcccacctgccgcgtccctctgcagtgagctccgaggtgggccgggccgtgtggctgcgcttctccccgccgctgcccgcctcgggcccacagcccagcttcatggcgcacctggcaggcgcggtggtgggggtgagcatgggcctgaccatcctgcggagctacgaggagcgcctgcgggaccagtgcggctggtgggtggtgctgctggcctacggcaccttcctgctcttcgccgtcttctggaacgtcttcgcctacgacctgctgggcgcccacatccccccaccgccctgaccggctacctgaggctgcacaggccagggctcgggcatgtggtggccgcccaccaggggccttcacgtctgccctttgtgaacggacgtctcagggctgctgtgccccttgggtgtgggtggcctcaaaggaggccctgtcccagccacccaccccccactcccaggacttgcggtctgagcctttttggataattaataaatattttacacagcaccagggggctgtcccgggctctggagactcgtcagggcccccacacctgctgcacagaccgcgacggccctccccaccacgggggcctggacttccctccttgtgcatctctgcacctggggtcaggcgtgggagttgttcctgggccacaggtgctgtgtctgtgggagctgggggcacgcgggatggctgggggccgggcgtgtggtcaggccaggtgtgtggtcaggccgggtgtgtgatcaggcgtgagtttgggaagtgtttattgagctcccgtagtggccagcctcctcttcagcctccctgccgtccagtgagacccggaggcctgaggttctgtggcaggtgagcaggcctgggccatggccaagtttactcggcctgggttccatgcttcttggctggcctagcatcctcgtgggtggccaggctggggccaaggttgggcagcaggtctgggcacagcctctgccccacagcccaggtccacagtgctgtctccactaggtagggagtccactgtcctgaggcactggctagggaggggcacacggactcaggcccaggggcacgggccaccccaacctgcccacacacagttcattccccttggctcagagctgtggcccgctcttgaacctggcccaggtacagcaggtagtacctgagggtgtactgtggggccggccagccgggcactgtggccaccgcctcatctgacatgaaggcctccatctctggagctccagctgccaggactgctgtgaacagcgaggagaagcagccagacacaccccatcaggacaagctctgggagaccctgctcccagcagcccagggccctatggttcctgctcctagcgacacgcaagggcccagactgcccgcttcacagacaagaacgcctatgtacccaagtcgtgcccacccaactcacccgaggctgtggtgggcccacaccgcagagggcacacagctcggtgactgcagcccccacatctggcaggaggcagaaggtggcggtcgaacagtgcacaaccagctcagggggattggtggccaccagctgctgcagacgtggccggaagcgcccctctgtgggaggccaggtcagggtgcctggggtgctggacccaccagggaggccccgcccccactggagacacccgccccgccgatgccacgccccaatgaagacccgcgctacggaggccctgccctcggggcgggccgcccttcacagtcaagctgccaggccagcagccgctccagctccctgtcacatgcttctctgctctgcccctgatggccgctggcaactcttcccgatacctgaggaagggcggtgaggggaggactggccacggaggacgctcgccccaccgatctctatccccttccactctaccaacagtccggggcttccagccgccctcgggggctcgcgctcgcccgtagcac

SEQ ID NO: 27302 - DNA, 3610 bp, Artificial sequence
  DNA replication origin
cgcacgcgcggccccactcgcccccacgcgtgcgtccccgctggtcccgcccccggccggaagttccggcggcggagctgggccgggcccgagcggatcgcgggctcgggctgcggggctccggctgcgggcgctgggccgcgaggcgcggagcttgggagcggagcccaggccgtgccgcgcggcgccatgaagggcaaggaggagaaggagggcggcgcacggctgggcgctggcggcggaagccccgagaagagcccgagcgcgcaggagctcaaggagcagggcaatcgtctgttcgtgggccgaaagtacccggaggcggcggcctgctacggccgcgcgatcgtgagtgcgcccgcgcggggagggcggcggcggtggcaccggggagggccgggcccgggcccggccggccccaccgagggtctggctcctcttcggggcgtgtcctcggctcccaaagcccagccgtggttctcgagcccagcgccgggtgccggagaacgagggtgcgatgctggatggaggccggccgggtggggggagggcaggggccctcgacccttgaggaccccaggtcctaagcccggactctccaaagatttggaaaactttacaaaaccaagtggaatcaagcggataggctcagccagtactccactgtgcacagatccttggacccaggggctttgacaactgagaaacctagtttcttgattctagccagagcgcagaagctgggacgggccgtgggtcagagtgggcacgctgagcctacgccctcatgcggctggcccggccttggtccctagacccggaacccgctggtggccgtgtattacaccaaccgggccttgtgctacctgaagatgcagcagcacgagcaggccctggccgactgccggcgcgccctggagctggacgggcagtctgtgaaggcgcacttcttcctggggcagtgccagctggagatggagagctatgatgaggccatcgccaatctgcagcgaggttggctgacaagctgcccggttgtggggcctctggggccaggcgggtggactggccagagagtgacgtgaagcccccgttccccagcttacagcctggccaaggagcagcggctgaacttcggggacgacatccccagcgctcttcgaatcgcgaagaagaagcgctggaacagcattgaggagcggcgcatccaccaggagagcgagctgcactcctacctctccaggctcattgccgcggagcgtgagaggtgggaccctcaccccaggccgccctgtcttgggataattctgaatcaccgactcccgacacaagcgtttatcgaaggctttactggcaagcaggaaatgtggggaagtgtggatgttagctctgagattggggtgtggtcagacatctggccaggtccatctctgaccggctcctggtcaacccccagggagctggaagagtgccagcgaaaccacgagggtgatgaggacgacagccacgtccgggcccagcaggcctgcattgaggccaagcacgtgagggtgccccccacccacatgtgggtctgtgtgtgtgcacgtggcgtgggagcatccccgccttgtgttgggtctgtgccccatggaggagggaggtggggtgtctcccccaagcacagcactcaactcttcacaggacaagtacatggcggacatggacgagcttttttctcaggtggatgagaagaggaaggtgagtgtgtgtcgcttgctgccgatggctggcaggtgctcgtgcagtgccccttttcagcctctgaccgtgtgcccctgtgccacagaagcgagacatccccgactacctgtgtggcaagatcagctttgagctgatgcgggagccgtgcatcacgcccagtggcatcacctacgaccgcaaggacatcgaggagcacctgcaggtgaggcctgcggctgggggagcagggccagtggcatggtcctgggccccatgactgccctctgcccttcttgtcactgcagcgtgtgggtcattttgaccccgtgacccggagccccctgacccaggaacagctcatccccaacttggctatgaaggaggttattgacgcattcatctctgagaatggctgggtggaggactactgaggttccctgccctacctggcgtcctggtccaggggagccctgggcagaagcccccggcccctatacatagtttatgttcctggccaccccgaccgcttcccccaagttctgctgttggactctggactgtttcccctctcagcatcgcttttgctgggccgtgatcgtccccctttgtgggctggaaaagcaggtgagggtgggctgggctgaggccattgccgccactatctgtgtaataaaatccgtgagcacgaggtgggacgtgctggtgtgtgaccggcagtcctgccagctgttttggctagccgaggaaggtggagatgaagacgctggtgtcaaggttgagcgtagcatgccaccagcggtcggggaagtacagcacctggtggaggaagggggtgcagcagagattagctgcgggcctctagcctggcctggccctctcctgccagccactgacctcaccagcccggatggtacactccaggggccgtgcagacggtggcagggctgggtatgtgtcccggagccaggccagcgtggtcttgttggggtggaactctggcgtcttctcaggtgggtaaaggaaccagcgctgggggcatgagcagcagtgtcacccttgcccgttttggtcagcgagtcccaagcctcaacccccaccccgtgctgaccttacgaccgtagatcacttctgagtacccgggtccatgccagtggaagggcacccccgagccagctcctgtggggttatgagcacctggtgaccaacccattttgtactcaccgacagaagcctcagtccttcccagtcccaagaagcacccacctgcgattccaaagctgtaagctggagcggttcccagcaggccaaatgggggtggggagtagtgccgaaagagagaggcccactcggtgaagttgttgtccccgaagaagtacagggtgtctgccaacagagacggcggggacagggatcctggcacctggagactccaagcgtccccaccccctaccgccgcctagggctgcctcaccattgcccagggaggtggggtcctgggggtgcagcagctgctccacatactcctggaagggcaagtccactgcaggaaagagacgggtcaggaccgtctggtccagccgccccggtgttggcaaatgggcgggccccaggggtgaggccgcgtacctttgtggtaggagtaggtgttggcggtgctcagccggaccactctgtccccaaacgaagccagcaacctgtcgcgggagcacagggcccggaacctctgcgggggcggggaggggacttagtggccgggcccagcacgggcgagagtggccggggacggacgggcacgcgctcaccgagttgtccgtgagtccctgcaggatgacgggcctgacgaaggcgtacctggaaagaagggcagagtcgcggccaggccggaccg

SEQ ID NO: 27303 - DNA, 2270 bp, Artificial sequence
  DNA replication origin
tggcggccagagtgccgccaccacctggccacgtgctccatgatggtggaccacaacatctatgtttgggacgtgcgccggcccttcgtgccagctgccatgtttgaggaacaccgagacgtcaccacgggaattgcctggcgccacccccacgacccctccttcctgctgtctggctccaaggacagctcgctgtgccagcacctgttccgcgacgccagccagcccgtcgagcgcgccaaccctgagggcctctgctacggcctcttcggggacctggccttcgccgccaaggagagcctcgtggctgccgagtcggggcgcaagccctacactggcgaccggcgccaccccatcttctttaagcgcaagctggaccctgccgagcccttcgcaggcctcgcctccagtgccctcagtgtctttgagacggagccaggtggcggcggcatgcgctggtttgtggacacagctgagcgttatgcgctggctggccggccactggccgagctctgtgaccacaacgcaaaggtggctcgagagcttggccgcaaccaggtaggtaggtgctgagcctgggggtccctgggccacgacctcagggcaggggctggttcctccgtcagctgcgctcaccccacctcaagctccgcaatggactccagccagtcgcaccaacaggccttgccttggtagctgagggtgtcaggatcacacagggccagggctccagggtgggccagacccaggactgtcctctgaggggcgggggtctcgggagtcgtgtggctcaagctctctgttcttccccccttgcttctggagctctccaggcaccagcagcggtggagccgtgagctgccgttcccatgcccatctctagctgccccgcaagtccccactgcccaattctgttttcctctgtgctgctgtagggcggggaccggggtttttgtctttcccatgagcctcagctttcctacctggggtgggcctggacattgggtactgagggcagctgaatgctgagggcttgtgactgtccaggcagagagggacctgcatggggtgctgggtgtccaggacgcccacaagtgaccagtgcccgcccctaggtggcgcaaacgtggaccatgctgcggatcatctactgcagccctggcctagtgcccactgcaaacctcaaccacagtgtgggcaagggtggctcctgtggcctcccgctcatgaacaggtagatgccgggggcagctctccccaggggctggggctgctcgagcccacccacccatgggcccttcctgcccccagtttcaacctgaaggatatggccccagggttgggcagtgagacgcggctggaccgcagcaaaggagatgcacggagcgacacagttctgctcgactcctcggccacactcatcaccaatgagggtaggctggggtgggtaggggtgctgatgggagaggggtgggggtgtcccagacgaccctgaatgcccgccccattgtcgggcagataacgaggaaaccgagggcagcgacgtacctgccgactacctgctgggtgacgtggaaggtgaggaggacgagctgtacctgctggatccggaacacgcgcaccgtgagtgggggtccgggcagggtggggttcagaggcggatggaggacagactcagagcctccgctggtccctgccttccagccgaggaccctgagtgcgtgctgccgcaggaggcctttccgctgcgccacgagatcgtggacacgcctcccgggcccgagcacctgcaggacaaggccgactccccgcacgtgagcggcagcgaggcggatgtggcctccctggcccccgtggactcctccttctcgctcctgtctgtctcacacgcgctctacgacagccgcctgccgcccgacttcttcggcgtgctggtgcgcgacatgctgcacttctacgctgagcagggcgacgtgcagatggctgtgtctgtgctcatcgtcctgggtgaacgggtgcgcaaggacatcgacgagcagacccaggtgtgtggtgggcggggcctcccccctgcagcgccgcccctggcacccagatcctgactgccgggcgctccctcccccaggagcactggtacacttcctacatcgacctgctgcagcgcttccgcctctggaacgtgtccaacgaggtggtcaagctgagcaccagccgcgccgtcagctgcctcaaccaggcctccaccaccctgcacgtcaactgcagccact

SEQ ID NO: 27304 - DNA, 1519 bp, Artificial sequence
  DNA replication origin
agagaattttcaggccacttaagacagatcctggcagggcgcggtggctcatgcctgtaatcccagcactttgggaggccgaggcaggccgatcacgaggtcaggagattgagaccctcctggctaacacagggaaaccccatatccactaaaaatacaaaacaaaaaattagctgggcgcagtggcacgcgcctgtaatcctagctacttgggaggttggggcaggagaattgcttgaacccgggaggtggaggttgcagtgagcccagatcgtgccacttgcactccagcctgggtgacagagggagactccgtctaaaaagacagatcctgagctgcctcccctgcagggccctggaggaaggttgggtaccgcccttgaagtttcttggtgtggtggtcccctagggtggacctgggccctgagtcatccagtcctttggggctgaccaggcagttccagctccaggtgaagggactgggccaaggctggggcaccctcctcagcacctccttgggcctcccacagggccacgggagtgggcgatggctgggtgcgttcctattctcccagtgctcagctgccgcatcctgaggctgcaccacagctttgctcatggaccgatgcaggatgcagaatctacggcaaatgacgcccgggagtatgtgttacaaatcacgtggtgtcctgctcccgggcccaggctcttgtggcgactctgtgtggctgcttccttgggcagatcttggggatgtccactctaccctctgggcctctgttctgggccacaggcaggtgtgtgacaccatgccacagctgttctgagggcgcacctcatgggccagccccgtcacttcccctgcatcgacctcctgcctgcaggccagtcggagagcgtgcgggacgtgcagttcagtatccgggactacttcaccttcgcctccacctttgagaacggcaatgtgcagctctgggacatccggcgtcccgaccggtgcgagaggatgttcacagcccacaacggacccgtcttctgctgcgactggcaccccgaggacaggtgtggcatgggggtgcaggggcagtaggttgacagtaagctctcactgcctcagatccatgagacagtccggagcagcagagcgggggggtcccctctctgcaggaaaggccactgagggtttgggtggaccttcttcccacaggggctggttggccactggagggcgcgacaagatggtgaaggtctgggacatgaccacgcaccgtgccaaggagatgcactgtgtgcagaccatcgcctcggtggcccgtgtgaagtggcggccagagtgccgccaccacctggccacgtgctccatgatggtggaccacaacatctatgtttgggacgtgcgccggcccttcgtgccagctgccatgtttgaggaacaccgagacgtcaccacgggaattgcctggcgccacccccacgacccctccttcctgctgtctggctccaaggacagctcgctgtg

SEQ ID NO: 27305 - DNA, 966 bp, Artificial sequence
  DNA replication origin
ctgacaggccgcaccatgcactgccacctggatgctcccgccaatgccatcagtgtgtgccgcgacgcagcccaggtggtcgtggcaggccgtagcatcttcaagatctatgccatcgaggaggaacagttcgtggaaaagctgaacctgcgtgtggggcgcaagccttcgcttaacctgagctgtgctgacgtggtctggcaccagatggatgagaacctgctggccacagcagccaccaatggcgtggtggtcacgtggaacctgggccggccatcccgcaacaagcaggaccagctgttcacagaacacaagcgcacggtaaacaaagtctgcttccaccccaccgaagcccacgtgctgctcagtggctcccaggatggcttcatgaagtgctttgacctccgcagaaaggactctgtcagcaccttctcgggtgaggccacagaggcaggtcagggcaggtgggcgtctctgccggtgcccagcctgtccatgcaggcggaaaagggctccgtgcatcagaggccctcaggatcactcccagagggcttcctcagggggaaagggaatcggcaggggagggatggggcaagttgggctggacggcatgtgagccagggcagtcaagtgggaagaggcaagagatgagaccagcagaaattgaggctaggtgtggggtgagggagggcagagccccagcggtctcccagccagcctgggtggtgagcagagagccactgactcccttccctcatgtcggagctacagaggctgcctcatagcaggaggtctgccaggacttccaggtttcctggcccagggaggcagaggaggtgggtttgctgtccagtgccctggggcccttttcctaacaggcccagctccccgatggctgccctgagccagctctcccttgttcacctggaggagactaggtatgaagcacaaggcggagccctcagg

SEQ ID NO: 27306 - DNA, 1086 bp, Artificial sequence
  DNA replication origin
aatcgcttgaacctagggggtggaggttgctatgagccgagactgcgccacctcactccaacctgggcgaaagagcaaaactccgtctcaaaaaattttaaagagaccgggtgcggtggctcacacctgtaatcctagcactttgggaggccaaggcgagtggatcacctgaggttgggagttcgagaccagcctgaccaacatggaaaaactccatctctactaaaaatacaaaattagcccagtatggtggcccatgcctgtaatcccagctactcgggaagctgaggcaggagaatcgcttgaacccaggaggcggaggttgcggtgagccaagattgcaccattgcactccagcctgggcaacaagagcgaaactccgtctcaaaaagttttttaaaaaaaagaacgagagcaactggttgaacaggtgtgtcaggcactgggcattcggtggggattgagccagaatgtgattcctgccttggtggaattcacactcgtatgtgaccgacaacaaccagtaaacaaacgaatgggtggtgacaagtgccgtggaggccacagtgatggagaagcccattagggcagtggtcagggaggtccgctctgtggaggaggcatcgcacgcacgtacaatgtccctgaggcaggaaagggcttggtgggctgggaatgggggtggaggctgccatggctggaggtgggcaggggaaggcggaggccaggagttggggttcattcacagcatagtgggagctgccagaggcctcaggcagaagacctggtgcctgacttctgtgcgggtttctgatcaaaggggaaagacggacccaggaaagccgttgggaggctgctcccgaggtcgaggagtgaggaaggaggggaagactgggggcactcggaacttgtctagggatgaccagatgtcatgatggacctggggattaaaataggtgatggcattaaaatactgaaattgagacttaaaaaacaggccaggcgcggtggctcacacctgcattcccagcacttcaggaggctgacgccagaggatcgcttgagttcagtagttttaagaccagc

SEQ ID NO: 27307 - DNA, 1458 bp, Artificial sequence
  DNA replication origin
tttttaatatatatttttataaacaggtcacgtgataaaatagcacaagaaacacttaccaaatataaggttatatcttccgcatatacaggagaatgaggtcgttatgtacaataagaaaatgattttaggggttggttggttttgttttcctctctccccttaatttttcctcctacagtcgttggaaatatcacagcttcagttgcattaatactttgggcaaatggacagctgcccctccccactaggggttgtggggaggaggggctggagaaactggctcctgaccactcagccctggagcttcctggggctggcactccagggacaggaaaatctttgggctgttgatctgtttctgattcaacagcatctctctctctctttctctctctctctcactctctttctctctctcactctctggctctctggaaactggttactctcttccaaccagatagggagtgtcccaagattgggtgtgggcgcggtatctcctggggctcaaggttgggatgggaaggggtcccagccccctcctcagcaacagctgagatttgccagcatcccccaggacttccaaatgtctcgggccgacagagcacggtcagagcccatttgggcagacagaagtttgggaagctggggaggggtgaagtgggggtgggggggcaggctagaaaggagccctccctcctcggggtgtctagggtgtgctggccactggaagattggagtcgctgacccagtgctgaccctgacccttggctgggtccactctgcagactccacctgaggagacccacccagggtgaagctcggtgcccaggcctgaactgagcccggccgggtgcaagggctgaggtgtgaggtcggcccaggcctcttcccaggcctgagggtggctacagctcgaggcttgcaaggtgcctgcgccacccctgggttgaggccgaccggagtcagctgggatcacgttaatgactccaagcgatcgccagcccttccgccctctccctgcccaattctctcagcctggccagggaccaaggccgggttttggggcggacaggggactgccccacacagcggcaaggaggaggagaggccgcgtgggtcaggctggatgggtgaggaggtgcgggtggggcctgggctctcggcggcgggccatggctttggcggtggcctgtttcccctgacacccctcggagggctccaggtatggtgcggtggaagatgcaggaagcccgtggggctcttctgggcccgtgtcctgggggacccagccccctcaatcccactgggccctgcccgggatgggggggacagtgggaagacagagcgggtgtggcggggaaggcggtaagggcacagtctggagagctcaaagcccccccaaggaccgagccccgccccccaagcgggagggcgagcgagtgatggcggcgg

SEQ ID NO: 27308 - DNA, 1257 bp, Artificial sequence
  DNA replication origin
atctcgcagctgctgcccaacctggcggagctgagcctgcaggcctaccacgtgacggacacggcgctggcctacttcacggcgcgccagggccacagcacgcacacgctgcgcctgctctcctgctgggagatcaccaaccacggcgtggtcaacgtggtgcacagcctgcccaacctcaccgcgctcagcctctcgggctgctccaaggtcaccgacgacggcgtggagctcgtggccgagaacctgcgcaagctgcgcagccttgacctctcgtggtgcccacgcatcaccgacatggcgctggagtacgtggcctgcgacctgcaccgcctagaggagctcgtgctcgacaggtgcgcgcccccgggccgcgccgggcggggctgggccgggcggggctgcacggggcggggcggggcggggctgcacggggccgggggcgggggcttccggcggggctggggctgtggcgcggcgggcagagccctcggagcctggggagtgggaaccgcagaaccgcagcacgggttggctggacccccgtccttcccggtgggtgggagcgaggaggggccagcggctgctccgggtggggcaggaagggattcacgccaggggcactcccaggaagacgagggatggccggggccaggtgatttgaaggtgggggtcccctctggtgcaaccacaggtgtgtacgcatcacggacactggcctcagctatctgtccaccatgtcgtccctccgcagcctctacctgcgatggtgctgccaggtaccggctctcacgccccgggattgggggatcggcggggaggtgggggcgcggggagagctcccggccccactcagatcctgggagagtctggggcccctccctatccagcagccgacctaagcggaacgcaggggtcccggcggcccccacgagcacttcccagccgcctcccggctccgggggggacggaggaaccccgggcttgaacccgcctagccctccatggaccccagggtgccctccgcctcggtgcgagcggaaatcgttaagtcgctcctccactcccgacaggtgcaagacttcgggctgaagcacctcctggccctggggagtttgcgcctcctgtctctggcaggtgagacccccgtttctgctctgacgctggcagtgaccacccacccccacttagtccacccgcccaacctgcccggtccttgtgcaaactcacacccggcgcggacacacagtcccgggt

SEQ ID NO: 27309 - DNA, 1984 bp, Artificial sequence
  DNA replication origin
gcgtgagagccggtacctggcagcaccatcgcaggtagaggctgcggagggacgacatggtggacagatagctgaggccagtgtccgtgatgcgtacacacctgtggttgcaccagaggggacccccaccttcaaatcacctggccccggccatccctcgtcttcctgggagtgcccctggcgtgaatcccttcctgccccacccggagcagccgctggcccctcctcgctcccacccaccgggaaggacgggggtccagccaacccgtgctgcggttctgcggttcccactccccaggctccgagggctctgcccgccgcgccacagccccagccccgccggaagcccccgcccccggccccgtgcagccccgccccgccccgccccgtgcagccccgcccggcccagccccgcccggcgcggcccgggggcgcgcacctgtcgagcacgagctcctctaggcggtgcaggtcgcaggccacgtactccagcgccatgtcggtgatgcgtgggcaccacgagaggtcaaggctgcgcagcttgcgcaggttctcggccacgagctccacgccgtcgtcggtgaccttggagcagcccgagaggctgagcgcggtgaggttgggcaggctgtgcaccacgttgaccacgccgtggttggtgatctcccagcaggagagcaggcgcagcgtgtgcgtgctgtggccctggcgcgccgtgaagtaggccagcgccgtgtccgtcacgtggtaggcctgcaggctcagctccgccaggttgggcagcagctgcgagatggccgcgatggcgtcgtcggccacgttgatgcagtcactcacgctcagcgaggtgatgcgcgcgctcaggctggaccacagcccggcctcggtgaagtcgttgcagcccgacagctccagacgcaccacgccctgcatctgttcaagcataacctgcaggcgggcgggcgccgggtcaggattgcaggagaaggggtggagcccgcagggaggaagcagtagggtgtaaacatgcagggagctgaaccctgaaaacatttggcagtgtgtgaggaggcggggcatcgggacgagagcccagggcctggccagggcaggtgctgggggcgttggcaccagcgttacaattagactccagacccggctgccaggcggctcctctgacctctactcctgggggatcctttcccagctgcccctcagctccccctcgcatcctccccacactgcatttgtatttatttatttatttatttattcattcattcattcaatcattttgagacagagccttactctgttgcccaggtcccaggctggagtgcagtggcatgatctcagctcactgtaccccccgcctcccgggttcaagcgattctcctgcctcagtgtcctcccaagtagctgggactacaggtgcccaccaccaggcctggctaatttctgcatttttaatagaaatagagtttcaccatgttgaccaggctggtcatgaacgcctaacctcaagtgagtggcctgcctcggcctcccatagtgccgggatgacaggcttgagccaccgggcctgggccctgcatttaatccactgccctgctgctgccatcttgaaaatcttgagtgtctttgaacaagggacccacattttcgctttgcgcgaggtcccctgtagtcagtccttctttcctcccaccccaaagccaccatccgctcccacctccatagggttgctgctgcccgcccctgccccccagccctgtcccccccgagcctggtgcacacctcgaggcctgcgtccgtgatggtggagcgcttgaggctcatggctttgacacccttcttggagagcgcatagttgtcaatgaactcacagatgtccaggtcggagacgccaaccaggcagaagccctcgaagcctctggcggcaaaaccctgcaggttcacgaactccttctcgccaccaggcagc

SEQ ID NO: 27310 - DNA, 1837 bp, Artificial sequence
  DNA replication origin
ccgtgatggtggagcgcttgaggctcatggctttgacacccttcttggagagcgcatagttgtcaatgaactcacagatgtccaggtcggagacgccaaccaggcagaagccctcgaagcctctggcggcaaaaccctgcaggttcacgaactccttctcgccaccaggcagcacgttgtagagctccttggcatgcagcaccggcgtgaggcctgcccagaacttgggctggtacagcacgcgccgccaggccttgcacacctgggccagcacacacttctcgcaggccgagaaataccagaagagcccattgaggatcttctcgtccgtggccagcggcggccgctccgctgggtgcccaggtgccaaggctgaggctggtccacctgccggggtgcacgggcccccagccagggcagcccgggacagtggagcagccaggctgggtggtgggagggtgggtgggggtggtggctggcaggggcggttcttggtggctggcgtgcccttggtgatgctggccgcacccaggccgttgggctggcccggcagcttcaccagaccgtttcgaggcaagcatggaggcttggggtcgccgtcgatgcccgggctcgacatcttcctggcacgctctgtggatgagggccgggagggggagtgagtctgttgctgagtctggaaggccggggttgggggcgggtgcagtggggctccttccctccttgggcgtccctatggtgctcccagaaccaccagacagagaggatgggagtgcctgcttctccctcccagactgtgagcagcaacaggaagccaaccatggccactggcagcactcactgggcacctacggtatgcactgagcccaaccttcattgcccatggacaccctctttttcttttgttttttttctttttgaaacagagttccggccgggcgcggtggctcatgcctgtaatcccagcactttgggaggccgaggcgggtggatcatgaggtcaggagatcgagaccatcctggctaacacagtgaaacaccatctcttctaaaaatacaaaaaattagctgggcatggtggcaggcgcctgtagtaccagctacttgggaggctgcagcaggagaatgacgtgaacccgggaggcggagcttgcagtgagccgagattgcgccactgcactccagcctgggcaactgagcaagactctgtctcaaaaaaaaaaaaaagaaacagtttcactcttgttgcctggagcgcagactggagtgcagagacaggatcttggctccccgcaacctctctgcctcgtaggttcaagtgattctcctgcctcagcctcccgtgtagctgggaattcgggcgcccaccaccacacccggctaattttgtatttttagtagagatggggtttctccatgttggtcaggctggtctcaaactcctgacctcaagtgatccacccgcctcagcctcccaaagtcctgggattatgggaatgagccaccgtgcctgaccggaaacctttttgtttgcccagtgaggcgaagaaacgccgacactttttagcacttaggtaccatgatggccattttacagagaagaaaatggaggtggacctggtgaggccaggactgctctcttgacctctctgctgtgccgtccactgtaggtacccaccaggcccacccctctgggcaggccaggggaactgaagggaagggtctggggtggcctctggcccctcccctgcagggtgactgcacagcgctcaggaggggctctggtgctgactctgcagccaccctccacatgcacaggagcttccctggctcagaa

SEQ ID NO: 27311 - DNA, 2103 bp, Artificial sequence
  DNA replication origin
acgtgcaggcccatgactgggagcgttttcaacctaaatcggcactgcgccgggattattcctcccctggcgccgcccccgccgcctcctccggatccttcccggcttctcccccactcttcgcccccggggcccctccctgctgagcgggggctgccgggatttgggattgcggggctgccccgaccccgcagccgtccgcggtggaagccagcccgggcctggccctgagcgcgcggctggggcggccgctgtccatggtgctggcgcgggtggcgcgccggccggcggggtctgcggaggcccaggcgtccctggcggggaaggcggcgcttccgggtctggggagcgagggtccccgctctaggggcacggaggatatttagactggggcgcccgtgggcctggtgctgccgcctcgggcgccggcatcctgcgatatcccctctccccggctctgggagggaaccgaggcagccccgcgccaggcctccccggacacctggggcaaattcgctcctcagagcctcgtgttccttccccaaacctgaggtagcgacccctccacccctaagggcggccgtgaggtcgaatcatgtgccgaccccagccggcccttgcaaacgttgtgatgtcggcctccggaggccgcgccttctgatcatgggcacatgatgggggtcaccggctgtgggtgcctcctctgtggagggcccggcctcaccttccaggacccgaatgatactctggggagggggagatggtacagagggtggagctggggctcctgccattagggcaggaaggactttaaacccaaagctgggttctcagccacgagggccacgtgttctggcgagacccctggtcccggctccggtctacaccccctccccagatgtggaccggtggcaaggctggccctgtctggggcttggaagccagtgtggggacctgctgctgggaagagcggggcaggacctcccactgcctccctgcctccctgcctcccctcccccctgaccagattatggggaatgggctgcgggccttggggttgcagtgccgtccgagaccccgccactctctgtggtggagcaggccaggccctgtagccccagaagggacactcagccaaaaagatgtgagccatcctcttcctgagagtctgcatattgcagggcccaccccaagcgttggaatcttcgtgggagactctcagacacccccttggtggctccaagagaccttccagtgaggctgtggcaggagggggcagggtgggctgggagaggctttggcccctcctctgagattttggggcaggaaggcaggacctgcatgaggctccaggcttagtcctggagtcacctaagaccggggaagatgcatcttgctttgccctggagtgtggccgtggggctcagacatcactctcccagaccttgctatgagccacgcactgagctcgttcactttgcaatgccccaagggagcaggtaccgtcacctccccaggcttcaaggtgaggaaattgaggctcagagaagggaagtggcttgccaagaccacagagccagggtggggcccatttcaagtccagggcgtgtgaccccaggggctctacctcctccccggatgtcggggtgggggcggcaggagatccgaactgtggagcagatggtggcacagtgagggtcccacctctgcttctttccgtggctgtgcccagtgccccctgccacccacttacagactggaggcctgaggagggtgcccgggactgctcccactccaccctgtgcgtggatgtcgctggcctgaagataacctccgcatggccttcctcagccagctctgcccgaactttggcttcaccacttatctggccatgacctcgggcaggcagtttgcccagccttggcctcagtttcctcatctgtgcagtgggtacagctatcacagcatcgttctcattgggcagaagattaaagcgacagcttgtgtccagggctaaccatgctggcaccacagcacaccctgggaagatgcccgccctttctttgcatggattcttttttctttttcttttctttttttctt

SEQ ID NO: 27312 - DNA, 3057 bp, Artificial sequence
  DNA replication origin
gggttcaggcctcattccttcactgggcaggaaagaggggtgatggttagtggcagctgcctggagcagtaggcactaggggcccaggcctcgcctctgagggtgctcatgctcttccgagcaggggctgagatgaggcctggatcccagcacccactccccagggtgtccagctttcaaggctgagctgccctgggcttgaccatgggccctcagtctgctggggcagcaacacgggtttctcttgaggccacgtgcctgctgcgccatggtgcccctcctcagagcccctggtgcacccccagaagcatctcaaactgggggcgggagaggagctctgccgctgtgccacgtgccaagtggcagggacgcgggtgtgcctgcgtcacggggctgccacggaatgtgtcagtctgcaccctgtccccaatccccagccaccccagctgtcagccaggctctggggctgccactgcagatggagcccgatgtgcatttctctggccaccagggccctgcccagctctaaggccctctgcaggcagggctcaatggtccctgaggttctatgagggctgagtggttggttaggctgtgccccagtctggtgctgacagagatgggggcaccagagatgggggaagagaccttcaaactgggggcgctgaggggtgaggaggtttcccaggcatgtgtccaaaaggatgtcccaggggtgggcacgcggtgtgcagcctctgcaaggaatgcagcgccgtggcagggaccctgcaggatgagggcagtacttggagagaccactagcccagggcccagcaggaaggcatcgagaccccatgaggcagaacagggcagagcgaggaccctgtgaggtacacctggcaggacccaggtagagggaatcagccagccccggggcttttggagccaatcctagctctatgtaacttctggaaaatccgtctgcaagctctgcttccccactcctagttaggcagtgtgtgaaggaaggactctggccggtcagaggaggggtgcgtgtggtgccagggagagcggggcaggaggacccccttccctctcttggctcaggccagatggtggaggacgggcagccacttcctcagccctgcagctcctgaagagagagccagctgaaaaggagatgggccctcctcatccgaaggctctgtgtattgcaaggcccaccccagccctggggtcttgggagccctctcagtgactcaggtaccaacctagtcccaaccccagaggccactctccccgcggacactggccatggcacgatccgggttaatttcccgagctgtgccttccccgctgaccggcctcttcctaaatttgaccaatcctccatcagccctccgggggccttggcagctgcacccctttctgcgtgactgagctagcggagccacattccgcattcattcattcgttccctaattcattcattccgcgaacatgcagaggccatgcacgttggtgctgtctgtcctcaagagtcctcaggccaggaggagagacaccaggtggacagtgatgataacccatgtgattgcaagaccctggagacgctttctcaagagctgggggtcccggagcaggaggcaggggcgacctcgcaccaggaactgagggatggaggagaagagcttgcagggctaaggcagggaaaccctgccaggcaagcagggggaacggcgtgtgcccaggcagaggagcaggggaggaggaatggcatggctgggctgtggcatcagggctgggaaggggccggagctgaggtctccgggctcagtgacttgattcgcagaagaggcagctcctgcggggcccccacatggccgtctgggaatggtcagcctggatgctgtacatgtacatgtggggacccccaggagcacccaggccccaccgtgctccctaggctcactctggccacacgcttcacactgcgtcccctggggaggacacagaggccacggccacctctccccagcagctcccaggccaggctcaggctgctgaggacaagacagctgaggtggggccacctctctctctttcccctggggtgagccccggagccttgacaggattccacttcaagctgagccagcaccacaggggctgaggctgaggatggtgcaggcatggccacctttttaacaagtctcttccccgtattagcacccgggctgcttgtccctaaagggagaggcagtccctagcagcccacgcaggtcgtccgagcccctctgggtggaacgagggctctcacagtcgccaagcaggaaagggggctctgtgagccatgggaaccggctccttggtgaccgtctggctgggtgggtggggccgggcccagggccaagcagaggggcccttgtgtgagcccccagggacttctcgctgaacgggcagagagaccccagtctccagttgagctcagctttctcccgcagcgcccatgcctgggccaaagtgtgtggctgtttgcatttttgagctacggggtgggggatattcgggctgagtcagtcaagccgggagtgtgaggagcagcgggggccggcaggaacgtggacgcgagattggggagcagtggggctgcctgtgcggggatgcagctcccaccaagcacacgggtcgagggctgaccacaggcagagcagcgccttctggcagcgctgcgggtgtggatgagggaagccaggccccggacccatacccagacggccgctcctcagcctgtcccctccctcctgtgggctctcaaagtgcggcttggtttctccatctcgaccctgaggcctggaggtggggacgggactgtgggcgccggcaaacgtgagctcccgagcggggcgggaaaggagccccgcgaatgcctcccccagccccggcgctccacgtgcaggcccatgactgggagcgttttcaacctaaatcggcactgcgccgggattattcctcccctggcgccgcccccgccgcctcctccggatccttcccggcttctcccccactctt

SEQ ID NO: 27313 - DNA, 1820 bp, Artificial sequence
  DNA replication origin
tggcatgagccaggagcccgggccgaggtaaggtgcgcgtgcggccgggctgcggggccgggagggggccaggccgcacctccgcggcggccacaatgaggagggggcggggtgggggtgggggccgcgccgccgccgcccgggaagggcttacgtaacggcagccccttccccacctcccccgcggccgctgggcctcggtccctgcctggccttcccgcagccccgcgccccggcccctggcccggaagagggccgctccccactggccactcggccggggctgggggtccgtgcctcctgggacgccgaaaggaggaattgtaggcccccggcctccaccccgggcgcctggtcggctcagagggcgcccccggaccgaagtgacaggccagagaccgttaaactgcatgggggtcgcgtggatgtgcggcctgaggggcggccctccccgggcgggcggcttctggacccggggcctgcgctgagctactgcccgcgggaggaggagggtggggggaggctggcaccttcctggttctggaggcgggaccgggccttggccaaggttggagggcctcagaagggaaacggcaccttcagacctgctcgggaggggtccggtgtcctcctggggattaggtgggtggagagcgttccccacccatcacctcaggagagagggctgcggtggcagcttcaggaactgacggcccagcggccactccaggcccttcccaggctccaggctctgttcgggcagcctgccctccgcaggaggagcagatggcggaggccacctcacctgcctcttccttcaggcccttcccccacacccgtgcatccgagggcccaatggccaggggcagctcaggcctccctggacacagggccgtctcccagcccaccccctctgtggggtgctggacagcagccttggagcagataggcctgggtcaggccaggagactgaagggttttctgtctcccggaccagggcagaggcctagtggaacctggctggtctggccagaggtggacacagggctggacctggagccgcctggaggggagggaaattcaaggcccagctgcaaacatcgctgtgtgggggaaccctaggactcacttgccccactccctgccccctgccaccccaactgcccctcatctggggccagacccttgagttcagcccctccatcgacagactcactgcctccagctcacacccacttccggggcggctggacgagtcctacctcccactgatgagaaggacacaaacagcttcctgtgtgggaggcacggggcccttgaaccagctggacatggacccaggaagccttgtgttgctgagagttagggatctcccacccaggtggcactgttcagccacccgaagaccccatctccttgcatgtgggcacccactgctgtgcctcccatgactggattggcagtgaagggagctctgtgggtgagcaggtgactgagccttccccaccagtggtgcaggaggagtcaacggccaaactggctgcaatgtgtgggttcaggcctcattccttcactgggcaggaaagaggggtgatggttagtggcagctgcctggagcagtaggcactaggggcccaggcctcgcctctgagggtgctcatgctcttccgagcaggggctgagatgaggcctggatcccagcacccactccccagggtgtccagctttcaaggctgagctgccctgggcttgaccatgggccctcagtctgctggggcagcaacacgggtttctcttgaggccacgtgcctgctgcgcca

SEQ ID NO: 27314 - DNA, 2306 bp, Artificial sequence
  DNA replication origin
gcacagtcagccaatagctcatcaaatgcaccatcagacaccaggcagacacaggctgagaaaagaaggtccttggtgctggggaggtgaggacacgggtctgtggccctgtcctcctgagggagggcacctaggggagaatacattagccaaggtctgaaaggcaagtagtcacccaggtacaggtggcaagggagtgctccaggcaaggggccaggagaggagtgctccaggcgagaggtgctctaagggaggggtgctccacatgaggaaatgctccaggaaggggtgctccaggggaggggtgctgcaggggagctccaggtgaagggaggggtgctccaggtgaggggtgccccaggtgaagggtgctccaggtgaagggaggggcacaccaggttagggatggggcactctcctggccccagaagaaggccagtgtggctgaagcttcatcctcaaggggccaggtatagagcgaggctgtgggccagccgtgccaggcactcagggctgtgcagtcttcagcaaagaatgaacagggccctgggaagaacaggaccatgtctgcacggcaaaatggccccgctgcaccctggggagaaaaggagatgggagaggggtggagagaccaatggggaagtagctgccaccagccatggtggagacagacaaagttgcccggcacaggtggggtcacagaggtggagggtaggtgggtcacagctggtgacagaggtggagggtaggtgggtcacagctggtgacagaggtggagggtaggtgggtcacagctggtgacagaggtggagggtaggtgggtcacagctggtgacagaggtggagggtaggtgggtcacagctggtgacagaggtggagggtaggtgggtcacagctggtgacagaggtggggggtaggtgggtcacagctggtcacagaggtggagggcaggtgggtcaccgctttggaggagcacggttggcctttctgtgatgatcttccacacactcttccctgctcagattccccacaggcagggctagcttcttgggcctcgccagggttgcatgacccaaatgcctgactcccacgctcaccctatgcacttggggtgtgtccagcccaccctatgcacttggggtgtgtccagcctgccctgtgcgcttggggtgtgtccggctccagccccagctgggactcaacacaagcacagcttgttctctgcctgaggccctggcacctgctgtggtgagagccccaggcacgaggtgaaaccctcctaccgggagcagtccacgcctggggtggaagctgctgccagagggccagcctgccagaccatgcaccggagacacccagataggttggaccgccgctcccctgttgccccaactgtcttcacggggctcgtcctgtctgccccactccgggcaccttctttggtcagtatccaggtaccgggcaagacttacgcagaagagctgctgcgctcaccccaggtagacccagtggcgcccccacagcaagcacagaaccaccccaccccgggacccagccagggtgccgtcagtctgaccctccttcccgctgaccccaggcctcacaccggccccttcggccaggcttcccatcaggacgctgggaacagcagctggtttcactcctattgagatactctcaggagccccattcagccctgtagctctttcccggtgcaaagaacccctctgctctccccacacctgctccctcccccggccctgctcccaggagaccccaggatagggcgccattggcctccattctcctgccctgagcctgctggggcgtctggggtctccagcggtccccaccgagtcctccacctaacctagcacgccccacccctgccccgggctgcagcagccgccgccgcctccagcctccagtttattcccgagggaacttgccaggctcctcggatctttgcacccccattcccgagccatccctccctcgcgccgtgggggggtctcagctccagtggggcaccctcaggaagcccccgccagaagtcaccaccgcaagccctcgggtgctttcactgtcactgtctgaactgatccgtgcagtcacttgttttcgcgctctgcgggtgtgccagggtctccaatgaggggcttccggccgggcacgcagcaggtgcgcggggggtgtgagggctgtgaagggtccttgccgtgggctgggcgggagggtccagagacgggggtctgaccaccctgtctcctctgggccgggtctcgccttcctcgcctccccaag

SEQ ID NO: 27315 - DNA, 1522 bp, Artificial sequence
  DNA replication origin
ggggcctgcggcgtgtcggccagtcgcggcgcggcccggaactttccgccaatagcaggcgcggggcggagcgggggcggggccggagctcgggcgccgccggaggactatcccacggtccaagcgcctcgagggttggggggggccttggcgcggaagggaggctccttgcccgccccgcgctgtgcgtctctccttcgccgcgccctcaccctggcctcgccccccgcgctgtcccgatcggagtcctggagcctctgatggagccgaggttttgatgtccactggaacctcggggtggcggtagggaaggtggcccacctggtggttccgcctcgcgggcggccgggcctgctccttcctaacactgggacctgggcctgttggccacatccctcccaaccaggtccggtcctgctgaccagaggccggtggagccccagaggagaggggtcatgactccagaggcggggaaggcctggcctgggggctgcgccttggagcggggccaggcctcgggttttggtaaggccgtctgcaggagggggtcctgctgaagagcgcgcagcccgcaggcttaggcccctttcctcagacctagcggcaccccatagttgccggatgaccgaccccgggccagacggggctcctggaggggcgtgaatggagcagccacgggcacccctgcaggcctgcagcacgtggagacacaggagctgggaggacacccctgggccacaggagcagcccccaccaagatgaaacaagcagaaacaggcgattcgcaaacacactgtagcctcaggctggagcagtgtgggattcccagcatccgggactgctgagttggcctgatgggaggaagtgggcagtggctggccaggtggacaggaagagaatgggggagagcagacagcctgggtcaagggcctgaggaaggagctcttggcagcccagtgaaaccccagggcatgggtggtgggtggggacgacaggtcagatcacagaaggcctaaggcacaagcaaaggggtcccactacatactgaaccccttacggacgacagaagctttagccggggactgcaaggaccagcatagactgtgcagcctgaagatgtgaacattccgtcccctgcccccaaacctcctgccacccggcgctcgaaactcatggtggacagatgagttcaccagtggcagtcggacagatgaggccagatggctcagtggcagtgggaggctggatcccactgaccaggccctccctcaaccccagggccctcccaggccaaacaggaacaaggcgcctactgggctcggccagccccttgctctgggcgaggtgcaggtcagaagtagccatcacaatccccaaaaggtggaagactcccaaaggcctgtctgcagctgagtggacaagcaagtgcagtgggtccatttttttttttttttttgagacggaatctcgttctgtcgcccaggctggagtgcagtggctcgatctcggctcactgcaacct

SEQ ID NO: 27316 - DNA, 1778 bp, Artificial sequence
  DNA replication origin
ccccaggcgcccctcggagcgcgcagagcgctgggccggtttccccatccgcgaggcggcctcgggagggagcgggggctgcgccgggcggggacccgcccccgtctcagcgccccgtcccgtcctgtccccagcggcctcacccaggagcccggcagcgtggggcagctggccctggcctgtgcggagggcgcggttgagtggctgtacccggctggggcgctgcgcctgaccctgggcggccccgatcccagagcgcggcccggcatcgcctgtctgcggccggtgcggcccttcgcgggcgcccaggtcttcgcggagcgcgcagggggcgccctggagctgctgctggccgagggcccgggcccggcagggggccgctgcgtgcgctggggtccccgcgagcgccgggccctcttcctgcaggccacgccgcaccaggacatcagccgccgcgtggccgccttccgctttgagctgcgcgaggacgggcgccccgagctgcccccgcaggcccacggtctcggcgtagacggtgagtggcggtctggttgggacagggtgggagtcccgaagtcttaccctgcctgggcttggcgggaatgtgccttgtcggccccactgcagaaggaaaaagtgagctacaagggttggatgggcttgtcaggccacacagcctgggactgctggggagggatggcctccccgccctcccttcccgattcatctctggaaagagctggcaggggcagagtggagggaaggggaggccgggcccagcaatcctgggcctctggtccctgaacggttgggggaagagatggtggggacagaatcgaagcctccggccaaagctgtccggggctccctggcccagcggtgacctctctcccctcccccagcccaaccaacaaaagtccagtgtgcagcccggtcaccatggagacgccgctcgcctccctgcagggcaccaggcccagctcttgcttggctctcctggagcttggcgcctgaccctgaaagggatgggctctcgctattctgccccctggccctgggccagggaccccagaccacccttcctctgcccccacttcctatcaccctagctgggctgctgctcttcagacctcagatccgggaaactagaggggtcccagatgctggggtgcatatgtcagatgggagtgcaggagggcggcccaggacagctgatcgctaggcatggcccccaggcccacgtctgtgtgcattcctgccttggaggtacgcgcctgcaagtgtgtttcctgagtacaggtgtcgccgagggcgtgcacatctgctgtgtagctctctgggacccccaggtgccatcaggccctgagcgtgggctctgctcatttgcctgctgcctcctgccgcttgtgcggacaagggacggggcctggggtgatgccgggagagggcagggcctctcctcaccaccccctctgcatgccaggtgcctgcaggccctgcagcgacgctgagctgctcctggccgcatgcaccagcgacttcggtgagtgtccccgccatggggggagcctggagcctgccttcccctgaatgcctaccgcagccacatgcctccccacagtaattcacgggatcatccatggggtcacccatgacgtggagctgcaggagtctgtcatcactgtggtggccgcccgtgtcctccgccagacaccgccgctgttccaggcggggcgatccggggaccaggggctgacctccattcgtaccccactgcg

SEQ ID NO: 27317 - DNA, 1425 bp, Artificial sequence
  DNA replication origin
ctcctcaccaccccctctgcatgccaggtgcctgcaggccctgcagcgacgctgagctgctcctggccgcatgcaccagcgacttcggtgagtgtccccgccatggggggagcctggagcctgccttcccctgaatgcctaccgcagccacatgcctccccacagtaattcacgggatcatccatggggtcacccatgacgtggagctgcaggagtctgtcatcactgtggtggccgcccgtgtcctccgccagacaccgccgctgttccaggcggggcgatccggggaccaggggctgacctccattcgtaccccactgcgctgtggcgtccacccgggcccaggcaccttcctcttcatgggctggagccgctttggggaggcccggctgggctgtgccccacgattccaggagttccgccgtgcctacgaggctgcccgtgctgcccacctccacccctgcgaggtggcgctgcactgaggggctgggtgctggggaggggctggtaggagggagggtgggcccactgctttggaggtgatgggactatcaataagaactctgttcacgcaagctgctgtggacctggtctcctgtgtccagcccagccttgggcctgcctcgcagctgtgaggatggctccaattcctgcctcctggcgggagactgaggctcaggggaatggtatcttgttcaagaccatttggcaactgagagggagagcagatgtcaggaggagctacacccacattccggggaggggccgctgctgggtggggggcacgtggggacctgcactcatgcaagcttctgctctgctgcacccaccagccccgtccttgcccgcacccttgcctgcttccctggctggctcccacttgcctcccgtgccaggtgcttctggggctcagcaggagaggaaaggggcagaggggcatagggtccctcgggtacggtgggggcaggcgggcgcacagcgctccggctctgagccaggcctgtgagggaaggggctgcaggctggcagggtgccgacttcccccatggctgctgtgagcccgcagagtcatccttggccccgtcccgcccttggggaagaatgggcccctctgtcctcaggccccttcgacgtgctgagcatccagacgtggcgaggagcccgaagggtgtggggtcccctctgcagggtcctgcttgttgcctgtttccggcgggcggggtgcacaatggggtctctaaggaccgtttcccgccactggccccattgtcactgtctccgccttcctcctcggcctttcagccgcataaagggccagtgaggtttgggacagccacagcccaaggctccgaggctaaaagcccctgggtgggggtgttccaggacacctggccctgtgtgagctgcctcctctcaccccaaccc

SEQ ID NO: 27318 - DNA, 2848 bp, Artificial sequence
  DNA replication origin
tgcgggacgcgcggctcgtccgcccaaggtccttcccggctcgggtccgcggccctcgcagcctggcctggggctggcggtgtgccctctgcctcctgccgggagccgccgcgcgacaccggaagtggccggcagagcctgcgcggtcggtccgtggcgctgtgcgctccgcccagcccggctgccctcccgcgggttccggcgagctgcagcctcgggggctctgccccgccgcgtccggctccaagcctgcgagggtcggctccgttggtccgctctgcggaccgccgtttgcggcctgtgctggctgctggcgacccgcggaaggggacaggcaggccctgccctgggggagcgcacgtgccggcgggagtcgggatacacccggcgatctcacgggctagagccccagggaaacggggctgcgcgtctttgtcgtggaatgaagggaagtctgccttggagaggggcggtcctggccccagaaccagccgggggctcgcgtggggcggctggagcccagggagccggtgggaaagcggctccccgggatgagacagcgtccaggcgccagcacccccatgactctgcctcggggagactgctgggggcgctccgctgactcggacacccagcgccagccagagcccgggaggacatccttccatttccctcctacagcctgagcgatgagccccagtgggcggtgaagggatggggggtggggtctgagggagaagggcatggaggaggggctgacacggaggagagcttgagcaggcccaagaagacagatgctggctctcaggcgagtgtggtgggaggaaagccggatgtcacaggcgggggcctctggcacctgccagctacagggaaggcagacagccccgggagtggggagatcaccttccttctccagaaaacaacacacaaaaagactgagttcctggaggtgaccttgtgaagctgggggtgggaagcgcaagtggaagagccgagctctgggtcaggcagctgggccacgacctccacacccagggtagggctgaacacccgtgaatgtcgggggttgtctatgcgtgccctggcctagctcctccttagccatccgtggctggggtctagagcccctgcagggacagaggctgcttccagacatgggtatgccgcagaccacagcccccagctcccaagtgcagagtctcacaggcctgcccacgttggccccagccccacccagctcagcgtgtcctgtctcctgggggcctggaacggccctcccaggaaaggaagggtgtatgtacactgagctctagggggagctgacagcgcccattcctgtcctgctgcctgcattattccctgcacctagagcagttacctaggaggcttactggatgaatgcacctaattggactctagcgtgcactctccactcttcttttttttttttttttttttttttttttttttttgagacttgagtctcgctctttcgcccaggttggagtgcagtggcgcagtcttggctcactgcaacctctgccttccaggttcaagtgattcctctgcctcagccttttgagtagctgggattacagatgcatgccaccatgtctggctaattttttgtgttttattagagacggtttcaccatgttggccaggatggtctccatctcctgacctcatgatctgcttgcctgggcctcccaaagtgttgggattacaggcgtgagccactgcgcccaacctccccactcctctcccgtccacaccaggcactctgctgcttggcctttgggcactctgcagccacctgtacctgtgtgaactggcacttgcctggcggtgtctgtgatccacaggccccaggctcctgtagctcctgcccacctgctcacccacactgtctccctatctcccatgccactttggccacctgtccccagggcaggcatgaagcccctggtctaatgctccaagacccatttgggcaccgtggtgctcctgtggccctgtgtctcatgagaagacagctggttgcaaagccagggctttctctgggagggtctgtaggtgcaaggctcaggcacttcctgagacaggtaggtagaagccagggttcggccagggcccagcccagggtgtttgtgaacaggtggacttgggtgtggctgaaaaggagaggttgtaggaagctggccagagaatcagggcaagtgccaaaggtaagggggttgctcggcccacgggaaagcctctccaagacaggagtggaggaggcggtgcaggagggcacacgggctacctccttttctagtgtttgcagaagtgtttgggctgggggcagatggatgtaaggctatgggccccagggagtggtcagggctgaagatgaaaaagtggaggttgtccaagggttattggaggctgccccagaggagcggtcctgtgcctgagccctcagcgtgccacagttgggagaggagagaagcagcaaggaacctgaggaggggcagaaggtgggagaacccccacagtgcatgacacccagtggctgcgctcctcacccatcctcatcagccctgcggcaggcaggtgatctgtgtgaaagggtaagtctcttgcacgtgcagtggaagtcccagggcggcgctggaggtgacccccctccccaggtgtccacagagggcatggcactcatcaggcatctgcatccgctaacctagagaaaggaccgtgtttgtgggccctgcacagctgtgtccctcacacagcctcagtttcccccttgaaagctgggggcttcatctgcctgggcagggcctctggcctccacccccac

SEQ ID NO: 27319 - DNA, 1426 bp, Artificial sequence
  DNA replication origin
cggggcgggagcggccagtggactctcgccgccacccggtccaggtgccctacgtcggcgcgagcgcgcggcaggtggagcacgtgttgtcgctgctgcgaggacgccccggaaaaacggtggatctgggctctggcgacggcaggatcgtaagtgcctgcgtctgggtcttcgccgccccacaccgcccacctgctggcgggcgcccctgcccacatcctggttcccacactctcggtgcccacaggtgctggcggcccacaggtgcggcctccgcccggccgtgggctacgagctgaacccctggctggtggcgctggcgcggctgcacgcctggagggccggctgtgccggcagcgtctgctatcgccgcaaggatctctggaaggtaacctggggatccctggccacccgctgacagcccaaggtgcggctgacacctgcgagggctgggggccgggactcggaagctgcgatgacccggtgcccaccaggcctctccccggccggggcgacttctcttccggcaggtgagcctgagggactgccgcaacgtgtctgtgttcctggcccctagcgtggtaggtgcggggttgccagccccgctgggaagccccagccacaccccagggtgtttgctgctctgaggcctgggcctgcctggtgggtgctaggcttggggctaggggggtgagcgcggctgttttctaccggccccgcccccgccccctctactctgctgttctctccctcagctcccgctgctggaggacaagctgcggacagagctgcctgctggggcccgcgtggtgtctgggcgcttcccactccccacctggcagcctgtgaccgcggttggcgagggcctggaccgagtatgggcttatgatgttcctgagggtgggcaggctggggaggccgcctcctcgcggatacccatccaggctgcccccggacctagttctgcccccatcccggggggccttatttctcaggccagctgagtattagacacgataaagactctgtgggttctatcctgactcatgttttatggggggctgggtgggagggttctgtgctggctgaggagctctgctctgctctgctccttgggagacggcctagtggctgccggtccttggatgctggggcttggctggaggcacagcccccactttccaggggtcccctgcacctgccagcttcctcagcctcaggatttcgtgcttgtacctgctcagaggaaccatgcttaagtgacttgcccagctgtggacaggtctgcttttagcgcctgaggcagccatcatccttcattccaaccagaccagggccctggggtcacacccagctccctctgcccacctgcccaggtgctggtccacgtactcctgtagctcagaaagttgctcttcagccatcg

SEQ ID NO: 27320 - DNA, 1820 bp, Artificial sequence
  DNA replication origin
ggagggtgggggccccagaagctcagccggggtccactctcagggcacaggtggagggctgcttccaccccaggtgctgtgcagctgccaaggccagctccgtcaggcagaggctgaaaatgcccggctgcagctgcagctcaagaaactgaaggatgagtacgtcctacggctgcaacactgcgcctggcaggcagtggtgagccctgcaggagcaccctgaggcctagggagcccaagcctggcctgggtgtgctggatagcttcagggagaccccagggccccggcactgctcagcctgctggggtggggggatggttggaaaagatggggggtgggccccatgcggacccagcccgccgcctccaggagcacgcagatggtgcaggccaagcgccagccaccacggccctccggacattcctggaggcgactctggaggacatccgggcagcgcaccgcagccgtgagcagcagctggcccgggctgcccgcagctaccacaagaggctggtggatctgagccgcaggcatgaagagctactggttgcctacaggtgggccccgctgggatgggaggtgtcaggcatctgtgggtctctaagcctctgtgcctcaaaggcttggtgtgcagcaggagtggccccagacagacactagcctaccctgacagggcacctgggaacccccaagctatttttgacatagccagcttggacctggaaccattgcccgtgcccctggtcactgacttcagccatcgggaggaccaggtgaggctagagacccccagaagctccaggcccgggtgccccccacccacccactgccccacactggccccaggcctcatcctgggctcaacagagacctcagccccgggcctctgaggggcttgccttgttcagccaactgaaacgtccccaccacaaacctctgtagcacggcgggcctggggcactgctctcatccccaaaaaagagacccggtggagcctcccaggggggaacatcagagccacagtgagtgccctcatgggtgtgggggaggcctgtgggggatgagcagagagcacaacgcctgcaccctggggcccccagttgctccaccaagcccccgccagacagggtctggtcacagcaatgcactcagtggcacatccccaccctggggtccctccgtgggtcccggcgacactgataatcacaggaaagagaagaggggctgctgcaggtggagctggccttgaacacggaggatcagggagagcacacctgagggaggtttccgctgagacctggaggacgcgaggggtgggagcagggcgcctggtgaccgggccagcccttgcctctgggcctccatgttcccagctgtacaatgggcagggctccccaaggaccatttcctggggtttagggcacacccgtgtgggggtggcatccctgttgatgctggagtcactgtctgggctggccttgtggtttagccctcccccagcagccagcagaccccctgggcccgggctgtccctatacacggatggctccaaggcctggggggggcgccacaggagcacggggggggcccatgcctccctcactcactcccaggtgtcccctcccggctctgggaacctgactcagcacggtcacgtctgtccctgtgtcaccatgccagctctcaaaaccactcctcctttcctctcccctcacaggggcctggacgctgcatcctgggcccagatccaccagaagctccgggacttctcccgcagcacccaggtaggaggcaagggctggcccaggcccatcctcac

SEQ ID NO: 27321 - DNA, 1936 bp, Artificial sequence
  DNA replication origin
ggcgctggcacctcctccaggaagccctcccgacgccccggctgagccagtcgtttccgagttctccggcccctgatggggacgtctgcgcccctcttctcaggccagaggtgcagagatatacttcccccgtcccggggctcagccagcactgctaggtacacagaaggtgtccagcgagtgtagctcagggcatcctgcgggcgggctgccgctccgttccgcgtgctcgtccgctgcgcccaggctgggcgctttcacgcacctggttccatctgcacagggtatgtgcagggggcgctgggccgcattccccagatggggaaacggaggcatggagagaggaagagctatcctccctcctcagcaaccaccggtctggccggcccctgtgggcggtgccctgggagtcacctgggaccaacagaggccttggcaacgcacttagcagtgccagtggcagcagcagccatggggaagccgggcgtggaggcagcaccgggctcggagctggccagggttccctagcctatggagcacgcagccaccacaggccccaggcctggacctccctctcggcgggtggagaatgtgagtcctctgggacttgccgctcctgccatggggttgaagtctgcccgttcccccaaaggccaggagggtgcaggttcctgcaccctgggcctaatttcagccaggagagggacttttacagctcagccaggcagggaggcgggactggtgactgcatgggagtggggccacagcccagcctgggacccacctggggaatgggtggcggtacctccccaggttgtgctacgagccaaggactggctgccaggagctcctgggggcaccgcagtgtgggccaccagcttggaagcagaggtcccaccagatctagcgctcaataaggagcagcagctgcaggtgggtgtggggccccagcgtgctcgtgaggagggagggtgccagcagggcccacagacgccacctctcacctggccacccacagatctccaaggagctggtcgacattcagatcacaacccaccacctacatgagcagcatgaggctgaaatcttccagctgaagagtgaggtgagcagccgtgtgaaccagcctcagtgcatgggggacggggggtgcaggcccaggacacgtgccctgcatgggcatgcacacgcacatggcatctgtgggtctcagcctgcctctgagtgctgcgcgcccctgagcgtgcaccgggtgaatgttcacctaccccaggtggcccgcgggcaggtgcacctgctcatgccagttgtcccacagatccttcggctggagagccgggtactggagctggagctgcgaggagatggcaccagccagggctgtgcagtcccagtggagtctgaccccaggcatccccgggcagcagcccaagagctcagacacaaagcccaggtgcctggacactctgatgaccacagattccaggttaccatgagcatatggagagcctggctgggaaaggccagagggaagcctcagcaggggcctcagtgaaactggggctcacccaccccttagctttccctgccctcccttccattcaggtgcagcccaagaacaccatgaaccccgagaatgagcagcacaggctggggagcggcgtgagtgtgcagccacctagctcaggggagagggcagcaccagagaccccaagcctagggtctcatccagccagccctgtgtgccccacagctgcagggggaagtgaagtgggcgctggagcatcaggaggcccggcagcaggcactggtgacgcgtgtgtgagtggccatctcacctggggccccatcctggagcagagagaacccctgatcgtgggcctgctgagcctcacccccgtgtcttcagggcaaccctgggccggcagctgcaggg

SEQ ID NO: 27322 - DNA, 997 bp, Artificial sequence
  DNA replication origin
ggccccgcctccgtcagtctgtccttcgggtcctcagcacagccgtgccggtgaggcgggcggcgggggaacgcggctgtcccgggtcaggggtcttgcggcggcagggcggggggccgaggggcggggcctgggaggaaggcgtggcctttggggactggggctcggactgggggcggagccggggctggttggggaccggccgggttccgctcctgctggagcccggtgcgtggaattccacgcgagtgccggggagttcctggggagccgggcttctcttttggcccccagcgtgttgaccgagcccgcttcgcacagcccttcctagggtgtggagagcgggccccgccctgaaggggcaccgtgggctggggggcctgttttggagcaggcaccggtggccgagctccgtgaccatgaaggtcaaggtcatccccgtgctcgaggacaactacatgtacctggtcatcgaggagctcacgcgcgaggcggtggccgtggacgtggctgtgcccaagagggtgagggcaggccgcgggccgcagggacccggccgtgtcccccgagagcctccccgacccccctggtaggagcgagcccccacgtgctctgctctccggaagtcattggcggctggggttccttgtttatcttggggctccctgaagttacggcacctctggcctccgccctttcgctgctgcctggcggtccctgcacgcgctgggcgcagtcaccgcccgctgggtccccgctccccggcgctccccggggctctggccggcctggggcagtgagcgcggcggatcccgatatggagggagtgggccaccgggaccgtctgtgttaccgtcactcccgtccctttcagctgctggagatcgtgggccgggagggggtgtctctgaccgctgtgctgaccacccaccatcactggtgagcgccggcggggcgcggggaggcacgaggacgccgccttgtcccaacccgacct

SEQ ID NO: 27323 - DNA, 944 bp, Artificial sequence
  DNA replication origin
acatctgccaacactgacaacggcctttcaaagctttattcatagttcggaggccccgtgtgccccacttcccagacacccaggtctcggcgcccacacaggccccactgagtggtcctgtgtgtccacccgggaagcaccaggttgcccaccctccgaggctgggcagatggctggccagggcctcgaagaaggttccagaggtggccctcatgtgggtccagctggccgaggtcacgaggagggacgcaggccccagccctgtgagggtctgggtggctcagtcgtgtggggctgcactcaggagcccccactgcagcgcaaggagggcccgcgcctgtggctgccgcggctcgcccgcctgttcgaagcgcgcccgctccttgcatagcgcctccaggacgtcggcggggaccgccttgcccgtgaacttgcgcaccggctcctctctgcagggaggggtgcagtgaggcgcagggcccgctgcccacgcgggagcatggcgccgaggggtgggcgggcaggcaggcacttaatgagcagcctcccccaagccagagatgctcactcagcccaacacgcagtccccagatgccttcctaagggtccacgtaacggtggaggccccgggacaacagccatactcacgccacccgcaggaaggggttgtagaggcgctcctcgcccagagtcgacggcacagtgggcacgtcatcctcatccctcttctggagtgaccacaggccccggtcaccattaggccttgtctgagagccccccccaccccgaagcctgttccctccccccccaccctcttgccgcggcgggaaaggggccgtgccttagcccaggacagcttggctctcacgtggtcgttgcagggctccactttctgggcaaactccaggttgctaagcgtgtgctcgtggccgcagaacaccttc

SEQ ID NO: 27324 - DNA, 2306 bp, Artificial sequence
  DNA replication origin
tatggctgttgtcccggggcctccaccgttacgtggacccttaggaaggcatctggggactgcgtgttgggctgagtgagcatctctggcttgggggaggctgctcattaagtgcctgcctgcccgcccacccctcggcgccatgctcccgcgtgggcagcgggccctgcgcctcactgcacccctccctgcagagaggagccggtgcgcaagttcacgggcaaggcggtccccgccgacgtcctggaggcgctatgcaaggagcgggcgcgcttcgaacaggcgggcgagccgcggcagccacaggcgcgggccctccttgcgctgcagtgggggctcctgagtgcagccccacacgactgagccacccagaccctcacagggctggggcctgcgtccctcctcgtgacctcggccagctggacccacatgagggccacctctggaaccttcttcgaggccctggccagccatctgcccagcctcggagggtgggcaacctggtgcttcccgggtggacacacaggaccactcagtggggcctgtgtgggcgccgagacctgggtgtctgggaagtggggcacacggggcctccgaactatgaataaagctttgaaaggccgttgtcagtgttggcagatgtgccaggagaggagctgttttcgtaggcgtgttttaggaggggtgcgtttattagacaaacgctgggagacaggcctggtggggacctggctgggggatgatgcagcccgcgatggctgctgcttcgtacttggcttgccccggaccacagcctcgtaacggtaacccctgctttccaggggcctggcacccccccctgccagggtccacacgcagggttgtggcgggaccacccctgcaggtccagctctgtctcccaccttttgcacagagcttcaagggaagcctccagaagtcaggggtgagaacccgtcttgctctgcctcaggcaaccccgggacaggctgaagcccctcacgcacttgggtgcccgaccagcagcagcaagggcagcacctgtgggcctcggcccagggccaacggaacaggctctgggacctcagggaaccttctgctgcctgggccaccccaccccacctgggcagagccagtgggaacccagaggcacccaactggaggtgacgaggcggctgcgggtcctggctagtcctagctcctactcgggtcccagcacaccctgcagctcactcagaattttgggggaagccctggggtcttggggcatgtggttctgctgtcacacatggacacggcctcctgggagtcctggtcctgcagcccctaccaccggatgcccaggccagtgctggccttctccacggcgtggtactgcgtatgcagcaagcgacctgcacactccgagtccgtgccctgcagccagtgtgtgtacagctcctgaaccccaggcgcgtcctcgggcgcctcagcccggaccatgccgtacagtctctccacgtgctggaggagctctctgctgggcctgtctggggcctggagctggcccccgccgttcaggcagcctatgggagagcagacgggacaggggtcacagcctgcgccccagccaagcttcctgaccaccagggagcagggaggtgaccgggccccctctgtgccccacttcctcccactcccagcctggtggatggtggcccacagctctgctcccagaaggggtcctcgtgtcctgtcccttgcaggagctacctgaggggcaggccatgacctccacgtagtggtaggggcagcgccctcgtttgagcctctgcaccaggttctggatgttgcggaagccgtacgccattgcgaagtgcagcagcacctggccctccttctccagtgtcacctcctggaagtctttgttcctggggggcacaggcggggtttgtctacatggcacacccaccaggctcctgcctgcctggaaggggaggcctgctgggcttcaggggatgaccgggtacctcccagggctctctccctctctcctgggcagagggaaggacaagaacggagagagagggtggaaggctcacttccttgagtccagcaggggacctcacctccagcctcgggctgtctgtgaaacaggcctccctccccagggatgtctgtgaggccctggccctccctcctgggatgtggtcgcgtgcctgcgccaggcacccatcacctttgcccatgctggcctctcgggctcagggtcaccatcccccacaatgggccgactgaggcctggagtgcttaggtgccttcacaccctg

SEQ ID NO: 27325 - DNA, 1373 bp, Artificial sequence
  DNA replication origin
gcaccgcccggtccccgcagcaggtcatgggctccctggtcaaggacttcttcgcccagcagcaggtaacggcgttgggccagccccagactcaggctggggagcggccagaagtgactttgctggcctcttgccatgaggctgcaggaaacagagtcctcgctgtgctgtgcggccttccccagcacacctccacccttgttccctcctggttcaggcccttcctcttctgcagcagagggcttcgttctgatccagaggtgctcactgctcacccagaggcagccaggcctgaggctgagggagcaggaggccctgggcagtccgggcctggagcccacccctccggccaccaggtccacgaggatgcccagcacgacccccacctgaggcccagcgggatagaagcctgaagacactcagccagcagggggcgggagagggcgagggcggccccggtggtgcctgggcctcgagcgcccatgtcccctgcggcacctcttgcctgactgcacgcggattttcacccggggctggagctggttggttcccccgtgacatccgtttccccggctgctgtgcagtgagacggcccgagccgtgggaaggccacttctcctccgctggacttggctgttagggagcgcaggcacactgggaatgggtcagtgtcattttctgtcacagccagggcccgtcctgtccagggacacatccgcagagccggcaggaggcttgctgggaaatggagtgaggctcactgtccctcggggtccggcctggctgcaggatggctgagttccaggtcccgtctcagccaccttactgctgggattggggagacaagtgtttgtttctccttgtagcacttgacccctgacaagatctaccacgtcacagtgatgccctgctatgacaaaaagctggaagcctccagacccgactttttcaaccaggagcaccagacacgggatgtggactgtgtcctcacaacaggtgcggtcacgccgtgcggccctgagccctcaagcctcctggtctgattcctgagccctgggcacaggtggcgactgcccaggatcctgcctgtgggggccctggctggagtgtgggggctcgcatgcgtgcacgtaccttcgtctctccccttggagccaggtgggcccatttgcagctggcctgtcttggggacctgcagccaggtggcgctcagtaatacctccttgttggctctgaaatgagtctttggaggtgggcagagattctcgaatgcagcctcttcagctcccatgagtcaccccattcctgagtcgagcagccccacagtctcccaaatgtgaggcagaaaagcaaactgtggccgggcatggtgg

SEQ ID NO: 27326 - DNA, 1477 bp, Artificial sequence
  DNA replication origin
ccagggagggcggcgccccccaacccgctcctgtgccccatggtgtccgggcgggctgcgtgggagggtcccgtggtcgcgggctcgcgccggcctgcccaacccagaggaggcagcagaggcggctcccacacatccctaaccctaacccgacccctgggtcgcagctggagggcggcggggcccgggccggggcctcttccccttcccctgcgcaggacgccttgtcaggcctcaggacccccaagccacagcctttgcatctgcataaacgggtgcggtggggaccccacctcatttgagggcagtaggggcggcccgctagacgccccgcagtggctcctcagtagagctgtccttaacgtcgccctggtgggccggacagctacccttgaacccgggaggctgcaggcgcccttttctgggtgcacctgcctgtccatgtccaacagccccgcggggccagagctgagcagggcgagaggcgggctgctgggagcgcttccggcagggatgagctgggaggcggctttctgggctgccagggttctcaaggagaagagagagaaatccacttgtttcccgggcactgagcaggaggtggtctccaaacagatccaagcacacgtcctctcgatgggcagtgcaactctggtctctgtggtggtcacgccccctgttcacgtgaagggtgaaggtcagtgttggtggtgtctccgcaggtgggtagtttgcaggcgctgttagcactggccttcctgcacactgggaacttcagtgccgcaggatgttgggaacccgatccctgggtgagagcagtggggcaggaagaagacggtgggaccagcctcagtccctgagtgcatggctcctggcagagccttcaggctgtgcggctgggcagccatccttgaggcctggcctcccagggaacctccgcccactcacaggggctgatttggggtctcttcctgctctaggagtgcatcaagcctgtcaaagtggaaaaaagggcgggaagtggcgtggccaagattcgcattgaagatgacgggagctacttccaaattaaccaagtaaggcacaggaggctgctccaccatctctcctgcccggctgatccgaaacacttttctctgcttcctcccgtcacagagcggtgaccccgagacactccaggtctcaccagtcttttcccactggtcgaattcacctgccatctgggaggctgggggtcagggtgcctggggcaggtgaatgagcagcacccaggccaaacagcttgatctgctcagcagaggggctatttgcagagatggtggatcctgtctgcgtctgcctgttccccctagttctaaccatgtaagattttctaattcagacccctcgttcttttgtttgtttgtttgtttgtttgtttgatacagagtctccctcgatggcccaggctggagtgcagtggcatgatctcggctca

SEQ ID NO: 27327 - DNA, 1841 bp, Artificial sequence
  DNA replication origin
gagccgctcccagggcctccagcccctttttctgttatcttggagaccagtctggaaaagtccatgcccctgggagaccctgaaacaggaccctgtgggccgactcgcttttcgtttttttctttttttgagacagagtctcgctctgtcgtccaggctggagtgcaatggcgcgatctcggctcactgcaagctctacctcctgggttcaagcgattctcctgcctcagcctcccgagtagctgggactacaggcgcccaccaccacgcccggctaattttttgtatttttagtagagacggggtttcaccgtgttagccaggatggtctcgaactcctgacctcgtgatctgcccgcctcagcttcccaaagtgctgggattacaggcgtgagccaccgcgcccgaccccgactcacttttttttttttcttttttgagacagagtctcactctgttgcccaggctggagtgcagtggcgcgatctcggctcactgcaacctctgccgcctgggttcaagcaattctcctgcctcagcttcccgagtagctgggattacagtcacctgccattgcatccggctaatgtttgtagttttaattagagactgggtttcaccatgttggccaggctggtcttgaactccttacctagtgatccacccacctcagcctcccaaagcgctgggattacgggcatgagccaccgcgcctggccagttacatgtatatctggcatcatatggccagttacatgtctaatggccagttttatggggacttttcaggaaactcctggatcgaggctggcatctttccggcccaagcaggctcagcccatggagatctcacagtggcaacatcctaggtcccagcctgcgccgcaccctccccagggttctaggccctgattctgaccacatgtccccacctggatgcggcctgggcactcctgcacctgcctgtggggtttgggccaccagcctgtgtggccttctccatcacctgcagctgctcctctcggccagacaggactttcttctgctgctgcacggaggagctttccccagcacctgggccaggtgagcttccaggtcccagccatcccgccacctggcaatacctggccgagcttggagattaggggctgaaatatcttctattaaaaatagaacagggggtcgggtgcggtggctcaccagcgctttgggaggcccaggtgggtggatcacccgaggtcaggagtttgtgaccagcccagccaacatggtgaaaccccgtctactaaaaatacaaaaattaggctgggcgcggtggctcacgcctgtaatcccagcacattgtggggctgaggcaggtggatcatttgaggtcaggagttcaagaccaccctggccaacatggtgaaaccccatctctactaaaaatataaaaattagcccagcatggtggtttgtgcctggaatcccaggtactaaggagggtgaggcaggagaatcgcttgagcctgggaggtggaggttgtggtgagctgagatagcaccattgcactctagcctgagcaacagactaagacactgtctcaaaaaaaaaaaacttatcaggcgtggtggcacgtgcctgtagtcctagctactcgggagtttgagacaggagaatcacttgaacccaggaggcagaggttgcagtgagctgagatcgcaccattgtactccagcctgggcgactgagcgagactccatctaaaagaagaaagaaaaacaaaacacgaggccgggtgcgatggctcacgcctgtaatcccagcacttcgggaggccgaggccggcagatcatgaggt

SEQ ID NO: 27328 - DNA, 1701 bp, Artificial sequence
  DNA replication origin
ggacagagagctaccggtggacccacggtgcctccctccctgggatctgtaagtaacaacctttgagctcttcctgttgtggtgtggatggaatctgcaccttccatctggagaactggggccgccccaggccgggcttccagcaccagagcgatggtcaggcttcagctggacgcagatttcaccccgcagggcacacgcagacccatttgtttggaagcggcagtcctaaggcagtgcaggtgcctccacggccccagcccagctctcctgcaggtgtaaaggatgcagattccagggccccccatggcctgcagaggcccctcagagcaggaagggccgggctctcggggagcccccatcccaggtgctgaggtccttgggtcacatggagctggggtggggagtgcccaggtcccctgtgatccgatggccacgtttccctcctggcttcacgcaccccaagggctgggggtcccactcactgcccattttctggctgtggggggggtctgttttcttccaccttctcaaggtgttcagagcctcaggggcctccccacttcctctggggcctgggggagtagagtctgtcacccggaggctgtgtgcctccccgcgacattccccagtggccgggccgaccaggcaggctctgcctgtggatggggctgctgagcatgagcgtgtgacccccatttctgagctgtgggtggacccaccgggcctgggccaaggttttcaggaggcagctctattctactccgccatggtggcctccctgaaaggggtgagtgtagaagccagttccctcttctgcgagccccacccctaccccaggaggacaattcttgttcagggagggtctccccacccacttccccaccccacagtggcccacaggccccaccctagagagtacaaggggctccccaggctgctcactggcccagccccgccccacctggactgcacctgaaaatgggctcagagaggccaagtggcccaaaaagacgctgctgggtgggaaggggcggtggcctctgtgcccgcagtgcccctcctgcctcaagggtgttgtctgcctggcagagcctggggtgttcacaaagcccaggcacctgcagctgagggcaggggagagggaagggagccacatccaggcgacggggctgctcgtcctcctgtgcgagagtggggagactcaggccagcccaagtgggcggcggccccggttgcttgatctaagctctgctcacactgccctgcccttctgggagaggggtgggcgccaactgactcctgggctgtctgggctggggaccgggatctcagacccagcccctcccctggacaggaggagccagtccaggggacagagggctcagtggctggagggcagggccagggtgcggacacaagctgcaggtaccacagaagtttgctctgggagcccctcctgggcccatgtggccccaggctggcccaggacagaggcgtggggtgggagcagggggtcccatcctgagtcactgccctccacagacacagaccatggccttgccaacggctcgacccctgttggggtcctgtgggacccccgccctcggcagcctcctgttcctgctcttcagcctcggtgcgtacttgatggggctgctggtgaggtggggacggcccaggggccttgggggccaggcc

SEQ ID NO: 27329 - DNA, 1285 bp, Artificial sequence
  DNA replication origin
tctgctcacactgccctgcccttctgggagaggggtgggcgccaactgactcctgggctgtctgggctggggaccgggatctcagacccagcccctcccctggacaggaggagccagtccaggggacagagggctcagtggctggagggcagggccagggtgcggacacaagctgcaggtaccacagaagtttgctctgggagcccctcctgggcccatgtggccccaggctggcccaggacagaggcgtggggtgggagcagggggtcccatcctgagtcactgccctccacagacacagaccatggccttgccaacggctcgacccctgttggggtcctgtgggacccccgccctcggcagcctcctgttcctgctcttcagcctcggtgcgtacttgatggggctgctggtgaggtggggacggcccaggggccttgggggccaggcccccagcaaggctttgcctgcccctgccttctccctggagtgcctgtggtggccacgtctcagcagcagtctctgcccccagaggtgactggagctggagatccagccagggagtgatggggctcaggacacagtggggatgtctgtgggatgggtggtctgaccggccaagcagccgggtctcagggaaagatgtggaaggccgggctccctggtggagtcccgacccctgtgcctgggggactgtgatgtcacggggtacatgggcctgagccactggcttctctttggggtgtgcacagggctggctgtgggggcggccaggctctgcctccttcctcccctgggtcagggcacagcccagaggcccgccccctcccccaagctgtcccctctgcccctttaggatgggtgcagccctcgaggaccctggctggagagacagggcaggtaaggtcccctctggggaaacaggggagggtcttcaggtcccaggtgggggtgccatgctgtgttctctctgtcacgtatccacggtgcttgccagtttccacggtccttgcttgcaaaggggcacctggacctgcatgtgactggcctgggagcagccaggtccagggagcggcagagctgaaattgcagctgggtctgggaagtagatggatgagaagcagccaagcccatgggtctgagacacagccaggcctgggaagtagctgaactcggggagtacctggcccaggggtagcgggacctgggaactcctgctccagagagctggtctgagccatgttcagcaggccctgtgtccccaggaggctgcgcccctggacgg

SEQ ID NO: 27330 - DNA, 1611 bp, Artificial sequence
  DNA replication origin
gcagccccagagagggaagaggccaggccgtaccccctggctgtggaggggacgctgggggcattggcaggggtggtggcgggggtgactgaccctgggccttgaggcatggccgcaagtgtcctcacgctgctgataccacgccgccaggtgagccttcgaggttccagacaccttcacttacccgtaggggggtcccccgccctgcagagccgccctggctgcctcctgctggtcctggtccaggggtcccgggcagctcaccagccggggtagcagcacttcggccgactcggccacaaagcgcccaggcaggtcgcaagccaggcctcccagagcccgcacatcagcctcgctcagcagagacccccgcacaccctgcagagaggctggcctcagcgcttttggaactgccgagccctctccgccccgcgctggccccagcccctacccagcaggccagagccgcaggcagcagccgctgtcgctcgggagcccccctcgggagcaggtccacattggccttcgtgatgcgggagaagaaacgggtgcaggcctggggccccgagaacgcatctgggctgtgaagagagggtgctggggacaggccgcactgatcacacccgtccccaccctgagaggcagcccggccggcctccacatctctgctgtggcctgggatccgaggcaaggggcagggggttgggggctgagggctggcggcaaaagccgggggggtgggttcagggggcagggcctacttgaggaatagcagcaggtccaatgggagggcgtccaggtcctcggggggctcagagagccggtgagccagacagcgcagctgcaggggcagggagtccagcacagagcgtttcgagccgccactcacatggtgggccagggtcgcctggccagtctgcccaccacaacacacccctgccctggccacgagaatctgtggaagtggatctctggccgcctgcagcgctgccctgggggatgggggctcccgtgcctggctccgctccccttccccagatctcacccactcccccgaaaaagattcacccttggggcagagcctggagggctgcccacggcgctccaggagggggcccagcacacagcgtcatatcagacttgctcctggggagccagcccctgacgtggacaggcaccccagtggtcagcttgggtggccagaggaactctgggaagaactggccggggagagatggcagcagggacagaggggaccgtggtggcaaggtgggcactgcagagctgcctgtgaattcctcagccccagctgtgcccacctgcctcagcccaactgagactgacctgctctgttgagagcttgacattcttctgtgccaaggccacagccagctcccggacacgctccgtgctcaggccggacacctccgcacacgggaagccaaggagttggcgaggggagaggctgcaggaagggtcgggctgggcacccacgatcgcccctcccctgcaatgtccacccagtgctccccaagccccacagccccacctctccccaaaggaccctggtgctccctgcagacctccccccaagaccaggtgacgccctca

SEQ ID NO: 27331 - DNA, 1551 bp, Artificial sequence
  DNA replication origin
tggccaagtccatgctcacattctgctgactgagcgccttcaaatcctccgtgggggccccacctgcccgccgggagaggggcccgagctgaggcctcacctcacacccccaggcccttgaccacaggctgcaggaagcccacttgccttacagggcttccctttttccttagggattccagggcctgggtttgcctagccgcctgacccccaggcgtgggagaccctggaggtggctggcgccccgagctggggtcagaacccacagcccctaaggccatacacaccccggggggcagagggcgggtgaccacccagttaccctggcagcagacggcccggcgaggcaaaggcctggcacccccgagtggagtctgtgcttcccccgttgtgttgcccaccctggccagggactccctggctcacccaggaaggactggatcttcacgaagtattcggacccgttcatgttctggaaagcaaggcgggccttgggatagaggacgtccagctgccttgggtcacacgtgtccaggtcctggggcctgaccgccctggggacacggtgggtggacagtgagcgccagcacacggacccaccttgccgggcagagttctggggactcaccagatgctgctggggggcacggagctcagctcctcggggctgagggagcacaggtacccagggtagaaggcggtcagggtgtctagggtgtctttgtctagctggccccttcccttcacaaagcggtcgatcagggtggccacctgtgggaggggccgccgaggagccttgtggcaaggagagatgtatccctccaccaccagcataacctcaggccgtgcccctgaccccaggcccgcccaacctcaggctttgtcccccactctgcccctcagcccttcccaatctcatgccacatgacccccgagccggacggtcacctgaggactcatttcgtgccctttgttgacttcaagcaaagccttcagggtctccagggacgtcacattccacttgcgaatgtcctcagggctcatcttgaggaagaggtagcccaggtgctggatcacagactcggggtaaccttgtgggtagagctgcaggccaagagaccaggagggcccatgtcactcccagaggggctggggatggcttggacacagcaggccggtgggaacttgagtcatgaactacctcatccagtttatgctttaggacgtccagctgctcgtaggtgaaggggatggcgttcacgcggtccatctgggtggccagcagggccgcatccacgcaggcttccagctcccacttcttgtagaagatgaggctctcgtctatctcgcgggccttcttgcctgaaggacaggctgtctctgcagggcacaggggtcaggggtcagggccggagttcgtttgaccccttcttcctcccacacctcctgtgagatgagacctcgggccatttgtgaccctccctgtgcctcagtttacccactggcaaacagggattctgtccactctctgtgattataatgggatgtgct

SEQ ID NO: 27332 - DNA, 1322 bp, Artificial sequence
  DNA replication origin
cgtggaggggggagcgtggggggcgtggaggaggggcgcgtggaggggggagtgtgggggggcgtggaggaggaggggcgcatgggggggtgtggaggggggcgcgtggaggaggggcgcgtggaggggggagcgtggggggcgtggaggaggggcgcgtggaggggggcgcgtggggggggcgcatgggggggcgtggaggggggtgcgtggaggaggggcgcgtggaggaggaggggcgcatgggggggtgtggaggggggcgcgtggagggggcacgtggaggggtcgcgtggaggaggggcgcgtggagggggccgtgtgggggggcgtggaggggggcgcgtggaggaggaggggcgcatgggggggtgtggaggggggcgcgtggagggggcgcgtggaggaggggcacatggaggggggggcaagtggagaagccctggtggaggggcgcatggaggaggggccaacggggggtgggagggcgtgtaaggcgggtctgcagtggggcgaggccttaggaagggcagcatcttcccgtgtggtggggcctagggaagggcagccattgagctgaggtcagctggccggagacctccgaagtctggagaggctgcggtgggcatctgtgggtggggcagtttggacacaggagagcctggcagccctctggcggcgctgagggaaggagaccctccttgatggctgcccggggtctctggcagccgttgactgtggctgaggtgcagaaacttctgggaccccacgtggagggcctgaaggcggaggagcggcaccgcccggtgcgggactggatcctacggcagcggcaggacgacctggacacgctggggctggggctacagggcggcatccccaacggctacctggtcctagacctcagcatgcaaggtgggcggggcggccaggccagggctgggggcagagctgggggcgtggaggtgggcgctctgagtcacccctctctctgtagaggccctctcggggacgccctgcctcctaggacctggacctgttctcaccgtcctggcactgctcctagcctccaccctggcctgagggccccactcccttgctggccccagccctgctggggatccccgcctggccaggagcaggcacgggtggtccccgttccaccccaagagaactcgcgctcagtaaacgggaacatgccccctgcagacacgtcttgtggcctccgaggactttctgtgaccccaccagcgtggcccctctccctctggtcttgcgcccccaggccaggtgggggcccttggaggtcttcctgaccctgc

SEQ ID NO: 27333 - DNA, 1228 bp, Artificial sequence
  DNA replication origin
agagaactcgcgctcagtaaacgggaacatgccccctgcagacacgtcttgtggcctccgaggactttctgtgaccccaccagcgtggcccctctccctctggtcttgcgcccccaggccaggtgggggcccttggaggtcttcctgaccctgctgccactgtgctgagggccaggccagcactcagggtggccccaggagccggtggtgggagtcctgtgcccctgtccccacaggcttggccccggctaggacattcccgggcccccctgctcaggccctgagcacagacacaggcaggaccacgaccgtggactttattcatgtccagcagtgaagtctgtggccccggccccggccccggccccggccccagccccaaccccaaccccaaccccggccccggccccggccccggccccagccccagccccagccccagccccagccctccgcagggcccgggcagcgtcttccgtggcccgcctgggcctgtggttgtgcgggaggcaccttcttagggcctggtcctcagtccagctcccagggcctggaggcggggatgggtgggacggtctaggaggtggggcttgggtaggttggcctggcctagagctggcccgtcagcccaagtgggcgtccagctgaatctaacacctctgtttttcctgcacctgacccctgtgaacccagccaccctgaggcaacgctgtccacagaaaccaggatgcaagtcccccagtgcagcaggcacaggaggctgcaaggcagggccatcgccaggggcaggtaccccaggggggcccacaggctgcctgtagatggaacagggaggccaccatcagtcccaccagacgctacccccatatccaccccctagagccagacaggcctgggcagtccctccctctggctggggagggtggggacagccagcgaggacacccacctgcggctgctctcctgggacccaacaaaggtctcaaagtttcccctgctcccactttctgctggtcagtgggttttaggagaggcagctgtatctctaactcagtggtcaatgaagggtgaagcagggttggccagcctcatcccaggaggcaatggacaaagctggtggacaggcctgtgggagtggccacgaggcggggacgggtctgagagggccctgggcagagggggccaagccggaggggtgcgggggccatacctgaggtggaggcctggg

SEQ ID NO: 27334 - DNA, 841 bp, Artificial sequence
  DNA replication origin
atccaccccctagagccagacaggcctgggcagtccctccctctggctggggagggtggggacagccagcgaggacacccacctgcggctgctctcctgggacccaacaaaggtctcaaagtttcccctgctcccactttctgctggtcagtgggttttaggagaggcagctgtatctctaactcagtggtcaatgaagggtgaagcagggttggccagcctcatcccaggaggcaatggacaaagctggtggacaggcctgtgggagtggccacgaggcggggacgggtctgagagggccctgggcagagggggccaagccggaggggtgcgggggccatacctgaggtggaggcctgggcatcgttcgtgggcaggcccgaggtgtggaccagatggagcacttggtgggtggtgctggggggccccctggtgccgtgggctgggccagtggggctggtggggctggcgtccaggccgagctggcccagggtggagctgttgaggctgcgcagccaggccctgacggtggggtggctgcgggccttctgaaggtctcccacgttgtggcccagcagcgcagtcacgttgccaacatccaggctctgcggagaggggtggggcagaggggccgtggggccaacttctgggccaggggaagacccacagggtagggccagacccaggatggggcagatggcgggagtgaggcccagaaacggcctggaggagggaagtgggggtatgctggctgtgacctgtgacctaggggctcccctgcctgggacagccctgcacccccacccccacccccacccccacccccacggggtagcccagc

SEQ ID NO: 27335 - DNA, 1896 bp, Artificial sequence
  DNA replication origin
caacttctgggccaggggaagacccacagggtagggccagacccaggatggggcagatggcgggagtgaggcccagaaacggcctggaggagggaagtgggggtatgctggctgtgacctgtgacctaggggctcccctgcctgggacagccctgcacccccacccccacccccacccccacccccacggggtagcccagccccacctgcagctcgagggggttcaggctggtgaaggtgtcgatgtccatggagatgttggcgtgggccaggtgccgcagctcctccaccggggcgccgcctggggggacgggtgaggggggctgggctccaccaggggagccgcctggggggacggggtgaggggggctgggctccaccatgggagccgcctggggggatggggtgaggggggctgggctccaccagggaagctgcctggggggacggggtgaggggggtggggcttctgggggaggggtgcccacccatggacagggctcaccgaggtaggggcgcatgaggcggtagtaggcagctagggtcccgctgctgccgaaggtctcatgggccttggtgtagagcacgtccttccggctctgggggcaggaggagaggtccagggccccggccagcctgtgggaggcgggaggctgaggagttggtcgccagccccccacccttccaacgctgggcatggccctcccttcccaagccacagctttcctctcaccctctgtcctgggggaacagggtcccccaaattcacatccacccagaacctcagaatgtgaccttgttgggaaacagggtcattgcagatgggtaagatgaggtcagactggatcaggtgggccctaaaccaatgactggaggccttctaagaacagggaaagctgagggctgggtgcggtgctctcacctgtcatcccagcactctgggaggcctgggcaggtggatcacgaggtcaggagatcgagaccagcctggccaacatggtgaagccccgtctctactaaaaatacagaaattagctgggcgtggtgggcgcctgtagtcccagctacttgggacgctgaggcaggagaattgcttgaatccaggagacaagagagaggttgcagtgagccgagatcacgccacttaactccagcctaggtggcagagtgagactccatctcaaaaataagcaaacaaacaaaaaagggaaatctgaggctgggcgtggaggctcacgcctgtaaatcccagcactttgggaggctgaggcaagaggattgctctgaatccaggagtttgagaccagcctgggcaacatagtgagaccctgtctcttaaaaaaaaagaatacgaaatgtggacacagacgggggagagcgcagcgtgaggatggaggcagagctggggttgatgtatccataagcccaggggcgccaaaccttgtcagcaatgccagaagctggaggaggcaggaagggtcctccctgcagggttcagagggggcggggactgccagcaccctgatttcagacctctggcctccagaactgagagaatatatttatctttaaaattacccaatttggccaggtgcagtggctcacacctgttatcccagtgctttgggagaccgaggagggtgaatcgcttgaggtcaggagttccagaccagcctggccaacatggtgaaaactcatctttactaaaaatacaaaaattagccagacatggtggtgggtgcctataatcccagttactcgggaggctgaggtgggaggattgcttaagcccagggggcagaggtggcagtgagctgagatcgcgccactgcactccagcctgggtgacatagtgagactgcctcaaaaaataaataaataggccaggcgcggtgg

SEQ ID NO: 27336 - DNA, 2507 bp, Artificial sequence
  DNA replication origin
gtgcccctccctgcccggccacccggccacaggagtcctgggggccctcaaagccccaggggcatctcagggctgctgggaggtccggccccacccccagtcggcctgacagcctcacactcacctgtagcctgagccaggtgcgggaagccgactgccgggccttcatccgccgtgccgcccagggggacgtggagctgctgagccatctacccgaccagagggtcgccctgtggcgtgcggctgtggcctgcctggtgggcgctgggtggggtgggccggagcgtgtggggggtggctgtggcctgtctggtgggcgcctgggcaggatgggcccggtgcattggaggcagcctcccgctgggcgccgacctgctggccctgcagggggtggcccgcctgcgactcagcgcctccgaccagcaactgctcggggccctggtgtgtgacatggacgcgtccagcatcggtgccgcagacccccacatgctggagaacctgcggcgctgcccccggctgaccgctgcccagcgcattgcccttaactcactgctggccggtgggaagacctcgctcgggtgggtggggtcacagggctgggcaaggaggcggggacgagacgggaggcagcccggggtcggcccaagaggtcaccgatgtccgcagcccactgacatctgacctctggcctcagcctcactgggtcctgcggccgagggggcagagggttggggtgctgtcccgctggctgtggtgggggcatccctctcgtgggtgccagtcgggggctgggtggtcaagcacctactgggtgctcctccggcctgctgggtgtccacagaggggcaggggctcccagggcggggggcctgccctggacccaacactgcgccccattctgtgcacaaggccccctggctcctggacactggaggggctacaggccctggggcccctggccacatacatcagccctcacctgtgggcgcaggtgcaggaggtaggagggggccccggggtgggcacaagcgggccgtggcacggggacctgggccaccaacctcagcccacacctgccccgccaggccgtgggcctgggcttcttccgcagcgtggtggcttcgtgccaggtgggaaggctcggccagcgcgaggccaggtgcttcgtcaccagcttcctggagtccaagaccaaaccagtgtcctccaggcccaggctcagcacaggtcaggatggccactgaggcctgcgaccctgcacctcaccggtccagcttttccctcgggcctggctgacttcagagaagtagtttggacaagttcttggttagaactcagggaaagccaaggtctgaccaaggtcagaagtggaggggaaggggtcaaagagggggcctgggccgggcacggtggctcacacctgtaatcccagcactttgggaggccaaggcaggcacatcacttgaggtccatagttcgagaccagcctggccaacatggggaaaccccatctctactgaaaacacaaaaattagccgggcgtggtgcctcatgcctgtaatgccagctactcgggaggctgaggagtgagaatcgcttgaacctgggaggtggaggttgcaatgagccaagattgtgccactgcattccagcctgggcgacagagcgagactctgccttaaaaaaaaaaaaaaaaaaaaagggggctgggcacagtggctcaggcctgtaatcccagcactttgggaggccgaggcgggatgattcatttaaggtcaggagttcaagaccagcctggccgacacggtgaaaccccgtctctactagaaatacaaaaattagctggcatggtggcgcatacctgtaatcccagctactcgggaggctgaggcaggagaatcacttgaacccgggaggcagaggttgcagtgagctgagatcaatgccactgctctccagcctttggcaccctgctgctaggcaacagagcaagactctctcacaaaaaaaaaaaaaaaaaaaaaaaaggcgcccagagccagcagtggtggttggcccaggccccggttaccagcctggaccccacacaccccccagggggaccctgtgtctgaggcaacatcacggccgccacgctgcgggacgacctcttcctggtgcactacgactgtgcagagcttgagtcctgcctggatggctgcatcctcagaaccaacctggacaccctgttgcagcacctgctgcccactgagtgccagcatgtggtcaaggccaagctcgcacaggtgcacggctgggctgtggggacagggaggccggtgggcgcggcacctctgctgaccctgcctagccctgcccacctgctcagatctacccacaaggcctcccggaggatcagctgcggctcatcacctcgctggtctacctctactcccgcaccgagatcggccagtggagcatcacctcccaggacacggtcatggctctgctggcctccgacgtggccc

SEQ ID NO: 27337 - DNA, 2536 bp, Artificial sequence
  DNA replication origin
agccagcaggcaccacctcccctctgcctggcacggccgtaggtctcatttataatttggtatcttattgccacagtctttttttctcttttatttatttatttatttatttttttttttctttgagacaaagtctcgctctgtcgcccaggctggagttcagtgctgcgatctcggcttactgcaaactctgcctcccaggttcatgccattctcctgcctcagcttcctgagtagctggaactacaggcgcccgccaccacgctcggctaattttttctatttttagtagagacaaggtttcacgacgttagccaggatggtctcgatcttctgacctcgtgattcgcccacctcggcctcccaaagtgctgggattacaggcttgagccaccatgcccagcctatttatttatttttgagacagagtctcactctgtcacccaggctggagtgcagtggcacgatctcggctcactgcaacctctgcctcccggattcaaacaattctcctgcctcagcctcctcccagatagctgggattgcaggcgcgtgataccacgcccagctaatttttgaatttttaatacagacgaggtttcaccatgttgcccaggctggtctcaaactcctggcctcaagtgacccgcccgtctcggcctcacaaagtactgggattacagccatgagccaccgcacctggcctttctcttctttaaaacatataaaattttattatggtacttattttttgagataagatcgcactctattgtccagactggagagcagtggcaccatctcagctcattgcaacctcaactcccagattcaagccatcctcccacctcagcctccccagtagctgggacagttgtttttgtttttgttttttgagatggagtctctctctgtcacccaggctggagtgcagtggcacgatctcagctcactgcaacctctgtcttccgggttcaagtggttctcctgcctcagctttccaagtagctgagactacaggcggccgccaccacgcccagctaatatttttgtatttttactagagacgaggtttcaccatattgggcaggctggtctcagactggcctcaggtgatccgcccgcctcggcctcccaaactgctgggattacaggcatgagccacggcgtccggcctaactttgtgattctttttagaaacaggggtctcactatgttggccaggctggtctcgaactcctgagctccagtgatcagccctcctcagcctcccaaagtgctgggattacaggcatgggccaccacacctggcctgcttttggcctttcttttgataatcaaacaggctgaacattctgttccagctcacaggcgttctgggtgtttgtgggtaagagtttttcttcccctccctctcagccaggaggaccttgcgctgcaggaggctggcagcccctgctccattccccggggctcctttcaggctgcaggagggtccccgagcccccaccctgggtgggctcctcctcagggatgagaccctggtgagggccgcacaaaactctggggctgtccttgtctgcctcggagcccctcgccttatgcaccgtacgtcccaagggcttgcttgacataaaatcaggcaaagggccctctgagcaaagggctaaaaacccttgaaatgaccccaaaggccaggctagacaagcctaggcagggggcgctgaggctgggcagcgtgctgcataggctgagaggggcaagcagagcctcagggagcatggggtggggggtggaggccgggcctggcagagccccgatgccaggaggaggctgtcaggtggagccgaggggcaccacccagagtccacttgggaagctgccaaggggctgtgctggaggagacccccaaccccagcgtcgtggggcctccttggtggagacaggcaatcgtctacacccgcccagcatccggacgtgtgctttaacaccccgtcagtgaggaggcggctttggggctgggggcggccgtttggaggcctgttctgctgtgcggggttcccctccaggcagaggggcaggcacgggtggccgtggggatgacccgacatgtgggaaacggggccgagaagtgggtggggactggggcctgaggcctccgcagaggggaagggcgcccacgggctgccacggcgagtccagagtcacgagggagcgccgttctgcccagctcagctgcttggccaacctggcgtcacggtgcggcctccaggacgacttcacgctccacccacccaacctgctgctcttctacaagtgagtgcccctccctgcccggccacccggccacaggagtcctgggggccctcaaagccccaggggcatctcagggctgctgggaggtccggccccacccccagtcggcctgacagcctcacactcacctgtagcctgagccaggtgcgggaagccgactgccgggccttcatccgccgtgccgcccagggggacgtggagctgctgagccatctacccg

SEQ ID NO: 27338 - DNA, 1009 bp, Artificial sequence
  DNA replication origin
atcttgctggccctggggagaccacgtggtgaagtctcttctccggcaggcgtcaagcaggggttgccacagcccacacagaaatctgaccacggcctcctgggctgctggggcccggcccacccctctcagggagggtgaggcattgggcaaccctggcctcagagcccagccctgcctgtggccggactgcccgagagaacgctgtctccactcacccccacaccgtttccccagaagccatgtccagctgcctgggccaggagtggccccctctagccaaacttgcctgccctgcctcaccctcccaggacccccatgcctgctggggagggctgggctcacagtgccctggcagcccgacccccgtcctgctgctgctgggcagggcccaccttctccttccttggcttgggacagaccctcgctcaggagaatggggtggccagggccctgggcactcccatgtctacgggatggctttgccatgagggcctggcactctggaggccccctttctgcatggaggtctcgtctcacccactctggggcccacgtctgtgcggcggcgtgcactggtcatcctggctgagacgtcccagggcaggaaggtgctggggccaagggcagtgggtccaggactagctggagaggcgtgacagaggcgagacacaggtgagacacacaggttggccccgcactgcctcccaccccctggggtgtggagagggagggtgcagtctaggttcacccagggcagcggggccagagctgcgcctctcccaccttcgaggggaaaggatcccataaacagtaaaaggcaggagcagggagcgggagccgggtgaaaccctggggcctttcttattgcaggtcggggcctaggggacccatgggctgctgggtctccaatgaacagatttccaacaaacagcgagtcccccaggcagcctcgtgcagccctggcttcatccccacacccggcagccctggcagctccctttccctc

SEQ ID NO: 27339 - DNA, 1705 bp, Artificial sequence
  DNA replication origin
agacaaggaccaggaggaggcctggagataagccagccctgggggaggggaggccggggccaggtgcccgagggtggacacgtcccggggctggccagggaggagcctcgagagtgatgggcgtgctggccgggagggctttgctgccgcactctgttggggtggccgactggtgctacttgagggttatgcggtcccttcggatctgcaccagccccttcctttacagatgaggaaactgagtcatgggagcagcagcagtgagtccagggcctgtggcctcacctcagggactctggggctggaacccacgtctcggctgagggcacggtggcagctgcctccagtcgggccccggtggggactccgggtctggaacccgcgtctcggctgaggacacggtggcagctgcctccggtctgggccccggtggggactccgggtctggaacccgcatctcggctgagggcacggtggcagctgcctctggtccaggccctgctgctgtcaccgctggggtcgtaaccagggtttcagggctggccccggagctggacagtggcaggcaggggccaggcggacctgagaccaagtgctggcccatgagatgccccttccacagagctctgagacttgggctctacgaagatccctggctggaccagctgggtattcccatggctctggttgtgggggctgggggttgtccggggccggcccagggtctgtgcccaggccaaagctgcacggtgcttgctgtctgcaggagaggccgataggagcctggaccactgcgtctgtcctgggtcctgctggggcctcagggcagggaagagagctaggaaaggtctgggtggccagacctgtcccttggaagccccacttcggacacgttcacggtcatccttggagccagtcactgaacatttatttggagtccctggagccctgctgtagccaggagcccaggttgtggcatgggggacagaggaggtgggacctggcagacccacagctcccaagctggggtcccggaggcagagtgacaatgcatggctgtgtgggagccaggcaggcggtgacgtggcagagctgccagcaggggcccaagagactgcagcaggttggtgctcacagtggatctgagggatgggcgtgcgtggcagggccttggccatggcccctgaccaacccctgtgcaccaaacaccacactgagctcagaatccgggcagagagggaaccactggtacagtgaggccaaggcacacgcagccgggcctgcagactcgagcccagcagggaccattaggtctcgggaggaggcagctgagggcgacaggatctgcacagagcagtgaggggcagaggacgcagggaccagatgggtctcccaggccaggtgagcccagaacggcccttcccagcccctctagagggtaggttgggggcagtagctcaccaggcccaggagcagcccatcctggaggcaaagcctatcccaaaacctggccctgcctcttcctgaggtgaccttgagtccgtaaaactgacgcccctggggtgacgcttgagagccggaagctgttccaggaggagggaggggcctcggtttctcccggggcatgtgggcaggaaggccctcgggatcccgcatcagtcccacggccgcggtgcggtcgtcacctgtgatcacggctgcctgg

SEQ ID NO: 27340 - DNA, 1443 bp, Artificial sequence
  DNA replication origin
ggccggagccccacggtggcgtctgtggaggaaagtggctcagactctggactctgtcccactccaggttctgccaccagctggatttctccaccagcggggcgctgtgcgtggccctaaacaaggcagccgccggcagcgcgtacaggtgcttcaaggagcggcgcgtgaccaaggcttacctggcattggtaagacctggtcagtcctggggtggggcgtggggactcaggattcccaccccacttgggcagccctggctcagagcctcccaccacgctctacgtggttgcttggtgttaggtgggctccccggcagcactgggctgccccgtgaactgcgtgcgattctccctctcctgcagctgcgggggcacatccaggagagccgggtaaccatcagccatgccattggcaggaacagcacggagggccgggcccacaccatgtgcatcgagggctcgcagggtgtggcaggcagggacccaccgggcgggcatcgtgggttggggtgggcctgggcaggcagggacccaccgggcgggcatcgtgcgttggggtgggcctgggccccgggtcagtcccactaacctcacacctgccttctgcgccccaggttgtgagaacccaaagccaagcctcacagatctcgtggttctggaacacgggctgtacgcaggcgatcctgtctccaaagtgctgctgaagccgctcacgggtgtgtctggggtgggcggtgtcctggtggtgacagaagggaaactgaggcacagggccacgaagcttatgttgggccaccctgagcatcagggcagagctggcaacaagcactcctgcgttcttaactccacgccctgcagcctctcagcttctcacctgacacagggtccctgctggctcctgactgattccttgggggtctggctggcctagattctccaggaccgagcaccaccctggccctgtcctcaccagtggtgacctgaacacaatcttctgtcctaaatactgtcatcctcactcatggcaggggacagggagagttccaccccaagaggctgcttcaagactgcagcggggtcatgacgggaggtgggtcctggtcagggagataggtgtggatcggccccgctcccagcttgatccggcaccgccctcatcccgcaggccggacacaccagctgcgcgtgcactgcagtgccctgggccaccccgtggtgggcgacctgacctacggagaagtctcgggccgggaggaccggccgttcagaatgatgctgcacgctttctacctgcgcatccccacggacaccgagtgtgtggaggtctgcacgcctgaccccttcctgccctccctggatgcctgctggagcccccacacactgctgcagtcgctggaccagctcgtgcaggccttacgggccacccccgaccctgaccccg

SEQ ID NO: 27341 - DNA, 1459 bp, Artificial sequence
  DNA replication origin
gcgcactgcccgccccgagcgtgccgggcgccgccaatcagcagccggcgtgcccggcggcgcgcgccattggttggcgtggcggaggcggggctgcgcgaggggtgggcggggcgagttcctgctccgcagcccccgcgtcctgtcctggggagctcgccattggccgccgcagccgcccttccgcggcgggggcgggccgggggcgggccgggggggggggcggggctgcgcgcgcagcggtgcagggcggaagcgctgccaggcgtccggagcggagcttccagggtctctgggtcgccagcgcgcgggcgcgcggctggagccggcgccgggcacggcatcgggggcctggactgcacggcccggcagcaggttggtcttggcgtgggcgtgggcgcgggaggggctcggagccagggtcggcctgcccaccgggcctgtgcggggcgcgggtctgcgcggactgcggggagcgaggaggccccagccctaacccgcgctgcgggcagacctggctgccgggcctggtagtgctgcagcccctccccgcccccaccgtcgggcagaggcattcacgtgcatcccctggaggggagggtctgtggggaggatctgtggggcaggtttggaacgggctctttctccaggcttaggtcaggcagggcccttcaggtcagcccggagcaggctgactccttgactccccagctgacgccctggggactgatctcggggactgaggatgcaggtgcacagtagggctgcggacccggctcggtggcttcgcaccggagcccgggtggggcggtgcgggtacctctgtatgctgggctgggggcgcaccacgtgctcacagcacacgcacccacgcgtggctcggcaggccggccatggagccaggcagcgtggagaacctgtccatcgtgtaccggagccgcgacttcctggtggtcaacaagcactgggacgttcgcattgacagcaaggcgtggcgggagactctgaccctgcagaagcagctgcggtaccgctttcccgagctggccgaccctgacacctgctacgggttcaggtagggggggcggccggagccccacggtggcgtctgtggaggaaagtggctcagactctggactctgtcccactccaggttctgccaccagctggatttctccaccagcggggcgctgtgcgtggccctaaacaaggcagccgccggcagcgcgtacaggtgcttcaaggagcggcgcgtgaccaaggcttacctggcattggtaagacctggtcagtcctggggtggggcgtggggactcaggattcccaccccacttgggcagccctggctcagagcctcccaccacgctctacgtggttgcttggtgttaggtgggctccccggcagcactgggctgccccgtgaactgcgtgcgattctccctctcctgcagctgcgggg

SEQ ID NO: 27342 - DNA, 1638 bp, Artificial sequence
  DNA replication origin
ggcccaggttcttccatcttgggaacagaggaagccagccacacttgagtgagaacaagacctcacgtcatcactgagcagctccgtgtagtggcggggtgcaaactcatccacccagaggcagtgactggaggcgtcttgaccgtcagtcggctcctcctcaggggcccccaagggctgggctgcctcctcctcccccgacctgagactggagaggaccacgtcctgagccacaaacaactcgcagggaccatgccaacccacacgctaggagctaggagttggtgcaagagccaacaagggtccccagggcggaagggccaaccaagtcacctgtgcagggtgtctgaaagcttctgggcctcctgaagcagccgctcccgccgctgtgcaaacaacaggctggaatcaggagggctcaggcggccccgccaccgccccccagcaaacccgcagcccctacctcgccgtcgacctgcttcttcagggaggctaaggacacacccagcaggtccagctggccaccgcctcgccatgggacgtggaggagagagccctgtggggaagggaggacaattgcctctgggcccctcctaggtcacaggattcacgtcagcccccatcagtgctcagggacccgggtgggacaaccccagtaagctggccagtgaggggtgggagactggacaggggtgccaaaggaatgaagccatccagatgggtcagctgcaaagggaaattgggggcagctttaggagaaaggaggaaagggcaaaagcaggaggggaagcaaggaggccctctccacccgaggccatacaaacaggctggacagcaacctgctgtggggaggctgtgtcctctaagtctacgccccatgacgcagcctccccctctgcacccctggggctctgcacaggacccgctttaagcaaatggcaggggtgaggggctccaaggaccctttcctgagcagcactggcccacccaccgtgcaggaaggccacagccacgcacctgcacccccggggccatggggtcagcacgcagcaccagataagcccggacgccctccgtggatgtcacgtggacgtagtcctccaagatggggggccgcctcaggacgggattgcgggcagctggtgaggcccgtgtgagacccacgtcggcagcagcttctgagactctggagagagaccggggctcagtggcagaaactcaagcgtggggtcacccttggatatgggtgtccgagactgctctcagccatggaaccctccccaccccccaggcctcatccagggcacgggatgggctccatctgagtcccactggacagatgggatgggacgcccatgtccaagccacacacccgtggccccaaagctctgcgaggtcctcagggctcggcggcggggtgatgtccgtcggcgaggagtcgggagggggcggctcctccatctcctccgatctgaagttcagcctcttgaccacctgcagcctaggccgtttgatcctgggggctgggggagacacatgcagggaaccagaggcctcctcagcctcgcgcccactccggaggccctggggcaatgccgccaacctaccgtggggcagggacccggccggctgcaggtc

SEQ ID NO: 27343 - DNA, 1202 bp, Artificial sequence
  DNA replication origin
gtggccagagccgtgggggtggagcccctggtgtgagccttgcggtcactcgctggcaggaagacgggggtggccattcatcctgtggcttggcatcccatggggcatggggctcatggtggcaggtggactgtccgtgcctggaggcggtgccctcaggctgtgcttcccttcccgtccttcccgcagttcaccaaccgctgcctgctcaagtggctgaagttgtgggacctggtggtgtttggccacgagaggccttcccggaagcccaggcccagtgttgagccggcccgggtcagcaaggaggccacagccccaggcaagtggaagagccacgaacaggtgctggaggagatgctggaggctgggctggacccgagccagcgaccgaagcagaaggtgagccccgctggctgtgccgccgggaacaagcctgaggctttgcactcggcgccggcacccttgcagcctgttgactttctccaggagccgtgggtgtggtgacgtgtgggtcttggcgtgaagcgccattagcgtgagttagaactggagcgttgcagtaacaactcgggggaagtcgttgtccctgaagggctctgcggctggccaggatgatctgggtggacggtgggtggtttctgggggccagtcacactggtatcagctgtgttttgtctgcacgaactttgctttgtgtaggtttttttttccgttgccatcttggtgtgtgaaagtgctcaattttgttcttatttgatggctggagtggggtggagggagcgcccagcctgtgggacacatgtggcagtccctggctgctaggccgggagcgtcctgtaggtgcggtgcacactacgccttcatctacctgggctgcaggtggcactgctctgtgggcccccggggctggggaagaccaccctggcacacgtgattgcgcgtcacgcggggtactctgtggtggagatgaacgccaggtgagtgatgtgaggtccgtctctggctcgccttctgtcctgacgtgtttgagttctggtggcggacctgaaaccgggtgtggatgttcccgtcttgagggtggtgggggcctgggtgtgtgggccgggaaaacgtgtccttcctcggggttcacgggatcggcagcagccgcgtcatgtgacggtctccacgcaaatgcggcagccccggccttgggaggctgc

SEQ ID NO: 27344 - DNA, 1493 bp, Artificial sequence
  DNA replication origin
gcaggccttcctgctccacttcccgccgactctgccctcgaggctggtgcagcggctccaggaggtcggtggagccccaggagccgtgtggctgatggcggggttgggggcgtggcctcgttctggcccctgtttccctgcccctccccatggaaccctggtaacccctgaaaggatggggcataccatcgggccctccagcagcccttctccaccaggtctccctgcggcagggcatgagggccgacccaggggtgctggccgccctctgtgagaaaactgacaatgacatccgggcctgcatcaacaccctgcaggtgggcggccggcaggcaccgggtggggtggggtggggtcaggagttggccgcttctcatgcccccgccctatgtctagttcctgtacagccggggccagcgggagctgagcgtgcgggacgtgcaggccacacgcgtgggcctcaaggaccagcgcagagggctcttctcggtgtggcaggaggtcttccagctgcctcgagcccagaggtaggcggtggccacagcctcggcccagatgctcacggtgcccggacctcaggacgctagccctgtgtgcaggccagcactaccttcgaggcggggactcagtgtcctgagcccgcggttgcctggtccagcctccagggccctcctcagccttttcctggcttgttctcgcccctacagccttggggggtcagctagagaagcctccagggccccctgtgggaaggacacccccagtgtggtggggcctccagggcgtccctctccagggcgccccttgactcagctgctgtcccagttgcaccctcatttttgccacatttggcctgggctgtggtctctgagcccctgcctgcccacactgcttggcctcccgtgggcaggagcagccagcatgtctctgtcctgacgtgccatgggaccccaggggatgctggcctggtcgtgctgcaggatatgggagacgctggcctgggcctgtgggatgtgctgctcctggcctggacccggagggggactttccctggggtcccctaaccccagagggtcagggcagggctcctctcagagtggggctcctcggcttaagggaatgtttcagggggttgaggtccgggcgtgtctttggctgtctccacctgagcgaggcagcaagggccctgctgagaagaatgaagtgggtggcagctctgatggggcctctgagtgtcccggggagacgggtggggctgcctgtgcttttaacacgggtccatctagcttcagcaccccacctgcaggcgccgtgtgggccaggaccccgccctgcctgctgacacactcctgctgggtgacggggacgcgggctccctcacctccgcctcacagcgattctaccgtgtcctgcatgccgctgcctctgcgggcgagcacgagaaggtggtccaggtacctgtcttccaccaaaatgcctgcctggggccgcct

SEQ ID NO: 27345 - DNA, 1577 bp, Artificial sequence
  DNA replication origin
ttccctggggtcccctaaccccagagggtcagggcagggctcctctcagagtggggctcctcggcttaagggaatgtttcagggggttgaggtccgggcgtgtctttggctgtctccacctgagcgaggcagcaagggccctgctgagaagaatgaagtgggtggcagctctgatggggcctctgagtgtcccggggagacgggtggggctgcctgtgcttttaacacgggtccatctagcttcagcaccccacctgcaggcgccgtgtgggccaggaccccgccctgcctgctgacacactcctgctgggtgacggggacgcgggctccctcacctccgcctcacagcgattctaccgtgtcctgcatgccgctgcctctgcgggcgagcacgagaaggtggtccaggtacctgtcttccaccaaaatgcctgcctggggccgcctggctaggacctgggctgtgcccctgcccctgccggtcctcccgtatggacggggaggcgctttgggggtgctgagagaggcaggttcgggaaatggggtgccaggaagtctctgaggtggggagcaggagccaggagggtgggaggggctgcagggcacgggccggcaggcaaggaggtaggggcggccgtctgacgggggaggtcgctctggtggctgcttgggactctcagcgggttggggtggagcccctgccggacagcctggcctggggctgcgaggggctggattctggacttaagatgcacatggggtggagagcagtgcggtgagggcttcctgccgccctgcccgcgggagtccccgcctaagctgtctgctgactctaagcggctttggattagcagctggggatccacaaccaatccccaaatcccaaaagccgcgatgtggaggggcagcgtggagcagcggcggggatagactcccccacggaacaggggtggggacgccacggcctggactctggtgggcggaacttcctcaggcagtctaaggaggggctgagtgaggctggatccctttggttcctggaggcctcctggtgggtcaccccctcgtgtcagtctctgtcaagtcagtctctgtcaagctgtagcgaggatgctcagggtggaccctcccccgaccccttgggcccagtgaccccttgctggtgtgtgctgctgcctcagacgcccagcgtcgtggggacccttgtggagggtctgcgaagcctcgtggggcaggcggcaggcaggagtggagggtctgtggcgggaggtggagggtccgtggtggtgcaccttccctggggtgggcaggagctcaggggttgccggccgcctgcagggcttgtttgacaacttcctgcgtctgcggctgcgagactccagcctgggtgctgtgtgtgtggccctcgactggctggccttcgatgacctgctggcgggggctgctcatcacagccagagcttccagctgctgcgctacccacccttcctgcccgtggccttccatgtgctgtttgcttccagccacacacccaggatcaccttccccagcagccagcaggaggtgtgctcgtccct

SEQ ID NO: 27346 - DNA, 4672 bp, Artificial sequence
  DNA replication origin
ccagcctgggtgctgtgtgtgtggccctcgactggctggccttcgatgacctgctggcgggggctgctcatcacagccagagcttccagctgctgcgctacccacccttcctgcccgtggccttccatgtgctgtttgcttccagccacacacccaggatcaccttccccagcagccagcaggaggtgtgctcgtccctgcaccacgcctgcccccggccccgtgcccgcccccctgtgctgcccgtgtggctgcccccggccccgtgcccgcccccccaaacacactgcccgtgtggctgcccccggccccgtgcccgcccccccaaacacactgcccgtgtggctgcccccggccccgtgcccgcccccccaaacacactgcccgtgtggctgcccccggccccgtgcccgcccccctgtgctgcccgtgtggctgccctggccccacccaccattcccccctcgcccgggaggcccaggtgaccaggccttggctcaccccctgccccaggcccagaaccggatgagccagatgaggaacctgatccagacgctggtgtccggcatcgcgccagccacgcgcagccgggccacgccccaggccctgctcctcgatgccctctgcctgctcctggacattcttgcacccaagctccgccccgtgagtgccgtccccggggtgggggattccccgcctgctgccctcctgtcctaggtgagcacacatttgtacagcctgctcagctccctgtctgctgcctcccatcccctaggtgagcacacagctgtacagcacccgtgaaaagcaacagctggccagcctggtgggcacgatgctcgcttacagcctgacctaccgccaggagcgcacgcccgatggccagtacatctacaggctggagccgtgagtcccccagtgcctggggtgtgctccagggtcatgctccccggctgtgctccatgttcagggcccgcatggggccaggagtctgaaagcacggtcatggcgtctgggggtggcgggccccagcttatcttttgctcagatgtaaccgtgaaggggggtcacttccagctacttgagattggctctgggacctgagttttgctgcagagctgctcccagccttagcacccccacatggaactggagccgggggccccgagagtgactgcactttccaacactccgtttcccgctgtgggatggccatgggggtggtgggggtgaggcatggggcagtggccccggggtcctgctgccccagcgacggcaccaacttgcaggacgctgagtcactctccgtggcagccatcggcaggtttcatcatcatcccacgtacacttgcagttggggaaactgaggctcggggcagttaaacctggctgccgcagggttggggtgcggtggcaccaggactcagccccacattcctgctctggccttgtggcttttggggtttgcggttggagtgcccggcggctctctggccctgagcctggccccgctgacctgccctggtgtccccctgtgctgagcaggaacgtggaggaactctgccgcttccctgagctgcctgcccgcaagcccctcacctaccagacgaagcagctcatcgcccgcgagatcgaggtggagaagatgcggcgggcggaggcttctgcccgggtagagaacagcccccaggtgagcccacccaggctctggagcaggttgcagtctgggcgtgcaccatccccactgtatccctgtgtggccagatctcacaatgcctgctccctacaggtggatgggagccccccagggctcgagggtctgctggggggcattggggagaaaggggtgcaccgacctgccccacgcaaccatgagcagcggctggagcacatcatgaggcgagcggcccgggaggaacaggtgtggaatgggcagctgtgggggtgggaccagggtacatacctttgggggtgtggctagggcagtcatgaggcggggccaaggcacccatggggtggggccagggtacctttgtgggtgtggctagggcccctcatgaggcagggccagggtaccttcagggctgtggctagggcagtcatgaggcggggccagggtatctttaggggtggggccaaggcacccatggggtggggccagggtacctttgggggtggggctgagccacaggaggagtctggctgagggtggggctggctcagtgccctaaggggggctctgaaggaccagctccttaccctcagcatgaccagggttctacccaggcctcagtttcccatctgggcagaagagtggctgtattggctcttcttgattggcacctggtggggagcagatggcagtgaggggtgaggggcagctggcctgggccaggttccgaaaggtgtctcagaggtgttctggtccctcctccctgggaaggctctcggtcctcctgtcttgggtaggggctggatggggcatctgtcctatacgactgactagtccttcctcccatcagcctgagaaggacttctttggacgtgtggtcgtcaggagcacagcagtcccgagtgcaggtgtgtgtgggggtgttgtggggttgtggggggcctgggggttgtgggggggccttacagctgaggagcaaccctgtggccccgcaggggacacggccccggagcaggactcagtggagcggcgcatgggcacagcggtgggcaggagcgaggtctggttccgcttcaacgagggtgtctccaacgccgtgcggcgcagcctgtacatcagggacttgctctagttctctgagccgcggacatgccctcgcattgcttcccgcagagtgcagagacaggaagctggagatgtctttataaagtcacacctttacagactgtaatcacgtgcgagtggagtggggttcacaggatggtgggagtggggccgggcgtgggctcataggatggtgtgagtggggccaggagtggggctcacaggatggtgggagtggggccaggcgtggtctcacaggatagagtgagtggggccgggcgtggtctcacaggatggagtgaatggggccgggcacagtcttacaagatgttgtgagtggggccgggagtggggctcacaggttggtgtgagtggggctgggagtggggctcacaggatggagtgagtggggccgggagtggggctcacaggatggtgggagtggggctgggagtggggctcacaggatggtgggagtggggctggaagtggggctcacaggatggtgggagtggggctgggagtgggactcacaggatggagtgaatggggctgggcatagtcttacaagatggagtgagtggggccgggagtggggctcacaggttggtgtgagtggggccgggcatgggctcacaggatggtgggagtggggctgggagtgggactcacaggatggagtgagtggggctgggcacagtcttacaagatggtgggagtggggccgggcgtggtctcacaggatggtgtgagaggggccgggtgcggggctcacaggatggtgcatttgcccttttccacccatgggttgttcttcatcaggtcggggttcaggaaggggtccttggggatcccgtcctcgatccacttcagcagcctgcgggtgggcgggtggcaggtgagtggtggcacctgacccccgagggcctcctgctgcacctgcctgtcggcggcggtggtcgtggctatggaaatgagcagccagcgcagggcagacaaatgagaggcaaatcaggcaggtggggcactcactcggggatggtcttggacgccatctcccgctggaaggccagctggtacttgaggctctccacctctttcttcatctgtggcacgtcccactcctccatggggtcaggggcttctgaagcagccagcctggggctggagggcacaggaggaagccacagggccgaggccaccagcctgtagtccccacccccgctgctccccgcaggcctgagctgaaccccgcaggatgaagcggggagagtccacaccactgcctgggccagtcccctaggcgttgctagggtgcagggcacagagcgagttcccacaaggccccagctcccgcctcctgcactgggactaattaactgcaagaaactttacatcctcagctactcccccataggcccccacaccttacgaagatcccttgcaggcaggagaaagggtgctcagcacggcaggcccccagctcctaccctcccactgaggcccacgcaggctgacccagaccacggtgtgaggtgtggggcgaggtcctcaggaggtggcccctgccccgccccgctgtgtgcccctttgctttgcatggcagagcccagtccagagccaggactcctggacaggaatgttctgctgcagtttgcttctctggcaggtggggtgtgtgctcaggatcttgggggctcaggctatactacccgagtctgggatatgggctgtgggtggcccctgggtccccagtgtgtctgggaaccacacacgttacctgcgtgctttctgcttgtggccagcctgggaaagccacaggttgacacccctcagaactgccacaagttcgaggcaagtgggggtgggttgccccctgcctctccccctacccac

SEQ ID NO: 27347 - DNA, 882 bp, Artificial sequence
  DNA replication origin
ggtcagcccagccctgaggagggtgtgggggcggcgccagggcccaggtggcgggaggggcggggcacagccagggctctgcctggcggactcccggaacatcacttggccctcgctctcactcgcggtcgcctggccgttgtcattgtccctccgctgtcaccttttcaaggtaggtccgatgaacaggcgcccggggctagggagggcccggaggcccctcgactctcagctggcccaggtcagtcccctgggctcaccctaactcccggggcgagggcagctgccccgcaggcagcaaaacccaacccgagccggtgctgcaggcagggaggcggctctcgcggtgcgggggagctgtgtccatctgagcgccgtgcgccgcctgcagtgcccaccgagtcccgtggctgggggcgtccacggggtgcacggggtgggtggccaggcttggcggcagctgcgcgaaggtagggctgggcagcaaggactgggctgtgggcggggcgccaacaccccgggcctgggaggacccgcacgcagctagtcctgcgcccacggggctgagtgtagggtctccgagaaaaggcctgcaccggggatgggggcgggtaggggtgctggaactccagagtctccgggagggaatcctctgcatgaccctgatcactcccccagaaacctgcccccgctcgctccccggcctcccaccccactacgggcagaccctctgctggctgctgggagtctgcccaattcaccaccgggaccccaccagcctcaggccctgggcccctccctaggtggccggtgcagctgcacgaccaaaggatggggagactgttgggccaggagcccccttcacagccagaggcaggctcc

SEQ ID NO: 27348 - DNA, 1469 bp, Artificial sequence
  DNA replication origin
gtgtggaggacacgctgacttccctcagtccctgcaaacaaaactgcaagcgtggggcctggggaaataacgaaggcagctcctcaccaaagaaactcactccgcctagttaactggagctcacggcaacgacttttctgtcatctgtgaaagtttcaaagtgattttcaaaaacaattgaagctcttaaacccaagcacagaaaacacaacggaaaacttcaagggatggggtggggggaggggggagggatagcattaggggatatacctgatgttaaaagacgagtaaatgggtgcagcacaccaacatggcacatgtatacatatgtaacaaagctgcacgttgtgcacatgtaccctaaaacttaaagtataataaaaaaaaaaaacaacttcaagggagtcccgggtgcgtggctgtcatccacacctgacctccattgtgtagtcaggggcctgctgggggcttggccgtagccacgctcgcgctgcagcctcggggtagcgtgcctgccttagctcggtttactctgaacagctgcaggtcagtgcgtggttacagtcgccggaggtttcctacttaagagacgcccgtctcctgaaaagctaggtatgtctttgctaaccagaagcatggcctgaggcaggaggtcctggaaggacagaagcaggctgggcggtggatccccacaggctcggacgccctagctcctggcctgaggactggaggtcagtgtgtcaccaggagcaatgccagctgggctcccggggatggggtgctgcccccattcggaacttgagtgtgtttaaggggaaccgacgggcaaaataacagcctgctgggttcagaggcccccactgccggctccaccaaattacgctcttccaagagtaccagctcagaagtcgcagattttccaaaagagagacacatttgctcagccgagggtggtgggaggccttgaggcgagacctttccaaggtctgtgggggaagggaagggagagtgagtcgcgccttctgccccaggccaccctccggtgtgtcgtggtccctggggcggctttcctaggagcccgtgatccgcagggtggtggccagagccgtgcagcagcctgacagggcttctggctttgggagagtccctgcccacacagacggacacttgctttgggatgactaggctgggtgcagtggctcacacctgtcattccagcactttgggaagctgaggctagaggatcccttgagcctggaaggtggaggctgcagtgaactgtgatcatgccacagctcacaacagggagaccttgtctcaaaaaaaaaaagggatgacaaaggtcccgtgattttgcctaaggacacctagaagttaagacggtgtgttctggcctctggctgtccccacggcttcattcaaacatcccgggctgggtggccaccactgtaagtgcatcagggcccaag

SEQ ID NO: 27349 - DNA, 1731 bp, Artificial sequence
  DNA replication origin
gtcgcagccatcttggctcctggcagcggctgcccaggcctcggtcgtgggctgggcggccatgttggagtcgggcagggctctcatatccggtcactctccactggcgatgatcgattgcatttgacggacgcgacgctggtcgagagtcgctcgcgttgctcgacgttttctgcaactccaggaccgtaaaatatctcgaagacggcgaaagtcgcagacccctgcagaatcagatgatccagaaggatgcccgctgtctttttggtccatttcagttgtaaaccaagaagtagccgggacaggcctcggtgggcttcggagcgtggctcggcaaggtcgaggtcgcgcctggggggacaggtcgatgcctttctccagagatggttttgaggcctccgtatttaaagggggaaagcgggctgcggggtaaggaaggctccggtcctgtttctgagcccacggtgggaagagaaaaggaggggcggggggtggggggctggggtcgccgatgatgcgtccgcaagatgagggcaatggagagtgagatctgacctcgcgtctgtagttacctgcccaacaacacagggagaggcagtaacttgaccggctccgtcttcggcttcgttctgtccttttggcagcctgaattggggtcctgagcttttactttcacaccgtcctccacagtttcctaaatgggatctggaatgcttcttccctggcacgcctgtgagatctgaggcagaagccagtgtacagaaacaggtgtcgcatcagtaggcattctccagaggccgaccaatatattggagagacggattaatagacggatgatagtgggtttgtcaggggaattggcccatgcggttagggaggccgagaagtcccgggagggatgccatctgcaagccggagacctgggatgctggcagcctggctcggtccaagtcaggaaacggaagaaccaggggagctaaaggtgtgactcaggccagggctgaaagctgagaatccaaggagccgctggtgttaagtcctggagtcccaaggctgggggccctgtccaagggcaggaggaggaagagagagtcccagcgccaggaacaagagcagaacttcttttccctctttttttttttttttttgacagagtctcgctctgtctcctaggctagagacagaatgcagtgcagtggcacgacctcagctcactgcagcgttcacctcccaggttcaagcgagtctcctgcctcagtctgcagagtagctgggactacaggtgcatgccaccatgcctggcaatttgttttgtattttttaggagagatggggtatcaccatggccaggctagtcgcgaactcctgacctcaagtgatccgcctgcctcagcctcccaaagtgctgggattacaggcgtggaccatcgtgcccagcccctttttgttctatctgggcccccaggcgattgatggtatccgcccccatggagggtcttccccttggtcccccgacccccaggcaggctcctctggaaaccccctcgcagacacacccagaagcagcgccttatgaggtctctagggatcccttcacccagccaagtaggtgcttgagatgacccacggcaggtcggacatctccctcctcgtccactaggacagtgtctgatttgccctctttccctccctgcataagctgatccagagaattgtcacaagacagagtta

SEQ ID NO: 27350 - DNA, 1340 bp, Artificial sequence
  DNA replication origin
gctgcgggttccggggaaaggcggcctgaacgtgcattcccgtgagactgcctggaggggcgagctctgctgcggggcagggggtgcctgatgtgggctgaggcctgtgcagagaagccaagaggacacctggaccctccgccgagtccagccaccagagacccagagccccccacgaaagcagagcctcgggccgggccctgtggctcacgcctgtaatcccagcactatgggagcccgaggcgggaggatcacgaggtcaggagactgagaccatcctggctgacacggtgaaacctcatctctaataaatatacaaaaaattagccgggcgtggtggtgggcgcctgtagtcccagctactcgggaggctgaggcaggagaatggcgtgaacctgggaggcggagcttgcagtgagaggagatcgcaccactgcactccagcctgggtgacagagcgagactccgtctcaaaaaaaaaaaaaaaaaaaaaagaaagcacagcctctgctccctgctgaggaggccccaggccaggggaggggggctgccccacgtgttcccgctgggtagacccctgcccccacccacaacaaatggggcacagcaggtgtggagggggcagccttctgcacccctcctggtgctcagctctctcccgggacccctgcacctcccaagggcaccaggcctcccctggccccgtgccttgttggcttccaggcctgaccctacgtgacctcttctctggggttcccctcacctcctcccagtgccaggggagggacacgggtgcctacagggaaggtgacaggtcccttctagcctcgagaaaagtatggtaagccccggttgagggaccttctaggaaatcccgaccttcctcctcaaaaccgcccagaccaccaaaaccaagggaagtccaagaaatggccacagcccaggggggttcacagcccaggggtgctcaggcagccagacgggaactgtcccaggatggggaaaggcccctcggtgaaggccgaggactccggtaaactgcgtcgatcctggttcacgccagtgtggggtgtcacctccacgggaccctgcggggagggcacagatgggggctcggctctgtctcctcagtgtttcagaaaacccacagctgcccaaaagaaaacctgttatttgtttaaagtactaagattcctgtcatcccagcactttgcgaggccaaggcaggaggatcgcttgagaccagaagtttaagaccaccctaggcaacatactgagccctcgtctctatcaaaaaaaaaaaaaaaaaacattaaaaaattagccaggcacggtggtac

SEQ ID NO: 27351 - DNA, 1477 bp, Artificial sequence
  DNA replication origin
cgcctgtagtcccagccactcaggaggctgaggcaggagaatcacttgaactcgggaggcagaggttgcagtgagccgagatcacgccactgcactccagcctgggataaaaaagcgaaacagtctcaaaaaaaaaaaaaaaaaaaaaaaacggggaggtctggctcatgtcactcacccgcagctggagcacccccgaggagccccactcaacagtggcttctctgaagatgagccacagaagttcagttcctggggagcagggctggttctttcctgcttttaatgctataggaaacctcggctgctggggaggctgcgggcgaggggccgcagacaggccgagggtctgcaggaagccgcgagtcgacaggagagaggggatgagaggcgcgctgagcaaaggcggcgagaaacgctgccgtcacctcctgcccgggccccgtggggccgcccggccgccgccacgcagacgtggtgtgtaaaaccgtgggtcagcccgcgtctgctggtcgccggggagcagaggctcgttaagaccgtctgttaaaagccagcggcttccatcgtcactcagctaaaaacgtgtcagtggagagcggagccaaacgtgctttttctaggggaggaaacaggcttttcacacaccggctgtcgccaggaccaggtaggtgtgagggcctggcgggcgatggtgggtggcaaggggatggccggcagtggcgccaaagcgttgcgtcttgccagagcctccctcctcgcctcccggtcagatcctcaccctccctcgccaccgcgcgcctgcagccgcactcgcccctcccagccttggccggagcgtcctccaaggtgcggtgcgaggcagcagacagagtccccatgccagccaccctccccttctcgctccgtcttgccaggcgactccgagtcttcagcggcagaacgtggtcctcccttcggggtccctgagctgcaatgcagccgcttgaggctggggacggctccaaggagcccccagtcaccaagaagcagcctccagaaaggccgctgcgggttccggggaaaggcggcctgaacgtgcattcccgtgagactgcctggaggggcgagctctgctgcggggcagggggtgcctgatgtgggctgaggcctgtgcagagaagccaagaggacacctggaccctccgccgagtccagccaccagagacccagagccccccacgaaagcagagcctcgggccgggccctgtggctcacgcctgtaatcccagcactatgggagcccgaggcgggaggatcacgaggtcaggagactgagaccatcctggctgacacggtgaaacctcatctctaataaatatacaaaaaattagccgggcgtggtggtgggcgcctgtagtcccagctactcgggaggctgaggcaggagaatggcgtgaacctgggaggcggagcttgcagtgagaggagatcgcac

SEQ ID NO: 27352 - DNA, 662 bp, Artificial sequence
  DNA replication origin
accctgggtccatttcatcgcacaagtctcagtgtttgaatccagctttacaacaaccctgttgtaggcaggtgtctgcttttgaacaaactgttggttcaggtccccagtgccctgggcgcgtaaatctcagcacatttaatgcacctggcttccagcctctggcaggatttcgggatgcgtgagtgactcgtctgacctgggtccaggcacggaggccccagccataccctggaggccgagagttcatttcccctggctaggactgggccagacccctgcctggctgcccgcgccccaggcctgagctgggctgttccccgggcctgggacagacacccttccaggtcctgtctgctgcaaggttcctggagcacattctcccaggacacagtggggcaaagagagaaacagcagggtccccccaggacgcacgtccgggctccagtcgtcacgtgtgtggcatgaggggaggggtgtgttcctgtgcctggcagcgagtgtctgtgtatgcgcgtgtattgtgtgtgtgttgtgtctgcacacatgttgtgcgtgcattgcgtgccgttgcagccatgacataaggtgacacgtgcagcttccacagctaccctgagacctccagcacaacccggcagcagaggccggcccgtttcccg

SEQ ID NO: 27353 - DNA, 901 bp, Artificial sequence
  DNA replication origin
tggtccgatctcagctcactgcaacctccacctcctgggttcacgcaattctcctgcctcagcctcccgagtggctgggattacaggtgcccgccaccacgcccggctaactttttttgtatttttagtagagatggggttttgccatgttggccaggttggtctcgaactcctgacctcaggtgatccatctccttcggcctcccacagcactgggatgacaggtgtgagccaccacccccggccggtgttaactgattttaaagtgcacgcttgggcggcgttcagcacattgcagtgtcaggcggccctcacctctctctagtcctgaatgtcctcatcaccccaaaaggaaaccctgtctccatcagcactggctcaccaccctttcccaagcctgagagcctccacgactctctggcttggcctgttctggatgtttcgtagaaatgggatcagacactgtgtccctctgagcctccgtcgctcgaggtcctgcctcaggtttcatcccggtgtggtgtgtgctggggcctccttccttcttgtggctgagtggcgctctgtgtgtggccagcctgtgtgtggtttgtggctcatctgtgagtggatgccaggctgctgggctgctggcctgcatgtggttcgtggctcgtctgtgagtggacgctgggctgctgggctgctgggctgctgggctgctgggcgcagtgcgtgagatgctgtggttgtccatgcaccggctcttgttggacagaggtttttgtggtgcctggacgtgtacccaggagtggtgttgtgggaggtgttgtgggtggtgctgtgggcgttgtggcctcgggcgggatggcgtttggttcactgcgtttcccggccggcgtctccttctgtcatgaaatgc

SEQ ID NO: 27354 - DNA, 1101 bp, Artificial sequence
  DNA replication origin
cctggcagttggccagcgtggcactcacagaaaaggccagggcagcccctcagcccctttcctgaggccacaccgccctgagagcagggtgcgtgccctcagcagaagcaaggaccagggcctctcctcccggctggggcccgggattctgagacccatctctaaggccagggcagggccggggcgggggacgtttgttaaatttttaggaaaaaaaagcaaaatcaacacagaaacaaatggatgaacctgccaatgggtggggcctgtggactctgccccggccctgctcagggccctgtggcctcagctccttccctggtgagacacccaccctgccccatgccaccagtggtatgacgcaggggaggagcaagacggggaggggcttggggggaggggcgtgggggggtggagtgtgaggggggagggggtatgaggcaggggaggagcatgagggtggggagggggtggggtggtcagggtgtagggtgaaggcgtgagccacagtgcccggcctctctcttttttttagagctgggtctcactctgctgtccaggctgaagtacaggtaagatcgtggctcgctgtgctcaagtgatcctcctggcctagcctcccaaagtgctgggacaacaggtgtgagccactgcgcccccctccaggtttagctgtgggatgtttgggctttgaaaggagctgatctgacggagccaggagggctggctgcaggacagagacaggacggctgtcacagcagcctctgcccccagccggtgccctgtcctcgccgtctctgtccaggaggtcagagcagtagcacccgccccgccccgtccaccctgtggatcctcagcccatccgccaccccgccccgccccgctccgccccatccaccctgtggcagaggcttttcatggcagctccgagaacaggaggacagtcacctccagcatttgctctgagtctgttccctggcgaggtgaggccccagctgttttagcgctcataaaaatttacggccatcacaagggagctcagctgggtggatcacggtgtcggggcggcgcccctgtgagctaccttttgtgagccgctcc

SEQ ID NO: 27355 - DNA, 889 bp, Artificial sequence
  DNA replication origin
caggacggctgtcacagcagcctctgcccccagccggtgccctgtcctcgccgtctctgtccaggaggtcagagcagtagcacccgccccgccccgtccaccctgtggatcctcagcccatccgccaccccgccccgccccgctccgccccatccaccctgtggcagaggcttttcatggcagctccgagaacaggaggacagtcacctccagcatttgctctgagtctgttccctggcgaggtgaggccccagctgttttagcgctcataaaaatttacggccatcacaagggagctcagctgggtggatcacggtgtcggggcggcgcccctgtgagctaccttttgtgagccgctccggacactttggctccgggctggcatctcctgccaccctcatgagagcagtggctgcagcccccgcctcttgggctggccctgtcatggcagcaagggctctgcgtgtgtacggccgccccctgcaagtgtgcttgttaacggggactgtgaggaactgtgggggactcagggcacggggaaccggggtcgggctgaacattactccctactctgaaaggacagcgttgggacaatgtggccaggctgcgtgaggctgagtggggcagcatggccaggaggggcgaggggagggggtgcgaggcaggaggctggaagtagggagaaggggtgttccactcaccatcacccatcccaccaatctcgctcacaaatccctgtagtctgcagtggctgcctctttattcctggaacagtggcttgggttggggtctgcgtcttggatgggggagagcagggggctcatgcccgggagcccatggacaaaggcacctgctccatggtagagaaggttctgccccagcaaggggg

SEQ ID NO: 27356 - DNA, 1424 bp, Artificial sequence
  DNA replication origin
tcctgacttcaggtgatccgcctgccttggcctcccaaagtgctgggattacaggtgtgagccactgtacccggccagaaatgtcaaattttgatgaagtccaatttattttctgtgttgttgccggtgctgttgttgtcatatccaagaaaacactgccaaatccaatgtccttaagattttcccaggttttattctgagtcttacagttttagctcttacatttaggtgtttcatcctatgttttttgggttaatttttgtgtatgctgttaggtaaggggccagcttcattcattattttgcatgtggagataaagctttcccagtaccatttgctgaaaaggctgtcctcttcccattgaatggtctcagagcctttgtcggaaggtaccaggccacgtgtgggacaatttcttgggtcattctcatcggaaggtacctggttgttctcgttggaaggtgcctggttgttcttgtcggaagacacctggttgtcctcgttggaaggtacctggctgcgtgtgggacgatttcttgggtcgttgttgtcagaaggtacctggttgcatgtgtggaatgatttctcgggttgttctcatcggaaggtacctggttgttctcatcggaaggtactggttgttctcgttggaaggtatgtggccgtgtgtgggatgatttctcgggttgttctcattggaaggtacgtggctgcatgtgggacaatttctcgggtcattttcgtcggaaggtacctggttgttcttgtcggaaggtacctggtcgttctcgttggacggtacctggccgcgtgggggatgatttctgtggttgttgttgtcagaaggtacctggttgcatgtgtggaatgatttctcgggttgttcttgtcggaaggtacctagttctcgtcggaaggtatgtggccgtgtgtgggatgatttctcgggttgttgtcattggaaggtacgtggctgcgtgtgggacgatttctcgggctgttctcgtcagaggtacctggccgcatgcgtgggacgatttctcaggttgttctcattggaaggtacctggccacgtgtgtgggacgatttattgggttgttctcgtcggatggtacttggccacatgtgggacgatttctctggccgttctcgtcagaaggtacctagccgtgtgtaggacgatttctcgggttcttgtcggacggtacctggccgcatgtgggatgatttctcgggttgttctcatcggacagtacctggccgtgtgtgtgggacgatttctcgtgttgttctcattgggcggtacctggccgcatgtgggacgatttctcgggtggttactgtgccccgtttatctctaggtctccatgctgctgtgatactgttttgacgagggagctttcttttctgccactgtgggcca

SEQ ID NO: 27357 - DNA, 952 bp, Artificial sequence
  DNA replication origin
cgaggctgtcacaacccgacctcaggtcacctgtccgccccaggtgagtggacgtctctgggaacctggatccagagactggacccccaccattagggctcctctgcctgccagctgagggggtctccctgagcagggctggacactcacgggtcagagccaagggctccatggagtgggccctcgaggcccccagctgggtccaggggcccccctatttttgtgaccttggtggggtacccagaggtggtagcagacctgccttccacagtgacaggcccccgaggctggccgagatggggagggcagatcacaccatgactcccaccccgagcaccccttcagatgcccaggcctccgcccccaggggacttcctgaccacaggcatcggcctgacacgtgtcggggccactggccccattgccccacaccggcaggtgggaccctccgtcacacagaacacaggcagccgggggctgggcgtctcgcacagactctgtggagagttcagacgtgagggaagaagctgacatgcccgatgggagggctgaggcccgtgattccgtttatatgaagggtcccgaacagggacccacagaggcatgagatggattccctggggctagaggctctgtctggaagatggaaatgggctggatggaggggaggtggatgcacggcctcgggagcgcactccacaccacaaactgttcgcttaatgacggccctggtccacttcatgctgtgtgacttgaccccacatgccctgtgaccccacccccaggtcccctgggaagtcacagctgccatccccaacggaggatgagggtgtctgctccagggctcttgcaggcccttcccgtggtcccaggacagtgctgcggagtctctgggctgtgggtcccatgaacggggtgcccagtcactactgctgtgggctcctgccctgcc

SEQ ID NO: 27358 - DNA, 3365 bp, Artificial sequence
  DNA replication origin
cctgacactgaggccacagacacgggtcccatccacgcccggacccccgtgtccttccacaccctccccgaccttcggcctccttgtgtgatttcaagaacgtatgatttcaagaatgagtggaaccctgcggcacgtacccgcggggcaggcgattctcacgccaattctcaggttccgccaggtcgtgtgatggaggcttccttcctcctcgtcgctgaccggcgtctgcggcgtgagtgcaccctagtttgtgcggtcgctctcttgtggaaggacagctgagctctttgcagtttttgtctgtgacggctgccgtaaacctctgcacgggtttctgcgtgaacctgggtttcaactctctggcttaaacgtccatggaagcagctgctgagtccactgcaacttcgggtgtcctttttgaggagccattttaccctcccagcaacagccgagtgactcgatttcttggtatctttgccagcatgtggggttgttgctacttttattccagccgttttgatgggtgtgcagtggtgtcacgggacgggtgtgagtggtgtctcgggacgggtgtgagtggtgtcaccggacgggtgtgagtggtgtctcgggacgggtgtgagtggtgtcacgggacgggtgtgagtggtgtcacgggacgggtgtgagtggtgtctcgggacgggtgtgagtggtgtcacgggacgggtgtgagtgatgtcacgggacgggtgtgagtggtgtcacgggacgggtgtgagtggtgtcacgggacgggtgtgagtggtgtctcgggacgggtgtgcgtggtgtctcgggacgggtgtgcgtggtgtctcgggacgggtgtgcagtggtgtctcgggacgggtgtgcgtggtgtctcgggatgggtgtgcgtggtgtctcgggatgggtgtgagtggtgtctcgggatgggtgtgagtggtgtctcgggatgggtgtgcgtggtgtcacgggatgggtgtgcagtggtgtctcgggatgggtgtgcgtggtgtctcgggatgggtgtgcgtggtgtctcgggatgggtgtgcgtggtgtctcgggatgggtgtgcgtggtgtctcgggatgggtgtgagtggtgtctcgggatgggtgtgagtggtgtctcgggatgggtgtgcagtggtgtctcgggatgggtgtgagtggtgtctcgggatgggtgtgagtggtgtctcgggatgggtgtgagtggtgtcacgggatgggtgtgagtggtgtctcgggatgggtgtgcgtggtgtcacgggatgggtgtgagtggtgtctcgggatgggtgtgcgtggtgtcacgggatgggtgtgagtggtgtcacgggatgggtgtgcagtggtgtctcgggatgggtgtgcagtggtgtctcgggatgggtgtgcagtggtgtctcgggatgggtgtgagtggtgtctcgggacgggtgtgcagtggtgtctcgggacgggtgtgagtggtgtctcgggacgggtgtgagtggtgtcacgggacgggtgtgagtggtgtcacgggacgggtgtgagtggtgactcgggacgggtgtgcagtggtgactcgggacgggtgtgcgtggtgtctcgggacgggtgtgcagtggtgtctcgggacgggtgtgcagtggtgtctcgggacgggtgtgagtggtgtctcgggacgggtgtgagtggtgtctcgggacgggtgtgcagtggtgtctcgggacgggtgtgcagtggtgtctcgggacgggtgtgagtggtgtcacgggacgggtgtgagtggtgtcacgggacgggtgtgagtggtgtctcgggacgggtgtgagtggtgtctcgggacgggtgtgactggtgtcacgggacgggtgtgcagtggtgtcacgggacgggtgtgagtggtgtctcgggacgggtgtgagtggtgtcacgggacgggtgtgagtggtgtcacgggacgggtgtgagtggtgtctcgggacgggtgtgcagtggtgtctcgggacgggtgtgcagtggtgtcacgggacgggtgtgcagtggtgtcacgggacgggtgtgcagtggtgtcacgggacgggtgtgcagtggtgtcacgggacgcgtgtgcagtggtgtcacgggacgggtgtgagtgatgtcacgggacgggtgtgagtggtgtcacgggacgggtgtgagtggtgtctcgggacgggtgtgcagtgatgtctcgggacgggtgtgcactgatgtcacgggacgggtgtgcagtggtgtctcgggacgggtgtgagtggtgtctcgggacgggtgtgagtggtgtctcgggacgggtgtgcagtggtgtcacgggacgggtgtgcagtggtgtcacgggacgggtgtgagtggtgtctcgggacgggtgtgagtggtgtctcgggacgggtgtgcagtgttgtcacgggacgggtgtgcagtggtgtctcgggacgggtgtgcagtggtgtctcgggatgggtgtgcagtggtgtctcgggaggggtgtgcagtggtgtctcgggacgggtgtgagtggtgtcacgggacgggtgtgagtggtgtctcgggacgggtgtgagtggtgtctcgggacgggtgtgcagtgttgtcacgggacgggtgtgagtggtgtctcgggacgggtgtgcagtgatgtcacgggacgggtgtgcagtggtgtctcgggacgggtgtgcagtggtgtctcgggacgggtgtgcagtggtgtctcgggacgggtgtgcgtggtgtctcgggacgggtgtgcagtggtgtctcgggacgggtgtgcagtggtgtctcgggacgggtgtgcagtggtgtctcgggacgggtgtgcagtggtgtctcgggatgggtgtgagtggtgtctcgggatgggtgtgcagtgatgtcacgagatgggtgtgagtggtgtctcgggatgggtgtgagtggtgtcacgggatgggtgtgcagtggtgtctcgggatgggtgtgagtggtgtctcgggatgggtgtgcagtggtgtcacgggatcggtgtgagtggtgtcacgggatgggtgtgcagtgatggtaccggatgggtgtgcagtggtgttatggtggtttttgcttctctaatgacaggcatttctcctgagcttatctgtcatctgtgcaccttctttggtgaaacgtctctgtgctcattttctaataagattattttagtattaagttatgaaacttctttacatattccagattttagactattgtcagatacgtgacttgcaaatattttctgtctgtagcttaaaaattatctttgttctcttaacaggtctttttatggagcaaatgcttttaattttaatgaatttcaattaattt

SEQ ID NO: 27359 - DNA, 1587 bp, Artificial sequence
  DNA replication origin
cggcggttgcatcacgctgtgaacgtgctggaggcccccgagttcacttcaaaagcatgaacttactttgcgttatctgtgttgtttcatcacaaccgaaacacagctaagggccggtgagcccagctctgggacagagcctcaggacagccggcctgtgtgtgcggggctggcagggcctccgggcctctgtcttgagcgggcgtggggtgcagccaccacagggcaaggagccctttgggcagggcggggtggggtggggccggacagcccgctgtgggcaggcgcctcagaggttccagacctgagctcaccccctgcccctcccgccctggcagtccggggctgcgtctccctgtcaccagtgccctagtggaggctgatggctcccgtggggtgctggctgggcggccgggctctgcggtcactgctcttgtgcacctctccaggcaggcagcggccccagggccccgcggaaccctccggaacagctgtgtaaactgcgtgggaggagggaggctgctcatgccgcaactccccaacggaaggatcacgggaaccaggacaggctccgggggacggtgctcagatgggaacacacggaaccaggacgggatccggggaggcggcgctcagatgggaacacacggaaccaggacaggctccaggcaggcggcgctcagaagtctcagggcactcggctgtcacagcgcggcacaggggagtacgcagccccagccaggacactacaatgttagagggcgcgggtcactctcagccccacaccatatcatcccccagacaccctctgccctgtacgcctgtgggggcaaaagccctagttcaagaccccacactgcctgtgagggggcaggatacatcgcagccgggactgccggccgaccatcttgtcttccaaggggggacgccaggccacgccgcagagcacagccacgaccctggtgcttccacctcgtcctggacacagtgtggggctggagaggatgacgcagcctgacctccgaggcctggaagggaggcgctgcctgtgccgggtctttgagggtggtgctcacagtcccaggtgcagtgaggcccagctctgtcccctcccctttcagcatccccactgtccaccgccactcaccccaccaggcagcggactccaaaacggggccagcaccggcactaagggaacccgcagcctggccgtcatgcttgggagggtccctgtctgcctgcaccagggcccgttggtccaattctcatctaaccccctggccaggttcctgcgttctgaataaacaaggacgtttttgaggcctctggttcaagggtcacctccccattccatgtcacggtagctcagccctcaagtgactcccactttctccatttacttaagtaactcagcaccttgcttttcatgagagcttctcccaggcagcatcagcttatcgggagaggggcagtggtggaactggccagcacagcctgagggagggacgctacagggtacacgggccatggaagcgggaggtgggatcctgagcactccccactgccaggcagccacggagccaagca

SEQ ID NO: 27360 - DNA, 1180 bp, Artificial sequence
  DNA replication origin
gacccgagcctggcgtgggcatctctgtgttctccaccggcaggggcaggcgggaccctggggcagcacagcccacgcaggaggtgtgtggggtcggggtgactcccgggagtctccagcccggccctcctccagcagctgggaccccaggaccgcatggctgaagacggctcaggagtcacccgtgtgtgtggccccacccaggtcaggaatcctggaacacacccctccattcaggctggacacccctccctgggtggcagtgggacccggggctggcacagccggccctggccccacgcctgtgctcagcacaaccctccttgtgcgccctgtgggaagcacatgtgcccggggctccgtctgttgcccttcagaggctgagtggagaaacaaaccggggcacgtgcggaccacgggcgtctcggaaccgaagagaaacaagcagtggagcctgcaggaggtgcaggagcccacgcgcggccgcggagggcaggaagccagtccgcaaaggctgcacaatgcttcccactctaggatgtccggaagaggcagtaccgtggagacggagggtcggcggggcacagagaacttccagggccacaagcgactctgcatgaagctgtgatggggacacgtgtcgtcgtccgtttgtcggagctcacagaatgagcaacactgcgaatggctctcctgtcagccgggactttagttggcaacagtttatcagtcctgcctatcaactatacaaggtcctggccgatgcaagacgctgagcgcagggaaactgggagggggggataagggaacctttgtagtctctgcacagtttttccgaaaatctaaaagtgttctaaaataagtcaattaataaaacgaaacagagctgaaacactggagcaaaggacgcaagtggcttggggcggacagaggcaggctgggtgggctgaggaccttggacagaggcgggctgggcgggctgaggacctcggggggtcatggtggcaaagatgctgcccaaactgagaccttcagtaagttaacatggctgattgattgataaccactgaggaaacagaggatcttccttatccattagaggagggaaaataacagaaaaaaacgagagagaaagatacaaagaacaaagagaaaaacacaaagatgtggaaatacgtcc

SEQ ID NO: 27361 - DNA, 917 bp, Artificial sequence
  DNA replication origin
ggggaggcagcccctcacccacatggaggcaaatgaccctggcctctctcagaccctggttccccgtggactgacatgaacacttgaaaggaaacctctagaatggaagaatcttaggagtggatcccaggaatgtgggggtgtccacacagggccttggcgtgctgaccccgtcccactgccgagcccaggacatggccgggcctctcgcagctgcaggaaacgctcttgggaggagccagtccttggaggaagcctgggaaggagaccctcagcctgcagcccgggacagggctgcagtggggcccgtgacacaaacgaaggctggggaggacaggctgtccccaagaaagggggcctgtaatgccccagggtcctcccagagagcggggcagccagaaatagggcgacgggccagcgtctctgtggacacggggcagggcgggcggcgcgggctcacctggaacaggatctgcagcaccccgtggatgatgcacgcccgccggccgaggaagaggaagaagggcaccaggagctcgatgaagtggttgctgagcgtctcgaagcgatggaaccaccagggtgagtggtgcaggtagtacgccacaggattgggcatcggctgggtctgcagggacaggaggggccgtgaggtgcctggccgatctcggggggcggggctagggagaggcttgtgggtccctggccccctgaccccggctcctactgcacacaggatccccccggcccgcctggccctgcacacgtggagcccacctgccacgctaagaggggccaagagacattcagggagcttttgaagcaaaagcaaagtgttcatttttgtcttaaaatctttaccatctaaaagcaaagaatacacaccccagctgaaggagagacgacacctgtaaacc

SEQ ID NO: 27362 - DNA, 2016 bp, Artificial sequence
  DNA replication origin
cctagaattctatacccaacaacaatctctttcaaaaatgaaggtgaaataaagactttgtcagacattgacaagctgaaagaacttgtcaccagcaaacctatgctagaagaaatgtcaagtctgttaggtggagggagaatgatcacagatggaaacctggatctccacgcaggagtgaagagctctggaagtggtgatgttaggtggagggagaatgatcacggatggaagcctagatctccacgcaggagtgaagagctctggaaatggtgatgttaggtggagggagaatgatcacggatggaaacctcggtctccacgcaggagtgaagagctctggaaatggtgatgttaggtggagggagaatgatcacggatggaagcctggatctccacgtaggagtgaagagctctggaaatggtgatattaggtagagggagaatgatcacggatggaagcctggatctccacgcaggagtgaagagctctggaaatggtgatgttaggtggagggagaatgatcacagatggaaaaaagagctccggaaatggtaagtatatggatacacaatgaggctgttcttccaattgaatgaaatgtctctgaaagataactggactgtttaatcaaactgtttggcaataatagcaaaaggccaggagaggaaaatactgttgggagaatattgttgtaaaattctttcagcatttatgagataggcatagtataccttgaaggtgagctgtgatggattaaaggcatatactataaaccctaaaaccaccacacaaataagacaaaaaagttacagccaagaaagaaaataaaaaggagtcacaaaaatattcaattaatccagaggaaggtgtaaaataacagcaacaaaaaggaacagagaacacatgggaggatcagaaaacaaatcgcaagacaacaggctgaaaccttccccaggaaagactgcattggatgcaaacggcccagacacccagataaagggcaggacttgtcagactggatttaaacataagacccaagcatacgccagctctaagagatccgcttcaaacacaaagacacacacaggcggaaaggtaaaggacggaaaaacataccatacaaacacgagcgacgagaaggctggactggccaccgtcacaccagacaaagcacaattcagagcagagaatatgatcagcagtcaggaggccatttcacaatgttcatcaggaggtcagaagactctcaaacacgtatgtgcctgataatagagcttcaaaagacatgaagcaaaaacggatagaaatgtaagcagacatagagaaatccataattatagttggagatctcaatctcccttatctcaataattgataaaacaggcagaaaatgaggacgtacagaagagttgaaaaacactattggccaatttgatctaatgaatcctgacagaacactgtctgttcatttttggctcaaacggaactttcactaagacaaaccatattctgggctacagaacaaatctgactaaattttaaaagactcaaggcatatcaagtatattctgacaataaaggaattaaattagaaaccagtaacagaaagatatctggaaaatccccgtctctttggagcctttaaggaactttcattccagtgcatgttacgacatttgattctcacaaccgccgtagggtagtgggtgatcagtttaaagctggaaagacagaacttgctcaggatcacacaagccagtaaggggcgcatggaggatgggcagcacagggctgcataacaacagggctcagatgcaggcgctgctgtccttggctgcgtgggtagaacagccgtgagcactgctgaccttgaggcgccacccctgtctcccccagccacggcttgtccctggcaagaggaccccaggacaagcgggaaatccaggcccacggaaggtcggtgtctcctcaggcctgcactcgcccagtgggctgctctgctgagtgatgcc

SEQ ID NO: 27363 - DNA, 935 bp, Artificial sequence
  DNA replication origin
ccgtgtccaggtaacgatggagccacagttccgtgtggcaggggctgggcacgcagccaggaagcccccaacaggcacctgtcaggggacggtggggagctgtggactccaggaaggaggggccggcccggaggcctgggcaggaccaaggacagcagcggagggtgcccgtgcaggaaccagagcaaaccagctgcactcgagaccatggagggccacagaccccgtccccgcagccccagcaagcccccgtgtgaccacccaccccgtgaagggagggagaggacgtcctgaatcaatgggggtgaccctgtgatgcgacagctcaccagggtgtgcaggactgagccccgccaagagtgggaacggggcggcgtgagaccgggtgccctgccctcacgctgcacggcacgctcacctcatagtggaagtccatgcaggtgaggtctcgccagcaccggtccccccggatcttgatcaggccctgcaaggaagagagcagagggagagtcagtcacaggggctggggatgcggcggccccgacagaaacagcttcccaggaagacgaaccatccacgaaggccgtggatctgggctgcaggcgctgtgagggaggggaccttacgtatgaaacactcaggaaggcagaatttgagaagggcagattcagggctgctttgaggacaggagtttagtgcacaccgcgggcgtgagcaacagtggcttcctttgcgccttccccaacactcattctcagagctccacgcatcatcacgctacagaagttgcgtgtctttaaagaggacaaatgcaccacgccctgcacagaccccacggacagtgtcagagggaagcttctcagtgcctccaggatgagcccaaagtcggagggagcacccagtgcacacgcgtctcagccccgccccctgcggca

SEQ ID NO: 27364 - DNA, 1390 bp, Artificial sequence
  DNA replication origin
atccccaccccgccccggggctccctgcccaggacagccctgtcagctctgtccgggccgaggctggcctccgctgtgaacagatcgtgttccccgaattccatttcgtgtggaaaccctgagcccagtgtcatggtaccaggagccaggcccgacaccccagcacgcccacggaggggagcactcgctgatgggaggcggccattacgaaagtgtccccagagagaccctcaccctcttcccaccgtgtgggcaacagtgagacagcgctacctgcagcccagtgcggctgccccagagcccaccatgctacacccaccacagccatcgcctccgaacctgcagcatggattcctgtcctttatgtgccactgcgtctgccacgactggtggccgtccttcctctctgcgccttgtcgcacctgcgcctgcagcatgcggcctctatggggtggagcagggcccggcacctcaagggcactcagtacttatgtgccaggtagaagtcgggtggacagggggatgggtgggcggacggccaggtggacaggggatgagtcgacggacggtccagtggacaggggacaggtgggcggatggccaggtggacggggggacaggtgggcggacggtccggtggacagggggacgggtgggtggacgatccggtggacaggggatgggtgggcgcactgccaggtggacagggggacaggtgggcggacggtccagtggacagggggacgggtgggcggacagtccagtggacagggggacgggtgggcggacagtccagtggacagggggacgggtgggcggacggtccggtggacaggggacgggtgggcagacggtccggtggacaggggcatgggtgggcggacggcccggtggacagggggacgggtgggcggatggtctggtggacaggggacgagtgggcagacggcccggtggacagggggacgggtgggtggacagtggggtggacaggtggatggagcccaggggatttggccgggagtggttgtgcagcagaaacccctgtcatggaggaggcgggactcacttccacatctgtgcagtttcacctcccatgcaccagtgtgtgagagacgctggatgtgaatctgtgtctcagcggtgattttagggttagcgggaagaggggacagtttgtttctgacttgtgaaggaatcatctgaagccgggagtgacccagggaaagcagacgggtgtgggagccgacccttccccagatgcttcactgtggccctggcactgcagaaccaacccccagccccgcagcctctctgcccaagtcccaccttccccagtgctggcggctccctctgcaggcccctggaagcctgtcccgtgccccaggag

SEQ ID NO: 27365 - DNA, 763 bp, Artificial sequence
  DNA replication origin
acagcccgtgatgggctgacctggggaggaggattctactgggagcccgaggctgacccgaccaggcaggagaccgaggctggagctggggctccctggagaggaggaaattccatcccaacagcagctccggcccctgctctggaggtcctgatggccccggcaggcctcaggccgcaccccccgccgtctggaggccagtctcccgcagtgggaccgcgactggcgccgtggcagatgggaccctgcgttccaggggctcctgggcctccccccgcggcctcctcagccctgctgtaccccacgcttctgcctgaggggggcgccctcaccctgtcttcctccctcgtggccatccccaccccgccccggggctccctgcccaggacagccctgtcagctctgtccgggccgaggctggcctccgctgtgaacagatcgtgttccccgaattccatttcgtgtggaaaccctgagcccagtgtcatggtaccaggagccaggcccgacaccccagcacgcccacggaggggagcactcgctgatgggaggcggccattacgaaagtgtccccagagagaccctcaccctcttcccaccgtgtgggcaacagtgagacagcgctacctgcagcccagtgcggctgccccagagcccaccatgctacacccaccacagccatcgcctccgaacctgcagcatggattcctgtcctttatgtgccactgcgtctgccacgactggtggccgtccttcctctctg

SEQ ID NO: 27366 - DNA, 1382 bp, Artificial sequence
  DNA replication origin
caacatcgacacgcaaggtcaggtctgcaggagtgggagctctggcgtgggacccagggcctaggtcgggacttcctgtgacctcggcacccttcgccctggagggaaaggccccgctctgaggtccgccacctgccaccctgcaggacgctgcacggacctgacatctgagaatgcgccctgcacacatgctgccggcagactttgggggaagcttttcccctcccataggtttgcatgaaaacagctttcaccttcttcccagcccagaaacagcatggggaggcagcactggggaggcagcactgggggggcagcactgggggggcagcacttgggggaggcagcactgggggggcagcactgggggggcagcactgggggggcagcacttgggggggcagcactggggaggcagcaatgggggggcagcactgggggggcagcactgggggagcagcactgggggagcagcactggggaggcagcactggggaggcagcccagcctccatgtgaggcagtgtctccctctggccctgtccttcccagatgggcatggaagccaggcaaggatgcagaggcaggtcatggtgggtccacacggaaccaacaccggtcagcccctcgcagtcccaggataaggcagcagctccgccactggatgcgggggacacgtgggggcccaacggattcttcgcactggaaacccagcataagaatgcggatgcgggtcgccattccagtgctattctcagaggtgaggccaccgtgaatgtggctgctggaaactgcccacagctcgcgtctgtcaatggaaggtcacatcccagggccccagagaccccacaggccgggctccctcctgggctctgaggatgctggatgggacagaggccacccgctgcccagcatgacaacgatcacatgactcacaccaccacagtgtctatgcgccacagagcggatgggagagtgcggaggggatgcagacagagactcgcaggggcagcatctacacaccacagagcagatgggagagtgcggaggggaagcggacggaggcttgtgggggcagtgtctacctgccacagagaggacgggagagtgcagaggggaagcagacggaggctcgcggggagcttcctccaaccattggtgcaactcatctctacctgagatactacggtaaagtcaaaagcccgtgaagaggctgctacagcagcactggactgtaacccaaagtacaaaataaacgcctgcaagtccacactgatgtgcgccaattactgaataagcagatcggcgtgagtggaggcagcgcgaccctggtctctgaatggacagacggtcagtccttatgctgccccggcttatggaggg

SEQ ID NO: 27367 - DNA, 1038 bp, Artificial sequence
  DNA replication origin
accctgtggtctctgcctgccctctgcccccatcctgtgcctggctcctctggtgtttcagacccatccatacccatgcctcacacctatgcacacagggcctgcccagcctgaatgtccccagagtcatcccttggtcgccccttggctctgcagaggcggatctagggtgagtttttctttagctgtttttaaatcagtggtattaaaacaagtagcccaggaccctgccatctaggaagcgagcacgagatggtgaaaaccctacaagccctcaggcctcgggggatgcccctcctgggccagccgagcaggcagcagcgaggccggagtccttagagacgccgatttagggctgagagctgtgtggccctctgcgtcagtcactacggaacattactgattagcactcggatatttagttcagagaaaccacgtttccatctgattccaaggcagtaaaattttgtcaccaatggtcatgggagagagggagatggtcatgggaagggagggagggagtgtgtcaccagtggtcatgggaagggagggagggagggaatgtgtcaccaatagtcatggggagggagggagagtgtcaccaatggtcgtgggagggagtgtgtcaccaatggtcatgggagggagggagtgtgtcaccaatggtcatgaggagggagggagtgtgtcaccaatggtcatggggagggagggagtgtgtcaccagtggtcatgggaagggagggaaagagggagtgtgtcaccagtggtcatgggaaggagggagggagtgtgtcaccaatggtcatggaagggagggagggagcgtgtctggttttgcacttggagagctggagcgatcacggggctcagggcccacagcggtgtgcgttctctcgtggaccctacgagtgagcatccggtctgtgtcctgcagagcaggaaggtcgggtgtggggagcctccccgggtcttggcctgcccagccttctccccatttgggtcagggctgtcttcacagggtgctggaagggtttg

SEQ ID NO: 27368 - DNA, 926 bp, Artificial sequence
  DNA replication origin
cagccaagctcctaggcacctgctccccaaataaaacccaggcagaggtgcgtgctcacctttcttttctatttatgggaatcagaggttgaggagggaccctctgccactgaagaaccagaagattctccaccaagaggcgagatctgcgcctggcggcctggggcatgtgggaacatgtggaggggcacctggcggctgctctgggctgggctgggcagccggcagcacactcatgcaccaccagccttggcgaccccagtcagaggatggagggtcccaggccagcctagggacagggtgcagtgctggccaggcagagtgctggggtggagcctgagatggggttttccggacggaagtcctggaggccagcagccgtgtgggacgagagacacgcagggtggggcgactgcggtgcctcaggcgggtgagatgagcaccatcaccgggggccggagcaggtgagatgcaggggccggagcacgtgggacgcgggggccggagcaggtgagacttgggggcctggggcaggtgagactcagcagctggggcaggtgacacccaggcgctgcctggccaccagtgaggggcagaggctcggagggtgcagaaggtgtgcagggtgggggcagccctcaggacacagggagggacacggggtagcctccggcaaagggagggatgaggggccagtgggttgtgggctgagccgcctctgaccaaggaagaaacgtgatttaacacaacgctttggaggtgcaagtcattgcaatggccactgtaggagagaacgccagctgaggcctcattaactctgtggaaactattttagttacttagggagagtcattaaatatagcacagatggatccttcaaaaatgacagccaccatccacgttagaaacaggaaatccattaagtt

SEQ ID NO: 27369 - DNA, 1113 bp, Artificial sequence
  DNA replication origin
ccacgtgaagaaatgccacacgtgtgtgctgcgggcaggtgccgttctaggggcttgtccaggcccgctgacccctccggctcactggagatgaccaggcagggctgccctcccctaagagacatgcctgcccccgtaccggggctgtttgcaggggtgctgggaggtcctgatgtcagccccaccccagaggtgtcccaggggacaggagtactgctgtgctcgcccggcacccccggcctcctcctgaccgtgggctccttccctcctctgggattgaccaggctgtgtctggagtggactgcagctccctggcctgtggtcacccagagccaagctctgcacaggaacctccagaaccggcctgagcttcacagctgcgtctgcccgctggccatgtctcacgtcctgaggacgtttcacaggagggccgcccttctgctgcccgcaagacatacaggtgcagagctggggacatggcgtcgggacgtggcgcggggcggctggctgggttaaaccagagatcagatggcaaatgggagggcattttctagtaaccagacatctctgaaagtgctggttaagggctttcgtgctttagataaaattacgttaactgcacgctctcagttatgaggaatttcgtggactgttacatattttaaggctgtccgtgggcgctgccgagaaacaggaagtggcctcagtgacccctgcgcccggccgcgcggcttgttcgtacttggttgccgtgacaaccagacttcctagccccaggtgtccctgtggctcagctctgtgcaggtgtcaccagctcttgggaaacaaatccgcagtaatgaccttagctatctttattggttttggataaatacgaaaatgcttcccgtccacggaaattagacttcgcggcaaagagtgtttaggattaatgtgttccaagtatttcacctaagtcaggctggtgggcaccacacctgaccatttctttgtcttttgtgtcccgggcatgaaaaatggctgaagtgtgccgagcctccaagggactcatgagaccccagaaaagtgctggccatcgtgggctgcggggacgttgtgcccacggagctgtcc

SEQ ID NO: 27370 - DNA, 1063 bp, Artificial sequence
  DNA replication origin
tgtccagcaaggccctggaggtggtgtccgggcagtcttgaccgaggccggaaggatggtgccgggggcaggagcctgactgcctcggaggaagggggtcccggggcggagctgtggggtggggagcccattgtggatgctggctgcttcaccctcacccccacgttctgtctgtgggtctccgtgaggctcctcccagggcggccctgccacatgatgtagctgaaacccagtcctctctgcacaccagtgtttctaggaaaacacttcctgtctttctccccaagacctccaggacgtgggcctgaggtcatcactgcctccttcagttgctgctgcccgaggcccccaagagtgacccacatgagactgcggtccagacgccctccctgcctctgagggcgcacactgtccagagcgggtctgtgggtggaatgcccccagcggcctccgggccccttgtctgtggggcctgtgccctggtgctgccggcactgctgtcctcacgcgagcgctggagatatgagctttcccaggggggctcagcagtgatgaaggtggggcaggagctgtgtgtgtccaccataggtcctgacagagatgaagcagaggccacagggctgccctgccccctgccgcgggcatgtggggtgattcccgcccacttctcaggtgtgccaacccccacgttccttccctgtgagtgtgtgagctcacatagcccctggacacaccaccctccacgtggggtggatcgtgcctgttggccacactgagcacacctggaaacgccgactgccgagtgtcaggggagggtctggaaaagccgcgagtgaaaacagactgtcccccgagactgtgtggtgaggggaacacctgattctgcagcctgggagtccacgccgacatgccgactgcccacacaggtgtcacagcagggatgtggatgctactgtgctgtgcgggctccagcccaggaggccccgtgggaggagcaggtgccgagagctcgtcccaccgctactcgggagtgagacccacatcccacaggtgtctctgagca

SEQ ID NO: 27371 - DNA, 1545 bp, Artificial sequence
  DNA replication origin
tgcctccagaagaaaatggtctttgttttactgagttccttctaagcgcagtctgtgatggggcccgttctgtcctgtcctcgccctgctgagcactgagacagagacccaggcgacctgctgaccgaggccagctcacgagcctgctctgggccacgtggtgccgagttgcttcctccttcaggctctgatgacactgaagctccccggggagaacagcggtgtcctttgctgctggagatgcctgcagatgcttgctctgggcatgcaggggcccctggggaaggatccgcgcctggctccctctctccatctgtccctcgttttggacgggaagtcgactatcattcctgacgttccagtgtaacgtgttatgtttctctgatggctttggggattttatcttccgttgccagtttcttgactatgatatgcctactttttaccaaatttggataatttttgccaatatttgggggggttgccccatgttctttctcctctcctgtggctccacggacatggacatcaggcctctccctgccttccacgagctcctgggccctgtgcttctgtgtggtgttttctaaaagcctctcatctctagaatgagtcactgtggctgctatgtcttcgtgttcactgccttttctttcgttcttcactctgctgctgagctcagccaggggcatttgtgctctggagattttagttcttgctctggagtgggcctggccttcctccgaggctctgtgtctctgctcagctctccagcccgcctgcctggcaagcacgttttcctgtgctttccggtcctgatgctttcctgcgtccgtgtggagccagcgcttggggtgtggtgtgtagagaggggaatgtggacatgcagtgcgtgctgtgggggctgacgggctggggccggtgtggatgtcgtgtcgggggccgagccaacgggccagggccagtgtggatgtcatgttgggggacgacggactagggccagtgtgaatgtcttgttgggggcccagctgacgggccagggctggtgtggatgtcctgttgggagccgacaggctggggccattgtggatgtcgtgttgggggctaagccgacgggccagggccggtgcagatgttgtgctgggggccgacaggctggggccagtgtggatgtcctgtccagcaaggccctggaggtggtgtccgggcagtcttgaccgaggccggaaggatggtgccgggggcaggagcctgactgcctcggaggaagggggtcccggggcggagctgtggggtggggagcccattgtggatgctggctgcttcaccctcacccccacgttctgtctgtgggtctccgtgaggctcctcccagggcggccctgccacatgatgtagctgaaacccagtcctctctgcacaccagtgtttctaggaaaacacttcctgtctttctccccaagacctccaggacgtgggcctgaggtcatcactgcctccttcagttgctgctgcccgaggcccccaagagtgacccacatgaga

SEQ ID NO: 27372 - DNA, 2184 bp, Artificial sequence
  DNA replication origin
ccctgcagagtgttcctgaagaacttccagcagtacttccaggacaggacgagctgggaagtcttcagctacatgcccaccatcctctggctgatggactggtcagacatgaactccaacctggacttgctggctcttctcggactgggcatctcgtctttcgtactgatcacgggctgcgccaacatgcttctcatggctgccctgtggggcctctacatgtccctggttaatgtgggccatgtctggtgagtagcaggaatggggcggtcggagcttagggcttgctgtcactcagcacaggcactgcaggtgtcctggcacttggaaagactggacgagcgtttatcttaaattccttcaggagggtattgtcattttacttaggccatggcagagcggccagtgcaccagccacagcagccacccatcttcaggattaaaaccccacctctttgcagtagctcttccttacttaaaggactgcgttgccagcttactggagccagagggatggggaaagggaggcagaagcagtgggtctgtgtctgtgtggacgtgtaggaggctggtttggggtgggtgtctgtgtggacgtgtaggaggctggtttggggtgtctgtgtggacatgtaggaggctggtttggggtgggtgtctgtgtggacgtgtaggaagctggtttggggtgggtgtctgtgtggacgtgtaggaggctggtttggggtgtctgtgtggacgtgtaggaggctggtttggggtgggtgtctgtgtggacatgtaggaggctggtttggggtgggtgtctgtgtggacatgtaggaggctggtttggggtgggtgtctgtgtggacatgtaggaggctggtttggggtgggtgtctgtgtggacatgtaggaggctggtttggggtgggtgtctgtgtggacatgtaggaggctggtttggggtgtctgtgtggacgtgtaggaggctggtttggagtgggtgtctgtgtggacgtgtaggaggctggtttggggtgtctgtgtggatatgtaggaggctggtttggggtgtctgtgtggatatgtaggaggctggtttggggtgtctgtgtggacgtgcaggaggctggtttggggtgggtgtctgtgtggacgtgtaggaggctggtgtggggtccgtgtctgtgtgaacgtgtaggaggctggtttggggtgggtgtctgtgtggacgtgtaggaggctggtttggggtccgtgtctgtgtgaacgtgtaggaagctggtttggggtgggtgtctgtgtggacgtgtaggaggctggtttggggtgtctgtgtggacgtgtaggaggctggtttggggtgggtgtctgtgtggacatgtaggaggctggtttggggtgggtgtctgtgtggacatgtaggaggctggtttggggtgtctgtgtggacgtgcaggaggctggtttggggtgggtgtctgtgtggatatgtaggaggctggtttggggtgtctgtgtggacgtgtaggaggctggtttggagtgggtgtctgtgtggacgtgtaggaggctggtttggggtgtctgtgtggatatgtaggaggctggtttggggtgtctgtgtggatatgtaggaggctggtttggggtgtctgtgtggacgtgcaggaggctggtttggggtgggtgtctgtgtggacgtgtaggaggctggtttggggtgggtgtctgtgtggatgtgtaggaggctggtttggggtgggtgtctgtgtggacgtgtaggaggctggtttggggtgggtgtctgtgtggacatgtaggaggctggtttggggtgggtgtctgtgtggatgtgtaggaagctggggatgcgctggctcttgcatgcccagcttggttccgccctcaatgggacagctgggctttgcatggagactgaggatggctcttgtgtctttcgtggacgggagacaggaggcagctggctcagggctgagtggtcggaaccaggaccctgtcccaggatggaaggctgtggtggtgagttggtgcgggcagggcgcagccttgggctgtggagcctgtgttttccatcctggtcagggcggctgagttgaggttggagtgtctggggccacgtgcacttccgggagcctgaatgctctgcctccagcacagcgcctgtggctccggtgt

SEQ ID NO: 27373 - DNA, 843 bp, Artificial sequence
  DNA replication origin
tctgggggcagctccggaacctcatctgcaagtgaagcctgcgcctcactgtgggatgtggttggccgggtccactggcggagacccttcaccccacagctgtgcggggcccgcgtgcgcagcctacagagcagagctctgagaaaagtcagttcacgctcaaaacctctggatcccctggccaggggcagctggcgattccaactccctctctccccagtccctacaacccagaactggtttggaagagaacggttctgtgatcacggtgacatgtgatcacacggatacatgtttcataagcccaacgtgtcaggagctacgaacctcaagtgaggctctcaaatgagtatggaagtgaggggagcctgccaggccgagatgcagccagcggggcgcgtgggcagtcaccgtcccagagggctccggagctgctggccccgggcgttgcccacgcgttggttgtaggccgtgggcattggacgtctccctttccttccatcgtctgcttccctcacgtgtggaaggaaagggtcaggttgcagaagttcttctttgcacagcctttgtgccacacacgtcgcgggaagtttggtagcctggttgtgctggagtgatgctcagttcgacgttttgtgtgacatttgtgtgatactttccacctcctggtgcaaagtgatgagacgcgctcatcactacaaggtttcctgtgggattgcagtatcggcttcaactgggtctgtgtctctctctctctttctttaaagcaactattttattttatttatttatttttttcgagacggagtctcactctgttgcccaggctggagcgcaacggca

SEQ ID NO: 27374 - DNA, 1612 bp, Artificial sequence
  DNA replication origin
cgggtcagccagaaggtgcccgtgtggagatgggccggagagcctgcggggccacgccccggcgcgggcggcgactcaggctccggatccgagtacccagtcttccgcctcctcagcgactccgcgggcgccgccattgttgggctgtcagggcgcatgtgcggggagggcgcactcccggaggccccgcccattctcggaggccccgcccattctcggaggccccgcctctccctggccggccctgcccacggccgaaggccccacccacaccccgggaggccccgctcacagtcccggaggcaccgccccctccagccggccccgcccacgcgcgggagcgggtgcccggagcctgcctccttcgcagttctcgctgggcgctgctgcgggtagggcgcggggccgggtacctgggaggtggtgcgcgtcgcccgacccgagctcactggggcaggcacgcgtgccttccgtcagtccgagttgcagaggccaggtgccctcccccagccaggcgccttcccagctgtggtcctggggaaggtgggctgcacaggccctggcggtgctaccactgcgtgcccctgcctcacagctgacactcactctctgcggaggagggtgctagggcgatcgtcgcagccagcaagggacagagtaggcagggctgtgcctggaatgctcgggggaccctcccctttctcccagcctgagcacccttccgcctttgcacaacccagctcctgcctgcccttgggactggacttcaagctgtgggggaagagggggactcaggactcaggagggaagggctaactgcccaatgccccaaacagaacatgaaggaggacgccagcactctacactctgatgactggagcggggttctggaggctgatgtgaagcgggtgctaggaagggctggggtcacaggcattccttagaggaaagaaagggcgtgaggctagagtaggcattggagacctaggggttagtgaataaactgtggggcacttaggtggaagtgcagatttctccttattcatttgtcagcactctttacgtatgaaaaatcctgttcttttgtgtatattggaaatatttgtcctggttttttgtttttgttttcatgtattcttctcttttgcctctctagctttcctagtgttttggcgtatcaattatcgccactgggttggtcaaatgacccgtctttattgcttgtttaattacctgtttaattatatcttcaccacctgcagtgtgagccttgtgtgggcagggactgactgtggacatcgggcccccaaatccaggcctgaccagcagtggcccgagcttcctctcagcctccaccttccctgtgttgctggggccgtagcatacgtgtacatcttatggtttaattcatttttagtttccatttcttttctatgaaaccccccttaggagcccagctgtgaaatgggaccctgttaaagatgttgcaacgggtacgaacacacaaacatcctccgcatgctggcccagcctccgggagcgtggtgtgtgcctgagggctcggagccttggggatcgcaggaggcatcggccctggctggcgcccggcacc

SEQ ID NO: 27375 - DNA, 956 bp, Artificial sequence
  DNA replication origin
agagcagaaaagggcctcttgttccagcttccagcgctccgggctccggctctgcatttgcccagggtgggagcagtcagcggaagggtctgctgggagctcctgttctctctgagctcaagtttccctcagggtctgctctcttgagacgctgaccgcaggggtcccatccactgcccagaatggctccagagcaggtcaccgggggcagggcttgggccggggagaggtggaccagcagctctggtcgtgcccatttcagcctgaatttaatcaaaagtgcactgggttatgattcagccatcaaaaagaatccaggagccgggcgcctgtcatcccagcactttgggaggccgaggcaggtggatcacctgaggtcaggagttcaagaccagcctggccaacatggtgaaaccccgcctctactaaaaatacaaaaaaattagccaggtgtggtggcgggcacctgtaatcccagctactcgggagactgtgacaggagaatcgcttgaacccgggaggtggaggttgcagtgagcctagatcgcgccactgcactccagcctgggccacagagcgagactctgtctcactaaaataaaacataaaataaaaaggaatccagttctgacacgtgctacaacacagatgaacctcagaacatcaagctcagtgggacaggacagacgcggaggtcatgagttgcgtgagcccatttacatgaaatgtccggggtgggcaaagccacggggaaaggagggagctctgtggtccaggtctggggacggggagtggggagccagtggtccgggggtaggacgttttcttttgggctgatgagaatcttctggaactaggcgatggctgcccagcactgtgaggtgctaaacaccgagtcgttcactggcaaatggcttatttcatgctatgtgaatttcgcctcgaattttagaaaa

SEQ ID NO: 27376 - DNA, 1265 bp, Artificial sequence
  DNA replication origin
ggtgtcatttaagctgagccctgaagcttctgatctcctgcagggagaggccagcgtgttccctggggaagctagagcagagtgtctgatgacaagagatggacccgggggtggagagtggaggggcagccatcagagccacctctgagtccacctgatgggcccatgtcttcatccaggggggagctgcacacacaccctcctcccctgtctcccatccctgccccaccccttcagctggggcctgctccgccgtgtctgcatggccccacccaccctgacctcaccacctgctagtgggccttgcagtttcagggggagtgtacgtttcaagtataccctgatgggggaatctggaccagggctgtcccctgggccgtgagtgccgggcgtggagagctggtgtagatgacatttgtagctccacatgccctggcctgggcgccaaggacagccgcagagaagaatgtgggtggacaggctctgctgcccatgagatggtgcagggatggcctgggggatgcttccagatgagagaccaccccaccctacccgtggctcctagggatggcgaccccggaggcgcgtgtgttcatgtgtgtgtgtggtgtgtgtttgtatggtatgtaatgtgtgatatgtgtatgggatgtatgtatggggtgtgtttatggtgtgtgtggtgcgtgtatagtgtgtatggtgcgtgtatagtgcgtatggtgtgtatggtgtgtggtgtgtatgtgtatgatgtgtgtgatgtatgtgtgtggggtgcgtgtatggtgtgtggtgtgtgtgtgtgtgtatgatgtatgtgtgtggtgtggtgtgtgtatggtgtgtggtgtgtgtgtgtccgtgtgtgtttggtgtggtgtatgtgtgcagggtgtgggtgtgtttgtgtgtgtgtgatgtgtggtgtgcgtgtgtatgatgtgtgtgtgtggtgtgtgtgtgtgcgtgtatgtgtgtggtggggtgtgtgtatggtgtgtggtgtgtgtgcgtgtgtatgatgtatgtgtgtggtatgtgtgtggtgtgtgtgtttagtgtgtggtgtatgtgtgcagggtgtgggtgtgtttgtgatgtgtggtgtgcatgtgtatggtgtgtgtgtgtgtgtggtgtgtgttgggcccagggcacgaggaggaagcagggctgcccagggaaatgccaccctggagaggcccctgtccctccctctccgtccttccctgtgcccctccgtccctccctgcccgtcctcc

SEQ ID NO: 27377 - DNA, 2029 bp, Artificial sequence
  DNA replication origin
tgccccccccgaggcgaacgtccaaccgcgggtccgggtccccgcccaaggccgccccgcgaggtggcctcggcccggccgtccccgagggtggctcggatcctttcaaccagcgcgctggaggcgaaggggctgcgccattccgggtcaggcagccaacgcgggacacgcgcgtctccgagcttgcggcccgcgaaacccgggtgacctaccgcgccggtgccctcaaagcccccacgcccgggccggtggccgctgcagccactgagccacgcggtctccccggcccggtcggcagaaggagctggtccgttactagaaaagtccagatgcaaagtcgggggtcgtgctgccgcttcctgccagcgcaccgcacccacctggggccgccaccgaccgcacaggacgcgcctcctaccccctgttctggcccggccgagagctggtgcccccagcggccgcccgcccccgtccgcagaccccggggcccttgctgctttgcattgggaacaaccggagccaggcccggagctgagggggccagggcctttggaggaagcattggcctccaggctgaagagcaagggccgtgtcacctgcccggagggcggtctcatctctgcagccaggtcagaggaagcagcggtggggagacggagtgcgcgagttgggaggctccacgcatcgtaggtggagagctggctgccagcctggcctgccctctcttccccgtcccaccatctcgcttggctccggcacctgcctgggaagacccacacctccgtctgcagtgcctcttccccctggaggccctgccctccgctcggggtccccgcatccttccgtggccctcagagcatcgcctggggcgcccgcggaactcatctgttaggcctgggatgcaggcaggcagaagtgggggtttaagtggaagcagtgagggtgggggtccggtccaaactgtgccaccttccaccccctgcccctgggagagcagacatcgcccactcgggctcacagtgccatccgggtgaggacctccgtggagagctctctttgccaaagaaaagcagttgcattaggtctgcgagcaggcagggtggcctcttcctggctccccatccaccaaggaagcttcaagtccctgggacacaggtggggaactccagcacccctggaggaagggagactgaggttggggagtggcatccaggccctgactctggggcacggtggtctgtgcaactgagaccctgcctcaggctccaacagcgcctgctcctttccccaggttgcagtgatcaccaggggaggtgctgggcgtgcaggctgccacaggaggggtggggaggtggggagtctctgtggcggggtggtgggggcctaggccagtcagctgaggacgtgttggtgcactcccgggagggcggtatgtgggtgaggatccccatgcagagtggtgcccacaaaccccccttccagagtcatctctggtccaccttgaagtccccaggaaaatgacctcgtcctccgcgggtgtgagccactaggcctgagaggacgccgggacggagctttcagagagggaggtgtcgggatggcttgagggtcaccaggtattaattaagcacttgctgtgtgccaggcactttcccacacaggatggagccgggccaccctcacagctcctgccctgcagacgctggccttgtggagggaggcaggcagcaggtaactccaaaagcacctctcagaggcggggacttcaggaaggatggtctgggaaagcatctttggtgtcatttaagctgagccctgaagcttctgatctcctgcagggagaggccagcgtgttccctggggaagctagagcagagtgtctgatgacaagagatggacccgggggtggagagtggaggggcagccatcagagccacctctgagtccacctgatgggcccatgtcttcatccaggggggagctgcacacacaccctcctcccctgtctcccatccctgccccacccctt

SEQ ID NO: 27378 - DNA, 2671 bp, Artificial sequence
  DNA replication origin
ggcctgggccgcgcgggggtcgcggtggggggcgcccggggcgacccggcggaggcggcggacgagcgcttcccggcctgcatccgcgacgccgtgtcgcaggtgctcaagggctacgactggagtctggtgcccatgccggtgcgcggcggcggcggcggcgcgctcaaagccaagccgcatgtgaagcggcccatgaacgcattcatggtgtgggcgcaggcggcgcgccgcaagctggccgaccagtacccgcacctgcacaacgccgagctcagcaagacgctgggcaagctgtggcggtgagtgccggcgccccgggggcggggttcgggaccttggccgcccctggtctcggactgcgagcgggggcctggagggcgcagagctcgcggaggtggtggccacacgcaggctccgggctctgcaccccgggcgggtgtcagggcgggtcccagtggaaaaacatcctctggccagccggggtccggcgccagctatgggagtcgggatccgcggagggcagcgcctggggtgtgcaccctcgtggcgggtgcgctctggagccagttctcctggcggggaacaccctgcggagggccatggctggcaccccgacgtgccctccagccgttgcgagtggccccagccccgggaggcacgcccggcacgacagcaagttgcatgcggctctctggaggtgctccctccttagaaagggctcagctcctctagctcctggaccacccatggggagggagtgcggcaggcggatgggtgggcagcaggtttgcctgcgagtaccctccccgcagtttctccctctcctggacaccctcggtccgaagcagggagggcaggagtggagatgacggggtgcgccgtgtgcacgccttggcgtggtggggccggtcagttttccagaaattaggactgcagagtgaagaacttgttgctcaggacaggccgcccccaccgagtgtcctctggttgggtttcaaatggttctcttggtttggggctctggttcccgtatcctgctcctcacctggaagaagggagcttggagcttgcgtatttgcacctcctgccttctgtctggatctagggcgcagccacggggcgctgtggacggcaggcccctgctcccccaagtcctgccgcacaggcggttggaggtgagcctcgggaagagtcccaaggagtgtgtcctgtggctcagtgaggacgggcgcctgggccctgccagggcttctgggtgtctgggaatggagggacagcagcccagctgcccgccgaaggccggcaccgttcccgggaagcctcgcttttgtccaccgccggctgggtcctgcccgcctcccccgcctcccttagaaagccccagagggagggaacagcaggcccggaatagggggaaatagaaggaggaagatgggaggcgtggggcttgttcttctttggctgtcgtaagcataccaaccttcccaaacaggcgccggccggttctcccagaggagtgtactgcctggtgccacgggaggctccggagcgcacggcaggcgggtttccctggtcagagcctcctggccccggcctctgctgccggttccccctgtggtgtgtgcctgcgccgagggcacagtgggcgccctggccatccctgcctctgccctgtgctgcagcttgctgagcgagagcgagaagcggcccttcgtggaggaggcagagcgccttcgcgtgcagcacaagaaggaccaccccgactacaagtaccagccacggcgcaggaagagcgccaaagccggccacagcgactccgactcgggcgcggagctgggaccccaccctggcggcggtgccgtgtacaaggctgaagcagggcttggagatgggcaccaccatggcgaccacacaggtgggctccaggccccccgcatatctgagggtccctgtatgggaggcagctgtggggtttctggctgagaagggtgcatgatggtggaggggggcaggcgccctcgagagaaccgggccttccccgggttccctgaaaaagctcccaaggccccggccgcccctgtttttggtgcacgagggacctgcttagccaccttgagtgctgaggggctgacagctttgcttggcagggaccccgagaggtggtgttttcagcaagactcagtccaatgcgggctcctcttcccacaccgagctgctgcccacacggcactcagcagccccagcttcagggccagactgacagggtggagtcctgccggggcctcggtcaggctggctgacgcccgccagcctcagagtgcttggctggcccggggaggaacagggtctgtgtggtcccccagcgccctgtaaaccccagctctggccaggctgggcctgtcggcttcttccccccaccttggtctctgggaggggcctcgggtcttctcatagcacagcgcttcatggaattttctcggccgaggagtgaggtctaggtctgactttgctggaatttctgggaaatgtaaagaaacaaaaagccgttgatccccctggcagttagcgcgggcgtccctccccttccagcctggccggccccacccgccccacagaaggggcattcatccctgaagcctgctctcctgtccccagggcagacccacgg

SEQ ID NO: 27379 - DNA, 2837 bp, Artificial sequence
  DNA replication origin
agcatacaatagcgcctacttcacggaaacttgtgcctttaaactttgtaaacttaaacacagccgagaagttgcttctttgtactttttctacttttcctacttttttgtagaaaaaaaagataatgcctctgcttctatttctctgggggtgggggtgggggccgggagccgtcgcagacccgtttcatgcagcgtctcccttggcaccgcgttcggaggacgcaccctcactcccctgctgccttcactcctttctgaccaagcaacgctaacttttgtacagatcgatttgataaaattaaacaaagtgctttttatggacgtgggctgcattttgtgtgttgctttgtgtgagcctggggctcccggggtaaagatgtccggcaaaggcaggatcaggccgtgccacgcggccgccggcctcaccccagtgccctccacgctgggcggcaaggagggcggccgcgagcccacccggacccccgagcggcaggggcagcccgtcgtgccaccaggcgtcagcaggcttcagtcagaatggaaacagccatgcccttcgcgaatcccgtcgcggcctctgggaaccgagctcctcgtcttccttcctggagggcctccttggtaggcaaaatgggtctggacgggcccgattcggggctgtgtttttcctcccaggcgaatcccagagctggtttctgggtggctgtgcaatgccaggaagccgacggcatctttcgggccttggcatggagccaggctgggagcggatgaaagcgccccgcaggagccggcagagctgtctggttggaggaaagtttctagggagaaaatggctgtgggagtgacagccagtgaggggcagccggtccctttgccaggtctcccgggcacctgaggctggtgcgggggcgtctcggggctgggggccacccctggggtgcagacacccggcttctcaaggcatcttggtcgggggtggcagaggatgcactgctcacaggaacccaaattcgaaagacagccgcatctacaattttaacacggtggcctgggtagggggccacccaccccgtctccttgcccgcctggccgccctgcccctcaccccacagtggggatcccgttccagggcctaccaagaacagcagggggaggggctgtgcggatttatgacggttccttgggggtggggtgtgccaagccccacgggcgaggaggaggctgggagggggctgccgaaagccaggttcacagacatccgtcgcctctgtggaacaggcccatcccgtcctgcgtccagccaagggctgtccaggcccacacgtccctcaaagctcacacattgacaccccagctggggagaacccagcgtccggctagccggcaaagccagctctgcccctgggctgccccgggacacgctttggggcttgccaggttcccagggactgggaggccctgccagttttgtgtggacttggcagggctgctgtgagttaactcctggggtcccgggccctgcgtctcactggtgtgtgccctagaggaggaaaacctcatgtccccgtcccgggtgtgcctgggtcccgggtgcgttcctgtgggttttccagtatctgagtttcgtgaaggtcagggagtgccacaccgtcctggcgcgtccacaccctgccagggtgaggggtgcatggacagctcctccccctgcacagccccgctctttgtccctccctgcccctcccatccctcctctctgggggtccccctctggcagggcttgtggcttcccccttcggcactggatgctggccctgggagtctccaggtgccagtccccctccccaggtgctgcacggaggagggggccagagtcggtgccttgggggtcaggccgctttgcccctgtttccggctggtgggggttttgctggagacaagtcctccaagaacaccaggctgatgacgttgtttccaagctggcctcgccccaagcccaagcttccctgcgcccggtcctcctgaaagcgtcgtgtcccaggccaggccggccgggagagttcctcattttccacgtcctcatcctccacagagagcattgcctctgatctcagccgaacagaatgccctgttcagccccaaaaggggaaatggcattggtgatccaccctggattctgataggctggaaaagcccctctggtcttcctgggacagaagcggccttaggagcaggttatcggtgtgggcgtgagttcacagctgcgaggctgttccttcccaagagggcctgtgtcctcccagcagctgcctgggaggggcctgaggtcccatttgcccgcctctcctgggcagtgagattcggggacccgctggtctgctgtggcgttgggccacagtcagaggaccatcaagtccggggtgtcatggacccggggtcctggcctgctgtctggaccccagtcttgcctccccaacccaggacggaggacctttcttgacaccatctctagctactccacacctgctggggctgcggctggaggcttgggggtcgtgcttccgggcagtgacaccataaccaccagactccagacaagccctggacacctgtgtggacggccgcaggggcacattccagcgggttcacagcagaccggcgccagtcaggacccagtctcgggcagcgaagccagcacttggtttgaatccctccggggcaatgtagaccccagatgaaggagatgggtggccccccagcaactcaggcaaagaagcacccctgaggaaaggagatgcagcccagcgctgcccccaagcttcagtcgggcccttccg

SEQ ID NO: 27380 - DNA, 1709 bp, Artificial sequence
  DNA replication origin
caagactcagtggaaacatctgaagggccccatttcctcagaaagcctccactgaccacaaggcaggttgggtccctgtactggttcttatggtcccctgtatgtgtcctgttttgccctttcctgatgtattgagggagctcagggctgagtctatctccttctcctttaaagctcagcacctactacataacagtcactgaatgaattaatgaatgaatgaaggagtggatggatgggtggatgggtaggtgggtgggtggatgaacagatggatgaatgagggggtgggtgagtggatggatgtatggttgcagtggataataaatggatgaatgggtgggtgggtgggtggataaatggatggatggatgggtgagtggctggtggttggatggatggatgggcaggtgggcggtgggtggatgaatgggtgcatgagtggattgatgggtgggtggatggatgggtgggtgggtgggtgagtggatggatgggtgggtgggtgcgtgagtgtgtagttgggtaggtgaatggatggatgagtaggtgaaaggatggatgggtggatggatggatggataaatgggtgggtggatgggcgagtgggtggatggatggataggtgggtgggtgggtaggtgggtggatgaatgggtgggagggtggatggatgggtgggtggatggatgggggtgtggatgggtgagtgggtggtggatgggtgcatggatggttggatgggtgagtggatggatgcgtgggtggatgggtgagtaggtgggtgggtgtgtgggtaaatgggtgggtgagtggatggatgggggtggacgtgtgagtgggtggatggacaggtgcatggatggttggatgggtgagtggatggataggtgtgtggatgggtgagtgagtgggtggacggatgggtgggtggatgggtgagtgggtaaatgggtgggtgcatggatggatggatgggtgagtaaatgggtgggtgagtggatggatgggagggtggatgggtgagtgggtggatggatgggtgcatggatggttggatgggtgagtggatggataggtgcatggatgggtgagtgggtgggtgggtgggtgagtgggtaaatgggtgggtgcatggatggatggatgggtgagtggatggatgggtgggtggatgggtgagtgggtggatggaggatgggaggtaggtgaatgggcagttgggtggatgggcaggtgtatggagtatatgtcaccattgtccagcaggcagactttttgctgatcatatgcaggtgtgggtcctgtccctgtagctcaatgacaacttcaggtgatatgtgttgagtagctgtttctaaccaaaccctgtgtaagcacctgacccaccagcatctcctgtgttcctgagcgccattgccggggaggtgggcaccattgtcaccattttgcaggtgggctactgaggccagagaggccagcagcttgtctaaagccgtacacaccagggggtttttggggagccaagtgtctcactcctttctctgtctgaaccctagacgcatgatgccacaccttagggtgaactttgacccttccttgacaccctttttcctctcaggggaaaaggtacaaggcatgggtttctagagccagtcccccaggccctctgaccacctctgtccaccccctccttttttttccccctg

SEQ ID NO: 27381 - DNA, 815 bp, Artificial sequence
  DNA replication origin
agagaagggggagggggtagagatgggggaggggacagagggagaagagaaggggagggggtagagatgggggaggggacagagggagcagagatgggggagggggtagaaatgggggaggggacagagggagcagggatgggggaggggacagagggagaagagacgggggagggggtagagatggggggaggggacagagggacaagagatgggggtgttcctgtagaggccccaggttcacctagcccagctggctctctccacagcatcctgaacccaaggacttttcagcttcttgcttacctcctaagacagagagctcattccctgtgcaggcctcctgtgctggggttggggagcttggagtgtggcaaagtgtctgattccttcttcttccttcagctgtgcacccagggtctggagcgacagagctgggcgtgttacaaagcccctcaccgtgtcggggcaggcgtgctggggacggagctgggcaccagcttttgtggtcctgtccagcaacccccgcaaggctagcgagggaggtgggtgtgaacaagtgagtgaatggaaaatgggcagatggatgtgtggtgtagacccaggaggacttggcgctccttctgtctggagaggagtgaaccctccccgcaacacccgattggcagattttcttccagcctccacggtggccgagccaagtgttataaaaacacaggagagtatgtcaggacaggcagggccacactttgccgcaaggtgacaggttaaacaaatccctcctcagaatttactgccttcatttttgcttcaga

SEQ ID NO: 27382 - DNA, 1021 bp, Artificial sequence
  DNA replication origin
gtgtgtggctgtgacacggaacccagcggcagccgctgggcaggaggggctgcagcgtgtggcccccgggtggctccaaccaaacgggccaagctgaggctgttcccactcgggggccgcccactgtgtgtccacatggccgtggccccatcccgggacagggctgatcaggttgccctgcactgttgtggcttcggtgtctgtggcaaaatgagacccccacctctgagagacgtgtggcaggcggggcaggcggcctcagtcctgtgagtgccttgccacaggcttttggctttgctggtctccaggcacatggagagacagacgctggctgagtgcgtcctaggctgggttccagggtggtcccaggagcgccggcagtgagcagttcagggctgtgggtgcggggcttggtccagcaggcaggagcagccccgcccgggcaagcctccctggagggagacagaggagacacagggcagagacgcagggcagagacatagggcagagacacagcgcagagcggccagggcagagacgtaggacagagacgcagcgcagagcggccagggcagagatgcagggcagagacacagcgtagagcggccagggcagagacgcagggcagagacgcagggcagagacacagggcagagacgcagggcaaagcggcagggcagagacgcagggcaaagcggcagggcagagacgcagggcaaagcggcagggcagagacgcagggcaaagcggcagggcagagacgcagggcaaagcggcagggcagagacgtagggcagagcggcagggcagagacacagggcagagcggcagggcagagatgcagggcagagcggccaggggcccagaagctggaagaggcgggaaggaccctcacctggggcttccggagggagcacagctctgctcacacctcgattttaggcctgtctccaggctgcgggagaggacatcgctgcagttttcagctgtgccattggtggtactcagagccggcattccc

SEQ ID NO: 27383 - DNA, 1212 bp, Artificial sequence
  DNA replication origin
cccggctaatttttatatttttagtacagatggggtttcgccacgttggccgggctggtctcaaactcctgacctcaggtgatccaccagcctcggcctcccaaagagctgggatgacaggtgtgagccaccgcaaccggcctttattgttgacttgtaagggctcttgatgtattatggatattatatatccccttatcagataaatgacttgcaaatattccccccatttggtgggttgtctttttactttctcgatggtggcctgtgagacacaaaaagtctttaacttcaaatatctctctacattttgtgtgccttttgttgcttttggtgtccttatttattttctttttttgagacagggtctccctttgtcactcccccagctagagtgcggtggcgtcatcaccgctctctgcagccccaacctccctgggctcagccatcctcctgccccagccacctgggtagtcagggctccaggtgcacgccaccacacccggctaatgtttgtatttcttgtagtgatggggtctcgctatgttgcccaggttggtctcaaactcctgggctcaaacaaccgtgccttggcctcccaatgtgctgggattaccggtgtgagccactgtgcctggcctttattcatttctatgtggctgaacacatttggtatggatcccaggcccttggtgagctgggtgggtgcagacacacatgtgtggatggagcccaggcccttggtgagctgggtgagtgcagacacacatgcgtggatggagcccaggcccttggtgagctgggtgggtgcagacacacatgcgtggatgtgggcatgggcaggcacaggtgtggtgggaagagtgtgcccagcgttaggtgtcaggggagctcaggaagattgaggcagtcagggaggacttcctgatggaggagcctggtcctttgaaatgtggggtggggacctcgccccacattcagtctggttcgggggtggggcccccagcccccctcacattgggggtgtgttcccctcctccttttggagcccagccccaggttgcaggaacagtgagcagcgagaccacagggctggaagcccacggggtaattaattttgacttacaggagctgtcttaaattggatagaaactggcgaaaataggattaagagggaagctgagccaagagcaaacagaaggaaaactcccc

SEQ ID NO: 27384 - DNA, 1061 bp, Artificial sequence
  DNA replication origin
gctggctgggaagatgggaacgcggcactctgccctccctgcagctggcttatctgcgctgagctcactcgattctgaggattaatttggaaacaattaaaattctgtgcaaaacaagcagtgggctgggccggccagcaggctggcacgcacggagccctttcatcaccagcgcagaaatctaattagtgtgggattaagccggccacaaaccagcgagccgggaaggctccggcaagggcagatgaagccccggggcgaggagcgccgtacagcacgggtgtccggccggcagcagccccggccctggccctgcgctggcgtctcggctgagtcgagccggaaggccacccccacaggcgctgtcctgaccccccgccgtccggtcacccccagcccacgggccctttcccgtccacgtgctaggaaatggcaaacccatcagagccctgagggaaggcagcggagggcgcaggcgcctgcaggcctcgcgcacggggaccccacttcgcagctgggctttgcggctcctaaatatgcctgggacctgtcccgttgactttctctttcgaagtgcctttgagtgtctggcagccgtgactttctatcgggccgcctctctggccggcttcctgctgcaatgatcgctgaagcctctccccaagctctacaggcgtggtctgttggggtcagatgcatgaggcatgtggctgatagcgcggggtgcatgtggctgttttgctggtgtctggaggcgctgggtttggccgggacacggtcgagaactccccgtcgggccctcaggtagcagaggtgacagccctgtgggttcgcctgttggccagatatgtgaggaccactggctgcagtggagctgactccacgccttgtaagctaccccttctgggttctgcagggcacagccagagggggggcagggcagctgtctgcagaaggtccctccaggccacctctggggcagtagctggcttcccagtgtcccaggagccagcagacccctcccagaaaaacgcattcccgcagcccctctccacctgcag

SEQ ID NO: 27385 - DNA, 987 bp, Artificial sequence
  DNA replication origin
ccagctgaggcttggtggggagtgacgaagagcaggccacgccctcccccccgtgcctcagtttcctggtccccacggagtccttcctgtcgcaatgcagggaagtccccctgaactgagtccattcccgacacaggggccaggagcgggggtggttggaacccgcctccaagctggtgtcctcggcagaccccttcccgctcctccgagtcccagcacctacgtccgtgaagtgggcagagtagaaaccactactcgggcctcgcggagcagagtgggggcactgggtggggcggggggcacggggcgggccgggcctagggaggggtcagggcgccgcaccactggtgttacgaatattaattagcaggcaaagaagacctggctgggaaaaccctgggtccaagtcccagccccacgataccgggctggggagaccctggggcagcgtccaggcctctgtgcctcagtttcccgtctgtgaaaggcaggggaagcgtcagggccagggcaggagaaaggatcttcgacatcaaatcggctcccctggtccctcaggtcacagcaagacgccgcagcttccagtaagaaaggcctttgctggttggagttacggcccctccagagaagtcggggttggggctcctggcacccatgtggctggtgtgggcttttgctctgaggtctgctggacaggtttaggaggcggtcggttgcatgtttaggctggcgctgccaggcacgttctccacccacgtctatctccagagcacaatctccccgcgtcccagggtcctggctccttctcctcttccgggtggcgtccccttggttgggtggcccttgagggaggcagcctcggaggaaggtgcgtctgggacccagctggggtggtcagaaatctccaagtccctggagctaatcctagtctcaggatctaagtcctcccggctccaaagcgtaggttcctctaaccatgaacagagg

SEQ ID NO: 27386 - DNA, 1080 bp, Artificial sequence
  DNA replication origin
ctccctgtctctactgaaaatacaaaaattagccgggcgtggtggcgggcgcctgtaattccagctacttgggaggctgaggcaggagaattgcttgaacctgggaggcggagcgtgcagtgagccgagattgcgccactgcactccagcctgggcgacagagcgagactccatctaaaaaaaaaaaaaaaaaaaaaaactatacttgagtagccggttagaaaacatctctggagggagcaccctttctttcttcttggaagccagagcctttgactcttcctggctgcaacacaatctcttcaaggtactgccggggtcagccatcgcctgctgaggcttgggccggagccccatcctgcctgggtgttcacacggctccagctccactgtgatgctgagacccgggaacgtggccggccggcaactccgtgaagtgccaaacgcaaaaggacatacggcggcagccatcgtccctcagtatccgtgaggggtcgttccaaaccccagaggacaccagggtccgcgggtgctgaggtccccggcttggagggtgctgaggtccccggcttggagggtgctgaggtccccggcttggagggtgctgaggtccccggcttggagggtgctgaggtccccggcgtggagggtgctgaggtccccggcttggagggtgctgaggtcccaggtgtggagggtgctgaggtccccggcttggagggtgctgaggtccctggtgtggagggtgctgaggtccccggcttggagggtgctgaggtcccaggtgtggaggatgctgaggtccccggcttggagggtgctgaggtccccggtgtggagggtgctgaggtccccggcttggagggtgctgaggtccccggtgtggagggtgctgaggtccccggtgtggagggtgctgaggtccctggtgtggagggtgctgaggtccctggtgtgaagggtgctgaggtccctgatgtggagggtgctgaggtccctggtgtggagcgtgcggtgtccgcacatgaaacagggtgtaactttacatcatctgcagtccctgctgaccccaatgccagg

SEQ ID NO: 27387 - DNA, 1260 bp, Artificial sequence
  DNA replication origin
gggagcaggcggagtggggtgagccctgggaccccagcagccgtgctcagcgccggggggttggggaagcagctgcaggccccagaggggacggccaggagagtctttggacagtgaaccagagtccggagtcagcctccctggtgaccggaaacagccacgtccaccctcccagtggtgagcaagaggatgggtggggctgggggctccactctggggaagggggccaaggcctccagaggcccgtccggatgggctggggcaggggcaggggcagtgtctggcaggcggcagtgtctgcagacgtcctcccggggctgcacggcgctgggctgaggggaagcagcggtgcatgttggaacgtggccccggccccccacacccgcacagagcatcccaggaccccggtcccaggctctgcaggaagaggggccatctgttttccgtcgggcagacagtcgaggggccgcccctcccaggtgggaggctctgcaaaccagccgcccgccccgacaggaacgtgaggaaatggtgagagcagggccggcagcactgaggtcagggcgggttcccctccgtcctcctcggccgccccatgggcacagtccacgtccccgccctgcggtcaggaagctgagccttccggcaggtcccaggtgccatgcaggagcaggatggcagcaaggtgtccccaggtccccgagactcagtcccagcgcccgctcccgtcagccacaccggcttctcagcctcgcctcatatgagctggtcccagggcagggtcttggacatggtgtccggcagtctctcaggggcccccagaccctcctgctcttgctccatggttgctgggagaaaggagctcagtgaggtatcctggaggggccagagcttccatccaagcaggagagtgtggggcgtgggggtggaggtccccagccagtgttggggtacacggctccggggaaatgttcacccgctgtgggacccgtgtagggctcctcagacagccgcgctgagtcaccatgcgtgtgggcgtgtgccctgaggagctgacggccaagcacagaccccgatcacagcagctcccttcacatgagccgggctggggatgggacttcacgaaaagggaaacatcagcacagagaaaccaaactcccaacaggactcaagcagccacagaaggatcttgtcctttttctcctttcatccatgggaatcctccatcgtttccaccgtgggaaggaggcacctgctgct

SEQ ID NO: 27388 - DNA, 1259 bp, Artificial sequence
  DNA replication origin
ccttggcctctctgccgacaccaggcagtcagcccagcctgcagctgtgagctccgggtgggaggctgaacccactggctcctgccactgcagctgaaaagcatttccagtttacagcaacctaattattcacccctcctttggatggggaaagctcggggagggaagacatggctgctggtccaagcagattcagactctagaggacaggcttttggatgggagtcctggggtgtgtggaggtggctgggccagggttggggggttcgaggtggagtggctcccccttgcctgcaacgtcttaggctggggctctgctggggcatgagggcacaatgccacaatgccaggctgggtggcgagggggtgggcttggctgagatgctggcccacacggcccagctgctcaagccctggaagccagtgtggggctgggcagaggaggggcagaatctctggggaggggatggacaggcagagtcctggggctgcctggttccaagcggacgctgcctggggtgcagggaccgacaccctctgaccctgtcttggcctattttccaagactcatggggctggcagggctgggggtctgaggctgtcgaccacagaattgaccttcagctgtctggaggagccagtctggggactgtgaggagtggggagccagaggctactgccaggccttgaaaccgtggcttaggaggggctcctgggttctggagggccacggggagtgaggggatgcatggttagtcctgggccagttcagcatcagccacgtagcgtctctcacactctcaacctccctggaggtgcagatggggaaactgaggcttggcgccatgcaggtcggaagtggtggggcccacgttctcggctggcctatgccactgctgtggacagaagccagtgaggaggcggaggtgatgggcctggccagaaccctgtcctgaggcccccacagccgccagcccagggtgccactgagcagggacatggcctacgtcccatcttcctggcatgggcctcagtggacaacggggccctgtcaggagctgagtgagtggacaggaggggagggggagagcctgaggggttgaggaccccaccaccaccatcattaaccccccaaggccagtcgtggaggcagggagggcacactggccactgctggggtggggaccttaaatttcttcactgcccccaccccaagagcgtctgcatttattaggtgcctcctgtgtgcctgtgcctgg

SEQ ID NO: 27389 - DNA, 2764 bp, Artificial sequence
  DNA replication origin
ccaaggctgacccgaggggtccctgaccacccccctggaacggccccaaggctgacccgaggggtccctgaccacccccctggaacggccccaaggctgacccgaggggtccctgaccacccccctggaacggccccaaggctgacccgaggggtccctgaccacccccctggaacggccccaaggctgacccgaggggtccctgaccaccccccagaacggccccaaggctgacccgaggggtccctgaccgcccccctgcacggccccggtcctcctgctgctctcagccgcccgtgctcatgcgcagttttgcgaactcagcatcaggcacatcctgttttgtgctgagccagctccaggcgtcccctcaggctgtgagctgcagaccttccaggcagctcagccaggtgtcctccagttccgtgaaaggctctgctggccgaggggcgggcagagggttgggctttccagggaggcaaggaccgggcatcctggggccgtgggggcaaacgtggcctgggccagggtctgacccccaagtgctgactggggagctgcaggctctggagctggagcagcaccgggaaggggcgggatggggatgggccggcctggacttcggtggataaaccttcctcccactgtggcaccgtcgatgcagaagggagggtcctccccacagtgctctggctcgaggcagccacgtggcgaggtcctagtgtccacgccacccgccccaccccttgaaggctttctccttggtgggctggccctgcctgcttctctgcagcccccacctccctcccagctccagcgccaccggtagtgtccacgcaatgcccattcctgctgcgggaccgttttagttgctattcctggaattcctccaccctagatcttcgctcgtgaactccatctcatccatcagacccagacaaaaagatcacttcctccaagaagccctccctgacagccacctgtgcctacatcgtgtggttttctcagtagtgcctgtccctcacaaaaatgacctggcgtgtgtttttgccgcattgtcaatccctccctgccttccagtgtgtactgctcttaagctccacccaccatggcccatcctggtgcctgacaccctggaggcatgcagtgagtgtctgcctgcaaagcagcaaatgagtgattattagaactcccaccccggccaaaactgaaagtagagaagcagccctcaggttacacgatcccccacatctggcactcaattcttttcagggaattaaccagctgttttggggtcacgcatacccaggctgattacagccatttttgtaggttgatttgagttgatggaacagaacagagagttcagtaatggaccaagcagatggggcagttggcgcactggggctcggtggaggaggggacagaccccacagtgaccacaccatggggatgactttctgtccgtcacatacacatagagctagatccctacctcacaccaagcacagatggagttttgctcttgttcaccaggctggagtgcaatgatgccatcttggctcactgcaacctcagcctcctggattcaagggattctcctgccccagcctactgagtaactgggactagtcacgcctggctaattttttgttgttgttgttggtagagatggggtctgcctatgttgccaggctggcctcaaaatcctaggcccaagtgatcccagggtggtccatgaagcaagtgtgccctaggcctggcacccagggcagaggtatcccaggccttgcccttccctgctggagctcccaggctgccaggggatggggaaccaggacagagcccaggaaagaaggcctcagaggatgaggatccagtgataacgagagggggacccttggggaaaagtgggagcttgggaggtgtcaggggaaggtgggagctgggggtctggggaggaggtgggagctgagagtctcaagggaagaaggtgtgagctgggggtcttggggaggaggtgggagctgggggtctgggatgaggtatgagctgggggtctgggaggaggtgtgagctgggggtctgggaggaggtgtgagctgggggtctggcaggaggtgggagctgggggtctgggaggtgggagctgggggtctgggaggaggtgtgagctgggggtctcggggaggaggtgtgagctgggggtctcggggaggagatgtgagctgggggtctgggaggacgtgtgagctgggggtctcggaggaggtgtgagctaggggtctgggaggaggtgtgagctgggggtctgggagcaggtgggagctgggggtctcggggaggaggtgtgagctgggggtctcggggaggaggtgtgagctgggggtctcagggaggaggtgtgagctgggggtctcagggaggaggtgtgagctgggggtctgggaggaggtgtgagctgggggtctgggaggaggtgggagctgggggtctgggaggagatgggagctgggggtcaggaggaggaggtgtgagctgggggtctggggaggacgtgggagctgggggtctgggcagaggagggtcacagaagcaggacatgacttgggacagggcagaggcttgtgcaggcacagggctgggagccgggccacattccctccttggtgtggggtgaggggcaccccagcttggggacaggggcgctggcactcaggcagccccgacgttgtcctgggttcactgtgctggggcgggggct

SEQ ID NO: 27390 - DNA, 747 bp, Artificial sequence
  DNA replication origin
ggtggtcagggacccctcgggtcagccttggggccgttccaggggggtggtcagggacccctcgggtcagccttggggccgttccggggggtggtcagggacccctcgggtcagccttggggccgttccggggggtggtcagggacccctcgggtcagccttggggccgttctggggggtggtcagggacccctcgggtgggtcttagggaccgtgcaggaagacagtcagggacaagcgatggcttggtaccctccgtagcccgaagccggccggcagggagctctgggcagctgtccacagacctgggggagccctgtcctaaatggacagcggggtccccgccaggcccagctcccgcctctcccaggcctgggggcagtgggcagttggccacttcagccgctttgctgtggtccaggcaggcggggaccctcagggccccagcggggcatcagggtgttcgggaggcggcgccggctgtgagtggggccctgggccggcggcggcgggggcgccggttttctcggcattaagcctggctccgctctgccggctgtggaattcctggtctgatccgtctccagattggccctggaagaaattgggggagaatcgatttgtgccacgttctagcagcacggcctcatcatgacagacgccaggcaaccacgggcagggagccccccgccctcctcctgggacccctgggctcctcgctcccctgccccacccccttcccgcccc

SEQ ID NO: 27391 - DNA, 986 bp, Artificial sequence
  DNA replication origin
cgcatccaccctgctctgggggcccagggagcgccaggcccagccgagcttcattctgacacagaccctgtggtgggggccgagtttttgtcacctcctgatgacagcgagggacacagcactaaccgggacagcctcttgctcaggggagcagctgcaccagcaccgaagcccaggccgggtggggagggaggggcatggcctgccctccaggtgctcccggtctgctggggacgtgggaggagtgtcctggccctgggccccatcgtgaatgaaaggggtccagcgtcttgttgccgggccgtccagccagctgttcgtacctaacactgctgcagggaggggtccgggggacttggcatctgcctctacgtgtgttcccagccggcaagcggggtcccccgcctttgccagagcgggctgcccagggccccgggcggccactctgcaccactcggggtggggtggggtgggtctcgggcaggggccggaagaggggctgctgggacccagctagctgaggagggcagctcggggagggctgggtggcccaggggagccgggagggcaggcgtgtgctgggcgtagttccagcttgtgactgggctctgagaggagtgaccatggaggggtggcccatgttatcctctcagctgctaacaggttctgccacccactcctggccacagatggggagactgaggcacacagcagggccgtcagcagcgcgaggctgcaggcagccagtggtgtggaggttacccaggagtcacccagcacggcggggtggtaggttcgggccgccccagcgtgaactctcccgctcccgccctgctcctgggcccgtggtctggctcttcctgcttcctccacctccaggaagccaccaggattgctgtgctctgaaccagccctccgtgcccagcccagccactgctcagccacagcgatgccacatccgagtgcagccagaccctggcctgggg

SEQ ID NO: 27392 - DNA, 1340 bp, Artificial sequence
  DNA replication origin
ccctgcacagggccccaggccccccaacctaggggtgagtgttcccaccttccccttgaaggaaacgccccgtctggaattgtcactgagccacctttgctactcagggttcagggcacagccagagacagagggaggaggtggggtgggagaagtcagtgtggcccctcccccagctgccctggagccatccttggggcctgtgaggccgtggtcagctggggcctcgaggtcaagaaccgtgtgccggagagctggacgaggggcaaacccctgcccagacaccccagcgggtcccgctgctcaaaggtgtcttccaggagcccctagccgcggcacaggccggacacgctgccctgatgggagagggccctgtctttggtccccgtggaggagccactgcctgagtggccccacagtgggcagagactctgccaggccagagtgccccgaggcttgacctgtgccacacaagcctgggcgcccaggagcaggggcgggaaggaggtcgcctctgagctctccctgagcgcctcccacccagggtccacacaaaacctcgagggcctctgaggtgaaccacacaaacaccagtgtccccattcaactaaaacccacgggtcggggcggtggcttacgcctgtcatcccagcactttgggaggctgacgtgggaggatcacttgagcctaggagttcaagatcagcatgggcaacatagggaaaccccgtctataccaaaaaaagccaggatcagtggtgtgtgcctgtattcccagctccttggcaggctgaggcaggaagatggcttgagcctgcaagtctgaggctgcagtgagctatgatcataccactgcactgtagcctgggcgacagagcgagaccccatctcaaaaaaataaaataaaatacattttaaaaatcagtcatgaatttgagggatggcttcaggcatggctggatccaggcacttggctctcccgcctgtcccactgctcagcttggcttctctatgccttcgctgtcccacggacagggcctccccgatgcactgagcttccccgggaaagaggccccatctctcctgcccagctctggggcagctcagttctccctggagcaggacagtgcctgggatggcttgagcatttgcaacgcacttcctgccacaccctggccacgtggaggcctggaggggacagtggctcctggacccccagaccagccaccgctcagcctcaggctgcccgagacaccctagggaggtggcctctggcacggaactcctgctctggaaaacccccaccctcaggcaggcagaccaccctctcccaaggggag

SEQ ID NO: 27393 - DNA, 1090 bp, Artificial sequence
  DNA replication origin
cctttgtgggcctggtgacagcggtatcttgcttagcccagagctctcaacccctcgaggcagcaggagcacgcaggtgggcgggtgcaggagctggagtgaacacttctgggcacagcaggagcagaactccgtgcagtcctgtggcagtgtctagggcagtgcctgtgacccgtgaagcctcagagggtgtgtgttacagtgcttttagctttgctgtccaaggatgtctggagtgtttaacagctcagtggaccctctgccttttctcgagggcagagggtcagtgtgacagctttctgtatcccaagctcttgtccagcatccaggaaatatcaggttgcatgaagaaattgaaggatagtaaatgcaagggattttatggccgatggagggagggggacctggaaaggggggtggagggggaaggtgatggaagaggctctcagagggagggagagctggagagggggtggagggggaaggtgatggaagaggctctcagagggagggggagctggagagggggtggagggggaaggtgatggaagaggctgtcagagggaggggagctggagagggggtggagggggaaggtgatggacgaggctctcacagggagcgggagctggagagggggtggagggggaaggtggtggaagaggctctcagtgggagggggagctggagagggggtggagggggaaggtgatagtcccctgaagtcctgccgtctctaccagactcttctccaaagtcctgctgtccagctgtccctctgaggtcacgctgctcctctctgatgtcaaactgccatctccgatggccagctgcttctcctctccttgcctgctctgttctctgccaataaggtcaggagtttttatgggtacaggatgggggtggggcgaggcagtggtggttttggaaaaggcagcattggagcagggaaactggaatgcgtgttctcactcagggctatgcttccaggcttgagggtggggttcctcaggaaccccatctttttctacctagaatttctgtctcctgtccctatcactgagggcccgtgaggctgacagtacccatc

SEQ ID NO: 27394 - DNA, 1226 bp, Artificial sequence
  DNA replication origin
ggggttgggggatgaagagccgggggcagtttagggcagcgcatcctccgcggaggcaggaacggcaggcggtgcgattcccaccaggacctctgccatcggaaccgcgggtttctgccgggccggaggcgcctgagagatctccgcggaacggcgcgtgaacctgcggccgcggcggcgggtccggatggagatggacgctggatgggctgtttcctgagtttggttcccgtggcggggtcggcccctcgcccctgcatttggcagacctgatgcggagcccgagggtggctgttggcctggggcggggaaggggctctctagatcgggggtcccacctgctgggcttggggagcccatttggccttctctgattggtctggagttgcaggtgaggccacctcaggaagctgctgtatctgagggagcccgggccgccctgggggacgctggggtttgacttctggggctgggggctgcacgggtgggtcggggtctgtctgggttggggtccgcggccgcgtggggtctggattggcgtctgcctggcttgggggtcctcagccgcatgcagtttgggtcgaggtcgggggtccgcggccgcgtggggtctgggtcggggtctgcctggcttgggggtcctcagccgcatgcagttcgggtcgaggtctgcagctgcgtggggtccggctctcatggcccctgtgcctggacttcgctctccaaccatttcctctgcacgtttccctggaaaaggacatggggttcagggtggtggatgtggacaccccctgaaacccaccagccctggtctgtgatgcctggatggaggggccacagccacgccggctcccagcctcttcccagacaccctagcccctggaggcagggtccccccgtgaggcgtatcatccctgagcgccccacacgcctgctcctgggcatcctcctgggtggtggtgtggtgcggctctgcgtccccacccaaacctcacatggaaatggagtctgcagtgtgacggtggggcctggtggggagtgactgggtagcaggggcggatttctcgtgaatggcttggccccgtccctcctggtgctgtcctcgagattgtgagtggccatttaactgtgtcccgcacctgctctgtctttctcgttcccgctcacgccatgtgagacacctgctcccgcttcgccttccaccacggttggaagcttcctggggc

SEQ ID NO: 27395 - DNA, 1039 bp, Artificial sequence
  DNA replication origin
caaactcttttctctataaattacccagtctcagggttttttttgtttgtttgtttgtttgttttggtggaggcgggggtggacagcgtctctctctgtcgcccaggagggagtgcagtggggcgatctcagctcaatgcaccctctgctcctgggttgaagtgattctcctgcctcagcctcctgagtagctgggattacagttatgtgccaccatgcctggctaatttttatacttttagtagagacggggtttcaccatgttggccaggttggtctcgagctcttaacctcatgatccccctacccccaacgccccgccttggcctcccacagtgttgggattacaggcgtgagccaccacgcccggtcgtgggtattttctagcagtgcaaggacagaccaccgcacctggtgaacgcccctgacggcagtaatgaggcacacctgggggtgccccgtggcagacacacctgaaggtggttggggttgccagcgagggaatctgggaggagccaaccggagacccaagtcctctctatgagaaacatctgagccctggcctgtcctgtggaacccgggccatgctggggattgaggtcctctgttttgggttcaacggaggctgcgggtggaggttgttgggggagggtgctaagtgaaaatgctgtagggagggcgtgcttctggcgggggttgtggttttgtggtggtcgtggtttttgttgtggttgcgatttttgcggtggttgtgactgtgggttttgcggtggttgtggtttttgagatggttgtggttttgcagtgggtgtagttctcccaccccacctgctgccgctggaccctctcccctgtgtgtagcccccgctaggaccccatgtctggatcctggctctgggtctcttctctggcctcgtgagactggcgccatctccactggagccaataggcgttcggcacagctacccccagctccctctgtctctggacgagttggtggccgctcccacgcaggaatgccgacagcctttggcatcac

SEQ ID NO: 27396 - DNA, 2385 bp, Artificial sequence
  DNA replication origin
gaccctggcacacggggtgcctgcagatggtgagttgtggggtgggggcaggagatgggagggatggagctgctgggagtggatggaacgggaggggagggacccccggcggcggcaggagagccccgcgggtgtgcggagggcgcgtgggggacagtgcgtgcagcgggctgggggcgcacggcgggaccccgggccggggctgcgcacacagggtgaaacccccagtggggataacagccgagggcagggggtgcccgcgcgggagggggacaggggcgggcggcactcacctgggcggcggcgccctctgaacgggggagccccgatgtccgcgcggcactggctccgggctcccgggcgccggctgggagggggcggggcggggcgggggcggggcagtgcctggtgggggcggggcagggccgcttcacctgctcgactcccgggtcccacgtctggcctccgggaaccctggcgcactcgcccacagccctggtcccactggcagtgaccccatgatcgcctgcgcccccaccctattttcttgctgtccgctctgtggtagaccccagcttggggtgggggtcctgccgccagcaggagtccagggggtccctcgtcgagagtctgaagagggtggagggtccttgttcaaggggagagggtcaggggctctgcagacgtctctgaggggtgggctggggttgtggagataagtgggtgtgtggaggctggtgggggcggcaggcagccccagcgaggggggtccgtggtcgtgggatttccaggacactccactcgggttttatccatgccttatttgtggatcctacacatatttaagcatagactacctgctaagttgttctttttatttcccctgaaatgaatccatgggtacaccttagtccctcacctaaggtggggttctcaggcaggcagcagagtcacctgggtcctcaaagcagattcctgggcctcgagctgggcccccgactccccaggcagtgagggcctgggaatctgcattcctgagaagctcccgggatgctgatccccgggcccgccgtgagcgccgctggttgtaagaagcgggaccgagcgcctcctcccgctgagcgcggaggctggggatcaccggacattttcccaccaggaggtcccccagccccctcccctgactctgtgccgacccagggagccccgccactggctgaatgaagtgaggcgcccccaggtgacagcagaactcggagggcccctctctgaggggacatgggagcagccgcctgccgtctgttcacaggtggggtcggctcctgttgaacaggcgccagcagctcccttgaaggccgggtaccgggaccatgttctctcctttaagcgtttcagtgtttccacatgttctgcaagcagcgcgtgttatgtttaccatcgagcaagagtgcttagaggaccatggcacctggccccaaggtcccctcccctcctccccagcctgcggccatggccaggccctcaggggaggctgcaggctggtcccaggtcccctgcccagaatccgccccataagcctttccatcctctctggaggtacctgggctgtatccctcccaccctcccacagcagtggcttcccaaggcagatcctctgagaaccccctttgtgacccctaacgcctcccccatctccatctgctgcccctcccctcagcctctgcccaccatcctcatggttctcgcctcagcccctggctgtgttcctccagctcccactgcctcgcacctgggcccccatctgtcatgttctggggctccctgagaagcctctggggtcccactgttctggaatcactgggtgccccaggggtgcagggtccggtgtgcgagtcacggcccagcgcccagtgggagctcagccctgcgggtgggtgggcgctggatctactcacatccccaacatcaagctgggacaccccccacctccaagcacctgggccctcctgggggcctgatggccagagaggggacctgtcggccccacagtgcccctccccacatcggccaccctgagttctgggcaggagtcccctggcctcagtcccacccaccccaggaggatcaaatgaggtcatgcccgcctgggacgctgcagaggtcaaacccagcaccgtgaggattaggggctgccagtagccatggcaaccgatggtggctggatggactccgcagggacggtcctcagacccctctccagggaccccaccctaactgtgacctgtcccacggcccgtgacaccccctctcctgaggctgaggacagcagctcccggacacaaagcccgtgcccctcccccaccaggcagaggcttggtcactggg

SEQ ID NO: 27397 - DNA, 1508 bp, Artificial sequence
  DNA replication origin
ccgcgcggacatcggggctcccccgttcagagggcgccgccgcccaggtgagtgccgcccgcccctgtccccctcccgcgcgggcaccccctgccctcggctgttatccccactgggggtttcaccctgtgtgcgcagccccggcccggggtcccgccgtgcgcccccagcccgctgcacgcactgtcccccacgcgccctccgcacacccgcggggctctcctgccgccgccgggggtccctcccctcccgttccatccactcccagcagctccatccctcccatctcctgcccccaccccacaactcaccatctgcaggcaccccgtgtgccagggtcagcccagaagccacaggggacccagatggccccactctgcccaccgcgccgctcccggcctctcctccccacgacgggggccacagcggggctggctcctggagctggaggagggtgggtaaggctggggagggctcggagcctggggctgggggccggaagtggcactcaggccacagggaaccactgggccacggaaggagggtcccagggtgcccgtggcacccagcgaggggaggatccgcaatttgggtgccgggggaggcaactggtgcctgcgcgcagctgggtcggtgagctcctggaaggcagcaggcagaggccagcacccaggggccctgtgacctggcactcacagatgggttccctgaaacccaagactggggaggctggggtgccaccccgcccgctgcgaacagagccccctcctgtccaaggcaccgcgtgtacctggaatcctcctggcgtcttcaccctctccagaatagagaacacgccactggggtgtgtgcccttggccctcctcccccaccccagacccacccacgtgcccgacccgctgtccccagcctgccagcctgcctggggccccctcaagggcaagagagcggagtgcatggtgacagaagttggggatggttccagtgaggctgagccctttctgaaggcagtgattctggactatgtaggtggggactgccagagcctcctgggcagaaactggtcaacagcaccaaggacaggcgcctggcgttgatttccagagcaagacccagcgaggctgtcaggaggtgcctggtgtggagggtgccccgagaagcgttcgcggagcacgcgggacccctgctgctgctgctccaggctggcccacacctgcctcagtttccctctcctggggagggtatgtgcccctggccacaggctgccgcagggacaggtggcgtgtatgtgggggacaggcaggggtgccattggctgcactcacagagctggaccccaagggggcagtggcctgccaccaggccacccttacgacagaggaaacaggtcagaacgcttgtcctgggagcacaggcctggctccggggcctttggaggggctggggcctgtagtcttagctagggtgtcccccgacgtttgcccctgcccagcacacaatggaggagc

SEQ ID NO: 27398 - DNA, 1161 bp, Artificial sequence
  DNA replication origin
gccccgagaagcgttcgcggagcacgcgggacccctgctgctgctgctccaggctggcccacacctgcctcagtttccctctcctggggagggtatgtgcccctggccacaggctgccgcagggacaggtggcgtgtatgtgggggacaggcaggggtgccattggctgcactcacagagctggaccccaagggggcagtggcctgccaccaggccacccttacgacagaggaaacaggtcagaacgcttgtcctgggagcacaggcctggctccggggcctttggaggggctggggcctgtagtcttagctagggtgtcccccgacgtttgcccctgcccagcacacaatggaggagcccgggtgggtctgcagcctctccagggtgcggcgtgggccccggccgtgtgagccgctgcctccccgagcagcaggttccgcagcccctccaagctgcagccgcatcgctgccccccatgaaggagccgactccccgacctcgtgctgggttagcctggaaggagttggcagggtgcaggctagacctccacccagtcatggaggacttggtgctgaggccccgcctctggtcccaggcccctgtgaagactgcccccttctccgaggagcccagcggcctcctggatgctggggaaatgctgggctgcttagggcagcttgtgggagcaatcgttgagcgcccagtgtatgccagccccgctgtggtccccgtcgtggggaggtgaggccgggagcggtgctgtgggcagactggggccatctgggtcccctgtggcttctgggctgaccctggcacaccgggcacctgcagatggtgagttgtggggtgggggcaggagatgggagggatggatgctgctgggagtggatgcacgcagcaccctgcacacagaagctcactcagtttcatcagctcagcaaccctacagtttgcaggagttgcctatcccagaagctgggctcagagaagcccgtgacttaccccagaccacgcagcccgtgtggggagtggtcaggggccggggtctctcccagtgccatgtcaggctgagcagatcccttcgtggccgagggctcgggatcagaaagctcctactgctggctccccctccagtgaatcccccacccacaagggacagg

SEQ ID NO: 27399 - DNA, 1647 bp, Artificial sequence
  DNA replication origin
cggggaggaggcgttccagctgggcgtggaggctgggaacaggggctccatggcggcagccctggggtgcgtcaggctctgcaagagaagaagggaggacgccagggtggtgagtccctgaaccagcacatgcaggcattccttcctcctgggccccagccccgcctgccaggaggcgcgggatcaccgggtaaacacgattagtcatgtttagcttggccgggaatcacgttaagcaaattgtttggaaaataagccaggagaggaaggagcggcgggcaggtggccccgggagcccagacggacggctgctgtcgatatggcgacagctgccctgtggccgcccctgcacccagatggcgcctggcctggccgcagcatcctggagtctgaggccagcacctgcgtctccctgaagcccctcagagcctgccctgcagtgctgctgccctcgtctaccaggtaaggagccgaggcccagcgggcggcccctcccgggacacacagggagaggtggcagtggagagagatggggccggtggtcggccccctgtccgcctgggatgaatggcacctggctaggacgacctgagaagtggctggacgtggtgtcgccaccgcagcctcgagggactttcaccggggtgcccgctgcccgttggccccgaacctctctccaggccagcgcagggaccgtcacccccacagcaatgacagacatctgtaaacccaggcgggggcacagcacagggccagagagacaccaccctccccacggggcggctgcagagaagcaaacacacaaaccacacagagtggtcacacggagccccaggagtcacacagggcgaaggaggggggactgcgggcgggggctgcacaccctgcagcccggaggagaagccgcggtggggggtgtgggcgggtcagaggcatagcgtatgggggctgcagccacctgacactgcccagtcccatcggagctttgagccccctcccaggccctggaaccccccactgtggcccagagagagaacaggggagacttgggggaggggagggaggggtgtccatggagaagggtgggctgggaatggtgacgtctgtgggtccaaggccatgggcacgtgtgtacctcgtatattgtttttgtatttttctgcatgtttgaaatcattcataaaaatgatactccggctgggtgcagtggctcaagcctgtcatcccagcactgtgggaggccgaggcgggtggatcacctgaggacaggagttcaagaccagcctgggcaacatggtgagacccccgtctctacaaaaaatacaaaaattagccaagtgtggtggcgggcgcctgtagtcccagccactgaggaggctgagtcaggaggatcatttgagcccaggaggttgaggctgcagtgagctgtgattacaccactgcacgccagcctgggtgactgagcaagaccctgtctcaaaaagaagatcaatgcctcccctgacgagtggggcggaggaagtccggatgtttgggttgaccctggagctgtgtgactctgggggtggccagcagagaatcaaagtgtcccctaggatccagaccagggacaagcccctccctgggggacctcggcctgagcagggg

SEQ ID NO: 27400 - DNA, 1457 bp, Artificial sequence
  DNA replication origin
gtgtgcggccgggctgggcgggaacacgctggtcatctacgtggtgctgcgcttcgccaagatgaagaccgtcaccaacatctacattctcaacctggcagtggccgacgtcctgtacatgctggggctgcctttcctggccacgcagaacgccgcgtccttctggcccttcggccccgtcctgtgccgcctggtcatgacgctggacggcgtcaaccagttcaccagtgtcttctgcctgacagtcatgagcgtggaccgctacctggcagtggtgcacccgctgagctcggcccgctggcgccgcccgcgtgtggccaagctggcgagcgccgcggcctgggtcctgtctctgtgcatgtcgctgccgctcctggtgttcgcggacgtgcaggagggcggtacctgcaacgccagctggccggagcccgtggggctgtggggcgccgtcttcatcatctacacggccgtgctgggcttcttcgcgccgctgctggtcatctgcctgtgctacctgctcatcgtggtgaaggtgagggcggcgggcgtgcgcgtgggctgcgtgcggcggcgctcggagcggaaggtgacgcgcatggtgttggtggtggtgctggtgtttgcgggatgttggctgcccttcttcaccgtcaacatcgtcaacctggccgtggcgctgccccaggagcccgcctccgccggcctctacttcttcgtggtcatcctctcctacgccaacagctgtgccaaccccgtcctctacggcttcctctctgacaacttccgccagagcttccagaaggttctgtgcctccgcaagggctctggtgccaaggacgctgacgccacggagccgcgtccagacaggatccggcagcagcaggaggccacgccacccgcgcaccgcgccgcagccaacgggcttatgcagaccagcaagctgtgagagtgcaggcggggggtgggcggccccgtgtcacccccaggagcggaggttgcactgcggtgacccccacccatgacctgccagtcaggatgctccccggcggtggtgtgaggacagagctggctgaagccaggctggggtagacacagggcagtaggttccccaccgtgaccgaccatcccctctaaccgtctgccacacagcgggggctcccgggaggtaggggaggtggccagaccggtggggggctccgccatgccgtgcaagtgctcagggccgcctcaccctccatctggccccagcccatgccggccttccctctggggagcgacttttccagaaggccggccaggcgagagggtcttcctgacggcggagctgacctgcccggcccaccagctgcatgtcagctccgagccaccgggtccccgtccaaggctgctctgctaagttaaagacacccgaaagcgcttgactcaggtccccggagtccctggccagggccccagcc

SEQ ID NO: 27401 - DNA, 2596 bp, Artificial sequence
  DNA replication origin
gggccgggaagccaccccgcccaggatgtttgctccgcgccgcaccccccacccccaccgggttctccggtggcctgcaaggggtctcggctccgcggcccctgccacccacaggcccccactgccccgggaggtgaggatgtaggggtccagggcccatgctccttccagacactcacctgaccccacccggcctttcatgctggtgccctgggggcatccaggccttgtcctcttccccgtggctctgcccagcctggtccatgggctgcctgggacctccccagacatcttcagccctctcagcccactgaggccatcagaccccggggccttgtcctcccacgtgctccaagcaggaaccagccaggtgccactgcccccttctccaggcctggacaggggctgcccctgcctcgtgagcacccctggggccccggccccgggccaggccgctgcgtgttctggatgactcacagcttccgcacactccctgtgtgtgcctcttcccgcctctcgtccagtctcctctctcaagctggagtgagcgcagcttcgtccttccctggggcagcatgggggcagaacttgaggggcctggatctgctcctctctctgaattgacccccacagctaacccccctgtgcccctttgcctctgagccctcccataggctgttccctctgcctggaatgctcttccggttcaaccttgatcccacgacccagccccatgctggtgccctgcaggtgtgtttgtccgatggagacacgtgttcagggctcagccagcccagggggtcaagggcagtaagtcctaggcccagctgtggggctgccgtcatgagcccaccgtccccagaaggtcagcgtgacagcgtcctgggggtcaagggaagaagaggctgtgccggcaggtctggtttgtggggagggtgtgcacctgatggggacgaggctatgaccaaaggcacagatgtgggctgtgggtggccgggaccagactggggagctcggcagggccatgaggctggggcctgggacggacagggaccggggtcctgggggcttcaggctggacaaggtggggagcagggtggcccgaggcttgtggccgggtcgaatgggctgggggtcaagggcgtcttcacccgagagtgagggcactggcgcctctgtctgcccctcgtggctgccggccctgcagggagagcgcccggtgtcaaatcaattggagaaattgatcttggcagggatttccgagccatctgctcggtccccaaagccttctgagagggtgaacatggcacccaaatccctggggaggcaggtcgaggggggtgctgcggtgtgaacgggcctcggtttcccccagtgcaccctggatgcacccctctttggtgactcaagaggcagagatttgtggaccccctgcagaagcccaccctgccccgcccagagctgtcaagaagctgtgaggggcagctccagcctaagaccccaggcagcttccatcatttttcaccctgttcacgaattccacgcctcccgcttcctgctgggcatttggccgcccccgtcccggccttgtctggctcagcggggctggggccgggggcgggccctgtgtcgggcctcgggggagcccaggctccgctcactctgcgctggctgcactcggctccagggacaatatttgctcggggaaagaatcaaacatttatcctcgcatttattcaggggagcagttgtcaaacacgcgtgtcctcactgcttggatgtttcccaggcctggcctcagcctgggcctttctcctgccaggatttgtgcccactcagccgctccctgtgccctccaggaggttgaggtcctgctctgggcagacggcgggagcacgggtcggggccagtgctgggcagggcagaggggtccctgaggccgagtgatgccgcaccctggtccttctccttccagcctcagagcaaggccaaggtgccccagagaccccagcaaggctctctgggcccacgttctgggcctggggcgccaggaaaagctggtgtttggggtgggggaggtaggacaattctaggtgggaggcggcgggattcccagggcctgccatttgcgtcacccgcgcggccgctgcctctcagcagtgctgtctgctgtggcctggggagcagctccccgctgcgcctggatgaccgtcctctgctcctgtccccgttccctctcccgggccagagcccctgccccaaagcagaagagacggccgcaggttccctgtcctctccaagccctgaccctcaggtcctcctgcagcaggagcacctctccctagtgccctcaggcaccccacactggacccctccagacagagccaatctcagcacggcacagccatctgcacccccagcagcctggagggctgcagccttcaccccaacctcagcccccagctctcctctgcaccagccgcctccccacctcgcccctggctaggccagcgcccaagcccccacactcccctctctgagacagcaactgccgcccgcagcctcccatggggggtgtcgggcagcagggtggggc

SEQ ID NO: 27402 - DNA, 1438 bp, Artificial sequence
  DNA replication origin
ggcgcccgaacaggaaggggtgggccgaggggagattggcagaccccaggcctcccaccccgaccgggacacccccagccctaccccgtgtgctgacggccggtggcgctaagaggtgccaggagagaagcccacagcctggtcctggctgcagcagcagggcgcctggtcagcactctggggagccttgtgctcactcagcccgttcccaagtgaggacacccagtgccacgcaggcagagccaggctgcagccacgtcccgcccaccccacacagagcccgtgtccctgccagctctgcctgtcgcctcagcttcccgtgcagcagggggtgcgcaaaggcctctgtcggggaccccagagcagctgtgaggggccctgggcttgcaggtcccaagtgggcactgcccagagccgagcccttggtgtccaggccccggaggacagctgcacggctccaggggttcctgcttggggggatccccaggaggagcctgttggggtcaagtgtggcaggtgcttgaagaaccagaggtggggggtatgggctgctgggggtgggggtcccggctggccatgcagaggttcttggccccggtgagagagcagggctggatgggagatgggagccaggggtccggaccaccccagggccagggaggacatctcctctcgcaggctgcctgttctgtgctggggaagcaccccagaatcccagacaaccgttcctttccctggccctggccctggcccggctgccctggggtctccagcctctgtgattccagtgagcctgtgctgccagggtggcaggtggtcctgaggaagagagtcccgggaagacgccagcccctgcaccagggagctcagaaagtgcccgtcaccaggcccagccaaggacccagacgtgaccacagcagccccgaagccaggcgcttattccgagggacaggctggacctccccgcacagacgtcgccgtggcctataggtagttgcagctgcggatactaagaagcagcaggggtcaggcgggcaggggtcgggctgcagcaggggtcaggcgggcaggggtgcaaggtctcttggaagctggcgggggtgtctaatgaatgccagtggcgaccctggttctcagagaaccggggtggggagatgcctgtgagagcctcagacagcaggacctgcatcccgccaaccttccaggtttatttgtttaaaaaacaatgactgagaactgaaagtgagataagatacggtcacgattctctgccaagtgataaaagcctgagggacgctgccagtgccaggtgggagcggaaagagggatgcttggtagaggccagagacacgaaaagcagcgacagcctcgtgctgccctggccacttaggagacaagggggagccaccccatcagaaccgcaccgggcacccccgtg

SEQ ID NO: 27403 - DNA, 1129 bp, Artificial sequence
  DNA replication origin
tgcagggattgattgagcgccgactgtgtgctgtgattggttgagcgccgactgtgtgcagggattggttgagtgccgactgtgtgctgtgattggttgagcgacgactgtgtgctgtgattggttgagtgccgactgtgtgcagtgattgattgagcgccgactgtgtgcagggattggttgtgccccgactgtgtgcagggattgattgagcgccgactgtgtgcagggattgattgagcgccgactgtgtgcagggactgattgagtgccagctgtgtgcagggattgattgagtgccgactgtgtgcagggactgggccatgtggagtgctgggtgtgttgggagcaagtctgacccgcacctgccctcacaggggctggcgcacaggaaaggaccacatgaagccacatggacggaggcctgtggtactgggtgtgcggtgggcgtagccaggtggtagagcgagctgggtgcctcctcatggggtggtcggagcccggttgctcacccaggtactcgccctcacggccgaggggccattctgcttataaaagctgtgccaggcacccttgctgaggagacattcattcgacattgcgtatttgccaagcacctgcccggtgtggatggacccaggggaggccaaaagggtggaaggaagacggtcacttccaggcggtgtgaggggcacccagcactcacggtggccgggagggtggggctgctctagtggtggcttgtccttggcaggaaacacgcggctgagcgcagggggtcagttttgggggctcatgggtcctcagtctgtctgaatgtgtgggggctggaggaagattggaccctgatgggcaccagagccggaggaagcctcagacccccacggagttgccttatgcttagacagggatgaaagtcaggtccacatggcctggctgcagttgtgggggcagagagggccccatttgggagtgtgggtgggtcggtccctccaggcaagaggctggcccagctctggtcactggaagcctctgttaccctccccggctggagcagctgtggcccctcccggaagctctcccagccacgtgctcacttgtctctggaaccacctccacctgacctggg

SEQ ID NO: 27404 - DNA, 1673 bp, Artificial sequence
  DNA replication origin
tgcccttcgacacggagctggtgaacctggacggcgccttcgacctggccgcgggccgcttcctctgcacggtgcccggcgtctacttcctcagcctcaacgtgcacacctggaactacaaggagacctacctgcacatcatgctgaaccggcggcccgcggccgtgctctacgcgcagcccagcgagcgcagcgtcatgcaggcccagagcctgatgctgctgctggcggcgggcgacgccgtctgggtgcgcatgttccagcgcgaccgggacaacgccatctacggcgagcacggagacctctacatcaccttcagcggccacctggtcaagccggccgccgagctgtagccgggtgaggggccccgcggctgagcaccgggcgcgcgcgcgcgtgtgtgtgtgtgtctgtgtgtgtgtgtgtgggggtgggtgtgggtgtgtgtgtgtgggtgggtgtgggtgtggtggggtgggcgggcagcggagcttcagcgccgactgtgtgcagtgatttgttgagcgctgactgtgtgcagggattggttgagcgccgactgtgtgcagtgatttgttgagcgccgactgtgtgcagggattggttgagcgccgactgtgtgctgtgattggttgagcgccgactgtgtgctgtgattggttgagcgccgactgtgtgcagggattgattgagcgccgactgtgtgctgtgatttgttgagcaccgactgtgtgcagggattggttgagcgccgactgtgtgctgtgattggttgagcgccgactgtgtgcagtgattggttgagcgccgactgtgtgcagggattggttgagcgccgactgtgtgcagggattgattgagcgccgactgtgtgcagggattggttgagcgccgactgtgtgctgtgattggttgagcgccgactgtgtgcagtgatttgttgagcgccgactgtgtgcagggattggttgagcgccgactgtgtgcagggattgattgagcgccgactgtgtgctgtgattggttgagcgccgactgtgtgcagggattggttgagtgccgactgtgtgctgtgattggttgagcgccgactgtgtgctgtgattggttgagcgccgactgtgtgctgtgattggttgagcgccgactgtgtgcagggattggttgagcgccgactgtgtgctgtgattggttgagcgccgactgtgtgctgtgattggttgagcgccgactgtgtgcagtgatttgttgagcgccgactgtgtgcagggattggttgagcgccgactgtgtgcagggattgattgagcgccgactgtgtgctgtgattggttgagcgccgactgtgtgcagggattggttgagtgccgactgtgtgctgtgattggttgagcgacgactgtgtgctgtgattggttgagtgccgactgtgtgcagtgattgattgagcgccgactgtgtgcagggattggttgtgccccgactgtgtgcagggattgattgagcgccgactgtgtgcagggattgattgagcgccgactgtgtgcagggactgattgagtgccagctgtgtgcagggattgattgagtgccgactgtgtgcagggactgggccatgtggagtgctgggtgtgttgggagcaagtctgacccgcacctgccctcacaggggc

SEQ ID NO: 27405 - DNA, 913 bp, Artificial sequence
  DNA replication origin
ccaacgggggcagggccgggctgccgtagggtctgggggctccagctggggcacctccttctcagtccctcccctctttcctctcccccagccctggccaagatggcagcccccgccctgctgctcctagcactgctgctgcccgtgggggcctggcccgggctgcccaggaggccctgtgtgcactgctgccgcccggcctggccccctggaccctatgcccgggtgagtgacagggacctgtggaggggggacctgtggagggggctgcctcgagtacggcccactatagacatcgaaatcctcaaaggtgaggcccgtgggtgctgcctgcatgctcccccaccaggacccaacagcccacagggagtggggagcacctggggcttgggaggaggggcgggaggggcacgctgagcaccagtgtctgccctggcagcgctccctgcacagggacccctgggctccccccgcaagcaggaagaagcctggcttggggagggacccatgaaccaaagtggggtgctgaggatcctggggaagggggccagggttcctgagatccccaaagtagcagccccttgggaagggagcctgggcagcccgcttgctctgagaccccttgacacggctgcgctgtcccgaaggctgtactaaggttaggcttgggtaggaccttcccagccttctcattctttaacacccaacgcagaccgtagctggccctgaccacccatgtccccaccctctcggtggggacggccttgccacaggccttggtctagccacacctttggagaacggcttctccccatcttacagacgtggacgcggagactgggagaggggccgtcacttgcaaagagtgtgtccttacagtgacccttgagccccagcccctggcctgggtgct

SEQ ID NO: 27406 - DNA, 947 bp, Artificial sequence
  DNA replication origin
cagcaggcttggtttcccgatggaggagagctgcgtgcccacggcaccatcccccaacccagccggccaagacgccgggccccagccccgctcatgggcacggggctggcaggaggaccctggggccgcgaggcaggcttcgcagtggacacaggggccctgccaggatcctgtccagggctcggcggagctggcctctcggcctgttgctcttggacagcccagaggaagccacgggcgcccaggcgggcatgaaagggctctttgacggctgggttgctgggacagtaacacagacggccggccaggcagggagcatccctgagacggtaacaggaagcacagggcctggggctggttgtgggagtcttcacagccgccctgggcaggtcgggctccccctgaaccccagcggagcatgatccagccctgattgtctgccaggcagggccaggggctgggacggccgggaactccgtgggggctcctgcaggcctccgtgcatgcacacacccactcctgccaggctccctctgccggaggagtccaggggggctcttgtggtgtccagtggggccagggggtgagtcagggtctgctgagctcatggggaggcaggcagagggtgtctcaactgccagagacattccacccacctggaatgacccactgcaggaggaaggaccttgccctgtgctacaatcccagagggcttcctgaaggaggcagcctagatctttgtccagcagagcccatcttcagggaatattgaggatcccgacccgtgcacctgccctagcggaagacactcctggccaagcctccagatgtggctgtgaggggagtggggtaggcaaggcccacctggcaggggggccaggcttgttggggcagctgctgttgggagggggcctaccttgctcagggggacccaggttggctctggc

SEQ ID NO: 27407 - DNA, 1171 bp, Artificial sequence
  DNA replication origin
tcccacaaccagccccaggccctgtgcttcctgttaccgtctcagggatgctccctgcctggccggccgtctgtgttactgtcccagcaacccagccgtcaaagagccctttcatgcccgcctgggcgcccgtggcttcctctgggctgtccaagagcaacaggccgagaggccagctccgccgagccctggacaggatcctggcagggcccctgtgtccactgcgaagcctgcctcgcggccccagggtcctcctgccagccccgtgcccatgagcggggctggggcccggcgtcttggccggctgggttgggggatggtgccgtgggcacgcagctctcctccatcgggaaaccaagcctgctgcccgcctggggtgcggcgccctgaggagaagcaggcagatggaagctgtggctgggcgggcccggcgggggggctgtaggccgaggcccgtgttcggggcccagaccagggcctccatgctgcacggggcccccatggccaccaagccaccgggtgacgcacagccctcatgctgctggcggggaagccaggctggatggagcccaggagcgcagcctccccaggctccgtggggtctcttcattccctcatgacacccctggggaggccccgcaccagccccgcctctcagcggataaggactgggccggacgactcgcgggaatgacttctaggcctcccaggcctcagcgggcgggggctccattctctgtgggccccaggccaagcccacacagcaccttggccttgtcccgctccgaccctgggcctctggacacggacacgcggccattccccacaggtccttcctccacaagccggcccctgttgtgggaggtgctggacgtggcaggagaattgtggcggccttgcctgaaagcaggctgtgggcggggaggggccccgagctggctcagtcccctcggcagatttgtgtgcgacctggggtcccgctctccccgcagcccctcagcttggcctggccctcagcacccccatgctaaagaccgaggaggaaaggaggacaggaggtgaggggagaccaaggggtcccccctgtgggagcttcgtgtgccaggctgcgggcaacgggctggggagggctgtggtggggaccgcaccagctgtagccggttccaggctc

SEQ ID NO: 27408 - DNA, 1076 bp, Artificial sequence
  DNA replication origin
cagtgacctgccgggggaacgaggaaccgcctctctgcagtccccctggcatgggggggcctggagccaggcagaagctggtgaactcaaaggcccctgagccacgggaggctcctgggtgggggcttcactccctgccacctgggacaccatggccagggagggggagggtgtgggtgggtggcagctgcaggaggggtggcctggcactgccccatcccgcatccagggctctgggtggaactcagaccccgtgccagcctccgtgggtgtgggtttggggtgaggtccccgtgccgtgtctgctccagccccacagggagctgccggctgctgtcacctcctgtggcggctcatcacatgtactctcggccagtggccattaagagccttgggagataatggtccctccgcgccggccgcgcactcaggcctcattattgcccaggcccaggcagcgctctggcatgtcccctcggggagggggtggctgatgagaagccgagggttggggcacgggggagggggcctggaaggagtcgctgaggctggctggtggcaccagcctgggaacacggagccaggcgctgttccgagcacaaggcaggttccaatgtcaggcctcacgtgcactttacagctggggacactgagcccaggggtccctgcgcccactgtgctcccacgtcagggccaggctgatggctgcagcaatgggggcgactccccggctggagaggggccaacacccccgcccccaatttcctgacctccccactcccccacgtgcaggcagaccactggactagggcacgcgggggccgcccgccttgtgctgaaaaaggaggcccagactttcgcagtctagtagtaaaatcctgaaacccagggatggagccctccccactttctgggtggaccccaaacgccttcctttagaaagatcatccactcctctcgggggctgagtgagcccaggcgtccaggagcccccagtctgtacagcagggagctgaaggctgggagagaggggtggagtcgggggtcttgctgaggccccctcccccagtgcctgg

SEQ ID NO: 27409 - DNA, 1801 bp, Artificial sequence
  DNA replication origin
ctgcgttttctgtcccgtctcccaaataaagagcacgttagctttccacacggggcgtgtgcgccagggcggggcttcccctcactgtccgtctgggctggagtctcagtcccccgtgtggcagctctacccacggactcatccgtgggatgacagggttggtgtcagagcccaggagcaggagcccccgggcctcagagggcaggacaagagcaggtgagggctggggctccacagcacagcccagccacggatggcgtgtccagcccagagcctggccatccggctccgctccctgctcgcctccccgctcccccaccagtgctggctcctccgtcctttcgccagagtcttggggccttgggacatcctttgggacccctgcacctccccgccccctccccccgcacctccccgccccctccccccgcgcctccccacctcctccccctgcacctctaggcccccagcctcaacttcatatcctttgagactgggcactcgctctgcccggagctcctcccactgctggtgcaccagctgggaggatcctccaggtgggtcccacccagactgcccccttccgcagccccactgtccccaggactcccagacttagacaggcagatcggcagggggtccctcccgcaccccccaggatggggcccacccggagagcatgtaggtgggggtgccgtctccaagacccaggcccatagggctcctataccagcctggaggggacggggaggtaacaggtacaagcccctctgcctcaaccacccactgggacacctgtgagctgggtgagatcagcaggtggaagatgctgcgcggggggcgctgggaggagagtggggcgcctttcaagtggggctaccggacctctctcccccacctgctgacaccccctgcagaggccactgctggagaggaaaaacgccaccccaagtctcctgctgtttgctgtggggaggggacggtgctgactgccagcacggtcacctggcgggcggagcctgcacggggagaaatctgggcgaggctgtgtgtgagcaggtggggcagggagggcttcctggaggagggggcctgacttccacagcacaggccaaggtacaagggctgggcctctcgcctcatctggagctcactgaggccaagcccttcaggtctctgggctctctcacccgggtgcctgcccaggcagcccctctccctcagccctgggccctgtgggaggaagaggtgtgtgtggcgggggcgtgcgagggcacccccagcaggtgggatggactcaggcggtcccccctgctgtctggtggtggggggagctgcatgtaggcagtggccaggccccagcccatgctggtgaccccggagagagggtacttatccccgttttgcagacaggacgccgaggcccgggaaagcccaggccctgccacgtgattcagctccaagccttagcacggatgggtcctcctgccctttctcctgcagccccgggaccgcccagggagcagggcagctgctgtgatttgggagaggccgtgctgcgataggctcattgctgaccggaccgggccccccaccagctcggagccccactgccgggcagcaacgattcctctgcccacctggcccctcccagaggggcagaccctgaccctgaaaggtgggcctgagagcttccagaaccttctctccagcacaggatgttccagagaaaatgtcacctcctgtcaccacggaagccatgttgttcgttaggagccgccggtcaccacggcgacaacca

SEQ ID NO: 27410 - DNA, 1346 bp, Artificial sequence
  DNA replication origin
cgcgcagcatcttccacctgctgatctcacccagctcacaggtgtcccagtgggtggttgaggcagaggggcttgtacctgttacctccccgtcccctccaggctggtataggagccctatgggcctgggtcttggagacggcacccccacctacatgctctccgggtgggccccatcctggggggtgcgggagggaccccctgccgatctgcctgtctaagtctgggagtcctggggacagtggggctgcggaagggggcagtctgggtgggacccacctggaggatcctcccagctggtgcaccagcagtgggaggagctccgggcagagcgagtgcccagtctcaaaggatatgaagttgaggctgggggcctagaggtgcagggggaggaggtggggaggcgcggggggagggggcggggaggtgcggggggagggggcggggaggtgcaggggtcccaaaggatgtcccaaggccccaagactctggcgaaaggacggaggagccagcactggtgggggagcggggaggcgagcagggagcggagccggatggccaggctctgggctggacacgccatccgtggctgggctgtgctgtggagccccagccctcacctgctcttgtcctgccctctgaggcccgggggctcctgctcctgggctctgacaccaaccctgtcatcccacggatgagtccgtgggtagagctgccacacgggggactgagactccagcccagacggacagtgaggggaagccccgccctggcgcacacgccccgtgtggaaagctaacgtgctctttatttgggagacgggacagaaaacgcaggacggcgcctgcacggtgccagatactcactggcagccaggcgcagctgcaggaccgtggggtagcggcgtggtggccatgcacgcctggcggtcgacatagaggctgttggtcttgacggcgatgtttttctccaggctcctgcacgtactccaggttgcccagcgactgctccacttctagaagcttctcccgcagcaccaccagggacgcatgcagcccctccacctcattccccagcctgagggtgcggggcatgagtggggctgcagaagggagcagcaggcaccttccagtctgggagggacaggacccaaggctcacaggctgggactggggcagcaggaggtcctggcaagaccccgtgaaggatccctaagggaagtccaccaaaaaaagccccggtctgtgattttccgcagcgtctgcaggcagcacagtgcctgtgggcctacacctggggcaagcagggtgctggcgtccccgtgccccggtgtgtgggccgggcca

SEQ ID NO: 27411 - DNA, 1336 bp, Artificial sequence
  DNA replication origin
ccggcccagccggaggccatggaccacgaggccacccgtgcagctgtctgcccggggatgggagagcgagccagaccccaagcacccagcgcgcacccagctcacccgcggggctgcccggagcaggacggggcggggcggggtcagtcccaggcaacggcgagaccgcatttccgcgcgcggccggcagagggcgagcgcccaccgcccacggcagcgtcgccaactcggggccggggagggagccgggaggggggccgggggggggggtgcggagactaggagggcctgtaggggggcggcaggggctgggggagggcgtctggggggcggtgagtgctgcgggggtctgtggagggaggtgggggctgtgggaggtgaggggggctgggggagggcgtctggggggcggtgagtgctgcgggggtctgtggagggaggtgggggctgtgggaggtgaggggggctgcgggaaggcggggcgctgggggcggctgcagcgtggggaccgtggggggtttggataccacagggaggcagggcatgagggcgcaagggtgggcggtggggggctgtgggaggcaaaggaccaccggggccacggagtcaaggaaggcacaaggggtgcgtgggtctgcgaggggcgcagggcggggtcgtgggcgggacgcggggtttcgaggcctgggggtgccgggggccaggagccagcttctggcaggaggacctgggcggtgccgtgactgcgtcctgtgcgacagtgtctgggcctgcggcttcacctagaggtcatgtggcaccaggtgcagcattgcctgctccaggtggggcgccctaaactcccagacccctgaggccggccgccactctgccccctcacaacctggcctgagcccccagcacctcccgtcccctggctgcccaccccgagggactccagaagcagaggccccacctctctgggctccccttccaaggatgtgaaaccaggtgacattgggcatggctggcaggtgttccaccctcgactgagcagctgggcatggggtgtgggggaggatggggcaggaggaggtttagggagcatgggccacccaccgtggttgtccccagccatcctggcccagccacagggctctgactagggtctcagcgtggcctcggctgcctgagtcccctgagtccttgagcagggctggggtcttgggggctgggggctctggggctggagcttggggggcaacaggctgtgctgactctccggacccctctgggtgccccgggaaggctgggtggccatgaacgacggtccttcatctgcacctcccctgggccc

SEQ ID NO: 27412 - DNA, 1568 bp, Artificial sequence
  DNA replication origin
catcccctgggcagccctcaggttgcaggaccctctggatctgtttccggcttgcacggtgggcctttccagcagctccggaatgctcccgatgagctcagcttcctggatgaggaggcgcccctgagccccagaccccggaacctgccaagggtcccaggaggcccggaggctgcaggccttggtcagcactagcttactcgggaggagcagagtgtggggcctgagtcctggctgggtgtccgggccaggccccacttgttcgccctcaggcctttcccctggaaagtggcacacaagcccagctccctcctcggtttattccgggcttttggatgttcttggtgggttggaagtggggtgctttcctccaggggcctctccgggctgctgggagggtcccctcatggtagttcccacgccccaggctttgggggtcatacctgccgttccccgtggttcacctccctgttcctgcactgggcaggcagggcgagcgagggctgggcccggggtctctgggctcagggcggaggggttagcacgggaaccacaggagttcttgaaccactgagggggtgcagaggaggggcctggggaggggaaggaaaggggaagggaaggcctggggaggaaggagggatgcgaggtcctgagctcgggggtgcagcaagggaaccctgaggctcctgcaccagctgcccccacccacatattttgctcatagacctaacagtgcgttcacagggaggccccaggctctgagaggtggcagaattctccagagcgagcactggggccaggattggtaaccccctcaccctacggggctgcttcacggacaggtcgtgctggattcggaaggga[450 bp omitted]ctccacgtagtcgcccacgaggtaagggtgccagcattgctcgtggtactgcaggttgttggtggcgatggagaagggcacggtcatggtgtccgaggcatgacacagctgcggctccggggccagcagcaggcgggtctcagcggcggtgctaccacctcccactcaggctccaacttccagccgcgcgtgtcctacggctgccgcccaccctgtgtgtgtggagtccctttgtgtgcactgtgccgcgg

SEQ ID NO: 27413 - DNA, 1506 bp, Artificial sequence
  DNA replication origin
tcagtcagggctgggagaaggcatggcagggatgcagtgggggcatgggcagggggagggcacggcggggccacagtgggggcatgggcggggatgccagaggaagatggccagggagggaggtggcccaggaaaagcctgggctcctgtggccggagcaaggattggaggtggaggtggagggggtgggggtggggacccaggggcctgtgctggggaggacctgggcctggggtggggggtccccagaacaggatgggccaggctggctgagcggagcctgggagccgctggcatctcgcggccaacaccacactctgctggccacagggggcatcgcgcctgggctgggactcccctggcccaggacggggtcacgtggtgcgcggggcactccttgcccatccagactctgccaggcagcttggcccaggggttggggggccatgggggcggcctccacagcacaggactgggggggaccctggctgggacacggaaggaggagggaagcgggtgcccagctctcgggtagcggtcccaggagccgagtgggcagagtctccacaggaactgcctcagtcttgggtcccctgggactgtgcgtggggctcaggctgcccctcagggcctggcctgggggtcctggtgtggtatcaggctggtgttggggccccgggggacagggagggaagccactcgcggggtggcagatactgggaatcaccgtcactgtcaggggtcccaacacccacccgaggccccccacggccccagccttctgccccgcggggactgcaggtgggcagagccttccgttcacactgtctggagctcagcatggaaagggatcagagaacaaaacaggaacagcagggggtaaaccaaggaaggggcacaggtgtcagggcagcaggccacctcccacccacggcctgtcccccaagcatggaacacagaagccgggcaccggccagccccaggatcctctaggtgacaggaacctttggccactgctgcttgggccatggcggggacaggggtcgtagggctgggcctgcctggtcctttaagagggacccccacccccagcagcccataccccctgcctctggggggcagctctgcccaccctgaatgccgcctctctcagccacttcggggggatccctggtgcccagtaatggaggccgtcggtgtgtaccaggcaactgggagccgcatcctgctctgggactgagtggctggagcttccccactgacctggctgggctgaccccacccctcactcccccggccctggtggacaccatggcacagatggacacgctcctgaccaagcagccggccccacagaccattccagttgtcccccaaagctgtgcgacgtggcctgaaacacaggtgcctgcacgtcctccagcctggccaccgctggctcccagtggcctagcacctgctggacaagtggctccagaaccatgacgccggccaccatcaccttcg

SEQ ID NO: 27414 - DNA, 1125 bp, Artificial sequence
  DNA replication origin
cccggccctgtgtctgcccaaggggatgtgtgcagaggcccacgaggtggggcgggggactgtggggggcttcggccactctctgtccttccctcaggccgtgccccccaggccggtgctgccccactcccagcaggtagggaaacggtctgggaggggccgcctgcctggccacacagtggacacagcgggcggctctgacccaggagctcttcctggggtgtcttcaccccctgagccggctgagggctgcggggctctgtggctgcaggggtcaagggcccagccccctgtctcagacaggcactcagtcaagtcctgtccgtcagcctgcagggccgactgcggtcacgggtgagtctgtgtcccgtcagcctgggagctcgatgcggcagtgcccccgccgcaccccagggcacctggaggcagaggctgagaggtcgcagagcccagaattcgcctcctcggcccgggtggtcccactggttccccgggtctgcaggtcaggggacaaacacgggcagttccgctcggctcagcccacagggaggtgccaagtgaaagcaggttcaagacaaaatgtggagctgggcgcccccccccgccaccgtgtggctcgagcctgcagccatctggggaaaccgagtcacagcgaggctccaggacggtcctcaggccacatcagtcccggaaggttccctgacatcccacctttgaagggcggtgagaagaggcccaggccactgccgccggttctgggtcagcctgcagtcctggcactgctgtccccaaagcccacatttcatgaggagcctccagtgtgcccgggagtgcggcgcacgcctccacgtccgccatcgggaggctgtcaggccgggctcaccgtggtcatagcagtgtgtgagtggggatccggccacccatcagtcagggccaggggtcagaggtcagtcagggctgggagaaggcatggcagggatgcagtgggggcatgggcagggggagggcacggcggggccacagtgggggcatgggcggggatgccagaggaagatggccagggagggaggtggcccaggaaaagcctgggctcctgtggccggagcaaggattggaggtggaggt

SEQ ID NO: 27415 - DNA, 955 bp, Artificial sequence
  DNA replication origin
tgaggccccgggtgtggagcggaggtggaccagaggtggacacagacccacgggccgccaaggcccacccaggatcccccgggggccatccacatctggtaaagccgaggtgtgggcggaccccaggaagcagcccccacccctgcccccagtggctcaggcctgggcagagaaaacaggcccagcagggcggcagggtgggatccccacgattcaccgaggatgcgtcttccacagggagagtttgggggagctgtgtgtgaaaatgtgagtaacgtacataaatcagtatcacaggaatccaggcgggcggaggatgcatgactgaacttggaggacgctcatcagggaggtcagtgctcccctccggggacaggatcctgccttcgcctggcctgcgggacagggctccccttgccggccaggggctactggccactgatgctcactttgggcttccgccccccaggggaaggggtgctgagagccccgtgtccggagggctggtgagtggggctgaggctggtggagtgggggtgaggctggtgagtgggggtgaggctggtgaatggggtgagggtggtgagtggagtgagggtggtgagtgggggtgagggtggtgaatgggggtgaggctggtgagtggggtgagggtggtgagtgggggtgagggtggtgaatgggggtgagggtggtgagtggagtgagggtggtgagtgggggtgagggtggtgagtgggggtgagggtggtgtgggtgagtggtgagtggagtgagggtggtgagtgggggtgagggtggtgagtgggggtgaggctggtgagtggggtgagggtagtgggtggggctgaggttattccagcctcgggcactggatcttctcggggtgggggggtttgtgagcgctgaccccctgggctgtctccaccttgtcctggggctgggtccccggacg

SEQ ID NO: 27416 - DNA, 2313 bp, Artificial sequence
  DNA replication origin
gaggggaggctcccagtgagacatcagtgacattgcagcagaggctgaggggccctcgggctccagctccccggtgctggaaccgactccatggtcacctggtgagggaggcccaggtgctgagagccacctgcaatcatacggccgggccagagctggaactgagaggcccctgcccctctccccaccgcctgctgtccggagggggctctggggaccgaggagccctctccccacccaggactcacccacctggagtccctttgctgtttcatctctgcagaggcctctgcagccccacagccccacttgctccccctcccagaggggctcagggccctccccccgccctccccccaccaccctcccccctccccttcagggctccgggcccctctgcagccagtctggatggtgaagacactgtggggacagagtaggcagaaagccctgcaggagagagctggggacgtaaatctggtgacagaccccagggactggttcagggcagggaaggaggcggccaggcattgggggtggggccgtcctgagccaggtagcggaggccctggggaaggtgcccgaaggtccccgaggagggggaatgggctgcatggggaggggatggcgagggcaaaggcacagggtagcctgagctccctgtgcagggggtggcctgaggccagtgcagacggggccaccccatcttcaggaggaggcggacatgaagggtgcagggctgctccagctttcttgggacaggccaccagcaagctcagcaggctcggggaggggccgttcctcagctctgcttcccacagataaagctggacagagaccccgcgccacccagctccagggacagagccgagctccaggcccaaccgaagctccagggcccagcagaagccccaccacaccagggcctcccctcccttaacttccacggccctgggcgccctcctgtagcccccactgcagtctgaggccctctgctgtcgtcccacctccagcccccactgcagtccgaggccccctgctgtcgtcccacctggacggggcacagagtccagcgtttccctcctcctcccaaagcgatcgaagtggccttctcagccccgagagccctgtgtcccctgatcgaggaggcgcccggccctgtcctcctgagaccctgtggccccgtctgtagggtggggggtgagggcctgtgctgggcccaggcagtggttggttctcagatcctgagcctctgtgccctctactgaggtggggacgcaccaccctcccgtgtggatggagctggggcggggtctgacgtccactgcatccaggcttagccccggaatctcaggtgtccactggaacccggagcagaggcagctgggggctgtggggatcaccctgatggacccccgttccctactgcagggcccaggtgccctcccaggaccccctcgttttgcccaggaggttggcaggggcagtggctcagcccagggtcgggagacagcctgtagggcccctcgatgcccaggacccttcctgaggccagcctgggacagatgcccctgagggaccctgcacagcaggcatgaccctccagaagcccctccctccagcctggagaaggcacaggtgcgtgtgggggtccgggcagttctgcagttagggtggtgtgtctccatatgggtcttgctgattaggaggaagccacatcttccagtctcgggtgggcagcagcaccaggccctggtgacaaaaggacccacgataggctttgcagatctgacacttgcctggggacccctccatcttatttgagaaagtgctgtgggctttgccgggaacccccctgctgtcctgcacctcttcggcggaacatctgagcatccagcatgagaacgtcaccaggacccttggagttgccgctcactagagcaccacagttctcccagtccaggaaggcttcctggaagaggaggcgctgagctgagcagggtggggagtgacagttgggggtcctggggctggagggggtgttcattcctgggccacaccgcacactctgagcacctactgaatgcgagaacggctgggcagggtgcagggaacgctccggaatggcccgattcaggtggggggagggaccggacaagacaatagaggaggtgttgataaggacttgggagagcgcaggaaggaagacgatgggatgagaggcgccccaggcggcccccgtgtccccaggacacccccatccccactgctgtccatgggagccatcagtgtcgccgggctctgggtcctggg

SEQ ID NO: 27417 - DNA, 1500 bp, Artificial sequence
  DNA replication origin
caccatccagtgccgcagggaatgggcaaagctgtcccctgaggcagaggcgagctcgcggggagttgggggcagggccagccctttcccaggggcgcaagcagagttgggcagggcgtgcagcctggaggaaggcgggggcaggatgagacagggaccccaggtgcattggagtgaggctcccagtccaccggcacgtaatgtgcgctcacgggtgctgggccctgggctagctgccggggtctgccctctccacagcggccgcaggggccccggggcatggtgggcgaggcagaacccagcaaggagacacacaccagctgggagccctccacgcacaccgtcttcagcccgcacgatggcgcagacgccccagcagcgaggcacgaggcccccggggttcacctgagggtgaagcacgctacccgccttgtggactcagccggagcctggggtggggggctgcaaacagccgctgtgcaggtaccagcaggggcggcagcccgcacggagcgggggcaagcagagggaggggagtctgaagtgcaggaaggctgagtgtccctgggtgtatctgccggtctcccggaagcagatcctcccggaagcagatcctcccggaagcagatcctgactcagtacagccttcccaggaaaaccccgcagcaggggcaggcccgggcggagggcggccaggctgggtgcgagggccacagaggaggccccagagcggtgggcacgggcctccccacgtgtctgttcaggagggagctgggatatttagaccccaccccagtggtccctggctagggccctcagcgccctggggctcaccatgcgggcacaggaggtttggggaaggccccgggcactaccctgctaatgagcgacgtgtccccagtcccgcccggcctcctcggggcaggcaggcacaccaaggcttcaggactgtggggttcagtcctcacccccgccccgcaaacaggctggaggtggacttggcatggtgtggcctgggcagcctgatcccaaagtaaaacattcggcttccggggctgctgccttgaaaggcaaatatcacctctgtttccaaaactcgcctctttgggccgggaggcgtctgtgcaggatccctgggccgggtaactgtcccgtcctcccacatccactgtgcccgtcccccgatgagccaggccagggcatctcatctgctgctgctgcgtggaggaccccagaagtcagggcgtggcccccactgcccgtgttatgggtgaagaaatgcaggctcagacccagaggccctggaggaccttggaaaaggctggttctaggggtcagcctgggctccctggggtctgcccaaggaccccaggctctcaggaggggccctatgggagaccagggagggacacagcggcctacttggagggtgtttccagagccgtgtccccacccctcatcctcacagtcagaacccgcaagaaactgatgcccaggcta

SEQ ID NO: 27418 - DNA, 928 bp, Artificial sequence
  DNA replication origin
ccgctgtggagagggcagaccccggcagctagcccagggcccagcacccgtgagcgcacattacgtgccggtggactgggagcctcactccaatgcacctggggtccctgtctcatcctgcccccgccttcctccaggctgcacgccctgcccaactctgcttgcgcccctgggaaagggctggccctgcccccaactccccgcgagctcgcctctgcctcaggggacagctttgcccattccctgcggcactggatggtgtttcctgggggccagaggcacagctcatttaatatgaacaaatggatggagggccctcagggacccctgcccctgtcctccaggcccctagcccgcccgaggtgcctcagggcctgcggtggccacagccgtccctcctgggctgtgcaccctcccaagggacaacccatgtggaggctggggacgccttcacttcgtgagagctggggccaggccaggctcctcagagacccccagaggctgcccaggaggctgggggagaaagaccaagggtgtggtctggggtccatctggcgagggccggggaaggctatggctgaggggccagaaggtccccggggcaagcactgcctcaggcccctgcatccctctcctctgaggcctgagtgatgggtggccccactcccaggtcacactgcaatgacctttgacccccagtttatccatcaccccgataatgctgcccccccaggccaccagcacccaggaggctttcctgggcccacctgtggatgtgtcccccagccccacaccaggcaggccctgggaaagacagcggatggggacggcagagggggcccggtgcacgtcagctccttcccaaagtgcctggcccctctcttgctgtctgcacctaaatcatcctccaagctgggtgaggctcccc

SEQ ID NO: 27419 - DNA, 1083 bp, Artificial sequence
  DNA replication origin
gggccggggaaggctatggctgaggggccagaaggtccccggggcaagcactgcctcaggcccctgcatccctctcctctgaggcctgagtgatgggtggccccactcccaggtcacactgcaatgacctttgacccccagtttatccatcaccccgataatgctgcccccccaggccaccagcacccaggaggctttcctgggcccacctgtggatgtgtcccccagccccacaccaggcaggccctgggaaagacagcggatggggacggcagagggggcccggtgcacgtcagctccttcccaaagtgcctggcccctctcttgctgtctgcacctaaatcatcctccaagctgggtgaggctcccctgggtaggccgggggcagatgcagtggggggggccggagggtgcagtgggggtggggggggccgggggccagatgcagtggggggccgggggtgcagtgagggtgggggagcagggatgcagtgggggggggccgggggtgcagtggcgggggaaagccaggggccagatgcagtggaggtggggtggacagggcacagtgggggtgggagtcccaggggccagatgtagtgtgggggtgggggtggaccggggacgcagtgtgggtgggggtcaggggatgagctacccttgtgcccgcccctggtccaccatacccagcaacaccctcttcctggcatggggctgttcctggctccagagacttcagtatcgatcccaagaccgagactgctgtccgggccgcctgcccactgccttgtgggaacctggggccaggtccctgtcatgttcccagagcccggctccaaggaagctctgaggcctaggcagcctggacaaatatgcccctcgggtcttccccaggcctgggcctgcctgagctagcggctgcagaaaagccttcctgggggtgaggtacccatggggcagcccacccagcctgcagcccccagaccaggctgcggcacggagatccccagactcccacccacgccccctgagcccattcctggcctctgctgactggccgccaaccggtccctggcctctcct

SEQ ID NO: 27420 - DNA, 1652 bp, Artificial sequence
  DNA replication origin
catcccacccccagggaacacccagcaggtaaggtgcgtttggacaacccggtttcgcgctagcaggcccgcagggctgggggaagccgcaagcctcccaggggaccacgcctctggtttggtgtcctggcagcacagccgccgtccagggccacagggacagcagaggtgggggcctgtggcctggaaggtgcaggacggggtctcctctctgctagactggactggccctcactcccttcacctgggggtggacgcaggcctgggaagggggacgcagaggggacccgggcagtgtgaagcctgttactcggaccttcttgtgttttgtaagcaagagtggaacggtcagctcccccagcacccagaggccagcccgagtccctgtccaggccgccgaggcctccgccctggtctgtctcccagcagcacccctggcccagcctgcctgggcctgctctgagccaagcctggaggggcggccgttgcccttggggcttcaggggcttaggtggacccaccaggctgggttccctgggggccttcctgggcagacgctggtcccactgggagggtagagctagtggtggacacagcgtctgtcccagccgtgggccaacaggaggtgagccccagaatgtgctagaaggtgttaacctcgtgtggccgtgcacatggggcagtgggtgctgtggtcctgcaggcgtggctgagcatgtgggcccacagaccccatggggaccccacgcagatcccaggcagatcacatgcagcccccacatggcatcccatgtgcccccaagcgccccctcctagcctccacatgcagaccaagtggctcccacacggccccactaagccccaacaccccccaccaaatccccactgagtcccctctgcgtctcccggccccagcctggcctccgcccctcgctggctagtcagttcccggcagcagacgctcccccaggacgggttcctaatgaattgtttgatctcacgcccctgtttgatcagaggagggagctgctctggaaataagcaggtggccccagacccggcggttctgccccacggggagcaggaggggacacgaggtggtcccagtgctggggggttttgtcctggtggggtggggagcctggggaggggcacagcagcagcatgtgggctgtgggctgttctctctgtgggctgtgccttctcttgcaaaccagtcctgatctgtcacctgcggaggggtgggcggtggaccccccagaacgtgagcacaccctgcagctggagcctgtggaggcgacattcttgggaaaaggatctttgcagacgcggcctagtcaaggactaggcccaggtgggaccgtccacatgggccttcgctcccacactggcgtcctcagaagtcagagcagagatcagagcccaggacgccaggagccctccggagctggaagaggcaggaagggacctcccctgcggcctccggaaggcatgcggccgtgcccacacccgacgctggacttctggcctccagcactgggagagaggatgcttctgctgtttgacaccccccgggggtggcattgtgtcaccggagccccaggaacccaacacatcgcccgagcttccagtcacgggccgagcgcagagct

SEQ ID NO: 27421 - DNA, 1155 bp, Artificial sequence
  DNA replication origin
gtcctggtgtcctgcgtccccactccaactgcctggcaggcgggccctcgtgaccatggggtccctggggtgtttgctctgggtctccctgtggggtggcttctggcacagagcccccagggctggggtgagtcggctctgcagagtatcagcctggaggaagtaagaggtgagcaggcctcccgatgtcttgccggccccaggaacgggagacagaacccacacgcaggccaggcccgtggctgccttccaggtggacccagcgcttcctgaggcctcctgtgtctggaggccctgggctggccctcagggcgtgaccagggctggaggagaaacagggcagggaggaagaaacctcaagacagcgggagcccgagcctcacggacgctctgacagccccaccgtcgcggggaccaggcacccccggccctggcctctctgggccgctcagaggtgatctgggtctgaggcatgatggccttcctgcctgcgtgacctgggcaggtgtccttacctcctgagccttggtctcctcacctgtgacaggggtgtagtcattgttcctgtgcagagggtggccacggctgtgagacacgggaaccgtgtgcctggctgagacctgggtgcctggcgtgtccacgccttggttatctctggaggccttcctgccggaggacagacagagggaagctgggcagagcccgggaaggagcgaggccctgcggttgggggtcttcccatcccacccccagggaacacccagcaggtaaggtgcgtttggacaacccggtttcgcgctagcaggcccgcagggctgggggaagccgcaagcctcccaggggaccacgcctctggtttggtgtcctggcagcacagccgccgtccagggccacagggacagcagaggtgggggcctgtggcctggaaggtgcaggacggggtctcctctctgctagactggactggccctcactcccttcacctgggggtggacgcaggcctgggaagggggacgcagaggggacccgggcagtgtgaagcctgttactcggaccttcttgtgttttgtaagcaagagtggaacggtcagctcccccagcacccagaggccagcccgagtccctgtccaggccgccgaggcctccgccctggtc

SEQ ID NO: 27422 - DNA, 960 bp, Artificial sequence
  DNA replication origin
gggtccacctggaaggcagccacgggcctggcctgcgtgtgggttctgtctcccgttcctggggccggcaagacatcgggaggcctgctcacctcttacttcctccaggctgatactctgcagagccgactcaccccagccctgggggctctgtgccagaagccaccccacagggagacccagagcaaacaccccagggaccccatggtcacgagggcccgcctgccaggcagttggagtggggacgcaggacaccaggactgcagggcccccgaggggttcctgacaccacacagcctaccatggcagagccggccaggccacgctgggagggacttggctgagagcacggggcatcctaggcccaggacgggcattgcctcccctcagtgtgtgggcagaagccctgctgggcggggtcttcagggatcacggagggcagggggaccaggcacctgccccaccccaccccaccccgctctgcgtccctctaggagtccgctcaggaacacttttggggaaggtgggtggggcggtggctgccatctggaaattctaggagagcccccacccccagccctctccgggggccaaagatgcaccattcccaggtgtgtgagggaggatgagaaggggctggtggctcatcttctccttgggagagcacggtgagggatggtgtctctgaggagctgactaaggtctggaccctccccagaaggaagccccagcctctcccgccatctcggctccaaattcaggggccacaccctcccaatccatccatggactctgaccaagaactttgagtgagccagccccgctgccacctgcacacagagacagagaatgaagtcctcccctcaagcccgcccctctgaagggaggttggggagcacctgctgtatgcccggtaggcagggcccgggtgccccacactggcatccctcctcccaattt

SEQ ID NO: 27423 - DNA, 999 bp, Artificial sequence
  DNA replication origin
ctactcgagaggctgaggtaggaggatcacttgactctgaggggtcgaggctgcagtgagtggagattgtgccactgcactccagcctgggcgacagagcgagacctgcagagacggctgcaccgctgggtgcactgaaaactcacccataagtgggtgagccgtccgtccgtgtgtgagctccgcctcaggctgtgaaagcagtcatgaaggatgggagcccgcacgtgacaaaggctcagaaagagggaggccatttttaacagctccctgtgggggcggagccagagggcgtggcctcatgggaggagacagaacccaggatggagctgggctgggggagcagagccttcagcctgtcccttggggtccgcaggatctcggaggccctaggggtggggctgcctctggcctgggccaaggccttgaggccggggtggacacgtctggttcagtctcctggacccaaatgtgtcagggaagcctcctccgagggcatggggggcagggagctgagtctggggtgtgtgggggtgggcagagggcacgtgcctggcagcacccaactctgcctgagctgctgaatcccccggatcactgtggagtgggaaggaggaggggttgacctgggagggaaagtgacaggatggggtgagcccaggccgggtgcttccagacagacttcaaggggccgtggaaggcgcaaagcagacatgggtgcccctctcccctgcttggttccctcaccagcccccagctctgcacagcccctctgcttgcaggaagggctgagctggtgcagagtcacggggtcctttcttagggagtcctcaagaggtaatgcagcaggtcccccagatcccaggtctggccaccagaccaccctcaacacccccacctcgccctaccccagcccaggcccagccccgggagctccaaggagatccacacaagaggagcccctgaaacgtgggtctgcaggcagccccgggtccgtca

SEQ ID NO: 27424 - DNA, 1043 bp, Artificial sequence
  DNA replication origin
ccaaccccgctgcctcagcgagactcacccaggggcccccgaggagaagtgcaggccccttccccctgccagcagctgctccttcagccaggccagcagaagggccttcccctggaccctcagagcaagtggtttggtcgggaaggggtggacccttcagacattggggatggccaggcccttgtcccagggagggctggccgcacctcgaggtgccagcaggtgggggcaggtgcccaggctcctgactccccccagggcacccctccaggctggaagggtggttttgcttctgggaccactgctttgtgcaccagggagcttgagctcccaggtgtgcacctcagcacgcccgccaacaaggggcccctggtagtgggagagaccccttctccctccagacaaagaggccctgctccagggcgcaccctgagaccccagacccggagaggctgtggggcggctgtggcttcccacctgcgggtgagcagcagagaagcaggacctcccccgggtgggccacatcgtgcagggtgaagaagaggccctgcccagctggggcccggaaggacacacagcacctggggtgggccgaggaactggaaggcaggagtgtgggggcctggctggggtacaggtcctttcagcagcacctcctcctgtatacgggaactttcaagaaaaggaaaacattcagtctattttaatgcaactactcagcgatggagggccacagctggtgaattaggccttcaaaggtccaattaaggttccagccacagaggagcaggacctaggagagccccgtgctttggacacatccgtggagggaggctggagcaggtggggagacacaaacgctgaatcggagtccggtccagagggcacttggaacctctgatctttttatcaacaccctgctcgttaaaagttagggtgggccaggtgcagtggctcacgcctgtaatcccagcactttgggaggccgaggtgtgtggatcacttgaggtcaggagttcgagaccagcctgaccaacatggtg

SEQ ID NO: 27425 - DNA, 824 bp, Artificial sequence
  DNA replication origin
cggggcggggccagcgtggccggggcggggccgggggcggggcgggcgggggggtactggggaggatccgcccccggcccgagacgcgcgcgcccgagcgacccctccctgtcgccgcccggcgccccgcccccccccgggtgcgggaagttggaccccgcccgcgccccctccacgcccccgcactgggctccccgcttttcgtgctccccaacaatgccgggcgtggggtgcaccagggggcgctcgcgggaggctccggcggggtgggagggggagcacctacgtccttccctgcccccaactgcgggggcggccgagccgccgatgccgcgcccctccccctcccgctccggctccccctcccccttcgcgctgccgcgcgcgccgccgccgcccccacccccacccccactacgacgcgggcccgggtcggcggaggggcggggaccgggcgggcgtggaaggcgagaggctgcgtgccccttccccgccgcgtgtgtgtcccgggtgtgcccgcgcgcgcgtgtgtgatggggcgcgggggcgggcgggggtgtgctttacggctgggcgctcctgcactcgcatctctccccgacacgcacgggcagtttccgcgaacttgtcctcgtctccggtcccctcccgcgtggggatctgggggaccctggggacggcagcctggtgctcctgcatcctccaaccccgctgcctcagcgagactcacccaggggcccccgaggagaagtgcaggccccttccccctgccagcagctgctccttcagccaggccagcagaagggccttcccctggaccctca

SEQ ID NO: 27426 - DNA, 1104 bp, Artificial sequence
  DNA replication origin
ctgggcgcgccgccccctggccctgcggcgttggtgggggcgtccccggagagccccggggcgccgggacgcgaggcggagcgggggtccgagctcggcgtgtcaccctccgagagcccggcggccgagcgcggcgcggagctgggtgccgacgaggagcagcgcgtcccgtacccggccttggcggccacggtcttcttctgcctcggtcagaccacgcggccgcgcagctggtgcctccggctggtctgcaacccatatccttcccggccggcggggggcggggggcggggggcgtggggagggtgggggcccggggcgcgggactccctcggcatgcgcccccgcgcgcccctgttggtgggacctggcgtgggccgggcgcgcgggggtgcagggcaggggctggaggaccgcgctctaatttctgagagtggcgggcttggggggccaccgggcgcctccggactcccttccccagggccggctccggacggagaaggtggaagcgaagcggtgaggcccccgcgggcttggaggggagaggagtcggggagggagggaaggtcctaactcctcgcggccccaagggtgttggccaggacgggaatttcccccttgcccacccctcactgtctgaaggtcctgcccgaggcaggcccctcgcgggggagggggaggccagaggagctggagtcaggggcgcaaagttttcagccggcgcctggtggttccgagtgcgtggggagacccgtggggcctgtgagcgccgccagggccttttccgtggagagaggcggtgacgttggttgtgaactcgctttttctggctgaactcggtggcggggctgacttaagtcatgcgcagctgaagggtagggggcagggaggcaattggcactgccaagggggagtctcatctccccagccccttccctggctggagaggaagaggcagcctcttctactctcggccagagcggcacagactgcagagaaggttccagaacagagttgggtcagggccaggggcatttgtgggatgtacacggaggtccagggggccccccagcaggtggccttgggggcgggtctccgcgtgcc

SEQ ID NO: 27427 - DNA, 1304 bp, Artificial sequence
  DNA replication origin
tgtgggatgtacacggaggtccagggggccccccagcaggtggccttgggggcgggtctccgcgtgccctgagaagggccttgcgtggtgcctgtgtcagggccgggtctccccaccggcccttctgagccggcagctggggtggccaggccgtggcttctgctccgggcctggggacgggtggagagaccctgcccgcagacgtcccccgtcggaggtggggagacaggctggcagcaggagcggcctgtgtacacttccctaccttgtgtgtttaactgtacaaatattaaacacgaaagaggaatctgtacaaaaaaagtcataaagcccgtgtttctcctttctcaaatccaaacatcgagtgagtcagactcatctctgcttgtagaggaagaggaggctgctgtggtcccgggggcagccggccccggccagagggctgcctcggagccccacacccgctgcccgggcggcctaggcctctgtagcctcagggtggtgtctgcgagtaggtgggtgtccccgggagccgaggtgcaggcccggccttgaagagcggttgtaggtttgtctcctctctagaaccaaggcgggaggtggtcatgcccctttgttctggtaggaggtgactgggtgtggggttagtccggcggtgccagcaggccatggggaagggtctggaagggactgcatgggttggaatgggaggctggccccgagccaaggcctgcgttccttgtttcccaacgtgtgcagaccggagaagggaaagagttgagcaagcctggactctctcctcacagccccgggcctggctgccccatccccaagcagggcatggactctcttcacagccccgggcctggctgtcctgtcccctctcggctgagagagttttggagcctggccccggtgttctgggctggctgtgtgtctcaggacttccaaggaggttgtttgcgttgctgtgtgcagggaaggtgttggctgggtggcctcatgcaggtgggatgagctctccagggggagaggagggctggggccagcggcatcacgtgacccaagcgctgtcccccggtgtcctgaggagctgtccttttgggctttgtgacctgacaggagtatgctctggtagcccgagagggacttgggtgctgtcctggtctcgggggctggatggtgctctcagcctgggaagaacagagcatgccccatccctggtgtccccagggctctctgggctgggagagaatgggtggtcggcctcctgcccttcgatggcatcccttgcttggagcact

SEQ ID NO: 27428 - DNA, 2155 bp, Artificial sequence
  DNA replication origin
gtgtgtctcaggacttccaaggaggttgtttgcgttgctgtgtgcagggaaggtgttggctgggtggcctcatgcaggtgggatgagctctccagggggagaggagggctggggccagcggcatcacgtgacccaagcgctgtcccccggtgtcctgaggagctgtccttttgggctttgtgacctgacaggagtatgctctggtagcccgagagggacttgggtgctgtcctggtctcgggggctggatggtgctctcagcctgggaagaacagagcatgccccatccctggtgtccccagggctctctgggctgggagagaatgggtggtcggcctcctgcccttcgatggcatcccttgcttggagcactgggtctgcctgcggcacggcaggaccccccaccctcctcgccgccagcacctctggcacgctttggctctcccagctccaaacgcagtgatggggggtgtccccactccaggagacatgggaagcagagcttagaccccaagcttggttcattcttggccccgtggaaacgcccgtcggtcaggtggagtgggcttgtggaggccccggctgcatgggggtgggtgtgaccaccagcagatgcctggcctgtagcgagggtgtgtgtcctggcgtcagagagaacctaaaataagctggcaggcctggacaggtggggggattggctgagccggggaagcccatgtgggccatggctgaggctttccagagcgcttcagattcctgggagttgggagggggaggctttgcaggaggcggcaggggcggtgggcgactggtgtggctggggtgtgtcccgtagcaagagggtgcttcctgggcctcagcctcccctccctccgcagggccccgcatccctcctgaagagggtgaactctgagagggagggataatcggatttgctcagggaacccacactcagtaaagtgactccatgctcccgggggttggcagagccccagctgctgtccgccgggcccagcctgagccggggttcagtcagcacaggaacctgggggagggcccgcgtttatccctgaacctctcctgaaccccggggtagacgctcagcaccagggagcacatgcgtgctggctccatctccagggtgactccatcccaggcaaaggagcctccaaggacgcccttatccttattgattggtttcttaaaaatataattgtcttagaacttttggggcgagcgctgcttctcctccacaggtttatttatagagaaaggtgggtgggatctgtgtgttgtcgcccggctgggttatgtgctgcccggactcccggggttcctgactccgcgttcgcctgcgacacagctgccgccgtcccggcacacggacggggcggggcccccgggaatgcttggaggccaggaagggggaccctgcttcggtccctgcgagagcgagggaggcgggctgtgggtgtgtagggaccagaaggtgaccaaggggtgcttgggggctgggggttggcaggaccccctgggaggcgtctcccggggcccaggctccaaacaccccgtgtcacggagctctgagatggggaaggatatatcaaggtcatcgggatgctgaaggacagagctgggtgagcccatcctggctctgagggccacgtgtttggcagagcgctgcctgggtggggacgagctgcgggagcctgagacagcccttcatggcatctctgaacactcggcgctggggctgtcacgctgctccgcgggcgtcccccgggagtgtgagagggcacccgtctggaaagggccagtcccgcctgcgcccgcctccccgggctccacgtgccccgcaggcctctcgtgggcaggacggggctggtcgtcccctactgaccttgcatcgtggggaccctcttgaacactttgtcttagcagcgtccggacatccgaactggtctcagaggggctgcctcagtggtcggaagtcacaggcccaggagggcccaaagctgtcccttgacccctgggcctgaactccaagctgggggtcactcagcagggtggggcttggcagagtctccgttacagactggacgtcccgtcccttctgcctgggtggaccagggtgtgaactcggccgttgcgcccg

SEQ ID NO: 27429 - DNA, 1322 bp, Artificial sequence
  DNA replication origin
ggctcctgtgcccaccgggctcatggactctgcccctgtcgggcccaccccaccgtccgaggggccccgaccatgcctcggtcacagggctcaggccagcctcgttctaccccgggatacggacacccgggcactctgcggggaactggccatgaagacgtctgccaaggcgttcagaggctctccccactctgcacggctccccaagtccccccatcagggcctgaaggctgtgctcagggactccctccaccctgaagtgcctcaggcaggcgaacaggggccctgaggtcagtcagtgccaaggacgatcccagcgatgaaggatccgggcgacagacggacggtgaaacccgagacccctgcccggtcccagcggtgcgggctgagcgggggggctctgcggggccaggggtgcgggctgagcgggggccctgcggggccaggggtgcgggctgagcggggccctgtggggccgggggtgcgggctgagtggcgccctgcggggccgggggtgcggcggggcaggagcggttgtggaactagagctctctcggcaaactcgttcccaagagcaccaaggtcacatgcccggcagccccggccgcagaagcgggtctgggaggcgcacggtccctgccagggcccggcctgctctgggctccatctcctccctcctccccagcggggcctgagtcccgagtccatcggggtagccccgacccggagggtgagctcagcctgctggcgtcacgcccacttcctggcgggaacaagatgacgtcccacggggcgtgcggccctgatgcttccatgaaggggagggaatgactacgacaggcgctcggcagacccctaccctgccatcatccccgggggcctctcttcccatcaccccgggaaggatgagctgcccccaggcgctcggcggaccccctaccctgtcgtcacccccgggggcctctcttcccatcgccccaggaaggatgagctgcccccacggctcccccagctcttggtgagtgggaaggcccctccccctgagccctgcaacgctcccagtctcagccccatctgtgtctctgcttccttgcaggatcagctgtgggggtggggaggcagcctctcccaccctgtactagcccaggaggcagggacacatccagccctctcgtgggtaggccgtagggctcagtgggaacccacacctgtcccaggaacactgcaatgccagtcggtggcttcagagactaatggatccatccctgcaactctccttcccgtcagaatgcgggcaagggcgccacgggcaagggtgccac

SEQ ID NO: 27430 - DNA, 1845 bp, Artificial sequence
  DNA replication origin
tccccttcatggaagcatcagggccgcacgccccgtgggacgtcatcttgttcccgccaggaagtgggcgtgacgccagcaggctgagctcaccctccgggtcggggctaccccgatggactcgggactcaggccccgctggggaggagggaggagatggagcccagagcaggccgggccctggcagggaccgtgcgcctcccagacccgcttctgcggccggggctgccgggcatgtgaccttggtgctcttgggaacgagtttgccgagagagctctagttccacaaccgctcctgccccgccgcacccccggccccgcagggcgccactcagcccgcacccccggccccacagggccccgctcagcccgcacccctggccccgcagggcccccgctcagcccgcacccctggccccgcagagcccccccgctcagcccgcaccgctgggaccgggcaggggtctcgggtttcaccgtccgtctgtcgcccggatccttcatcgctgggatcgtccttggcactgactgacctcagggcccctgttcgcctgcctgaggcacttcagggtggagggagtccctgagcacagccttcaggccctgatggggggacttggggagccgtgcagagtggggagagcctctgaacgccttggcagacgtcttcatggccagttccccgcagagtgcccgggtgtccgtatcccggggtagaacgaggctggcctgagccctgtgaccgaggcatggtcggggcccctcggacggtggggtgggcccgacaggggcagagtccatgagcccggtgggcacaggagcctgtgcgggaggaggcgttcggactgagacctggatggggtgtgccgagggaagaacgtccaggcagggggacagtgcaggccttgaggtggggggatgtctgtatagcagatgagagggagggtgaggggcagggtgggccgtggggaggaggtctgggcgcgtggcggtggcacaccggtgtgatgacccagttcccgagcctgccctcgggagcttgagggctgtgaggaggcagagtgcgggtggggacagcaggtggtgggctggcctgggggcccagggctcagcttgcctccaactggcgtcacaactgctccttagggaggggaggcctgggggccgggcttagcaggaagtcgatgagagagacggggctggaagggcaggtgagggccgcacagggacagaggctgggagtggggagcactggtgtcccacacactcaggcccagagggcgtggctgctgccagcccctgaaggaagctcttggactcgtgggcaacacgctccaagcacccgaacttcattcttgccggggccagctgcgggcaccctccctggcctggtggaacgctcaggggtggttctgcatactcccctcacctcccccaagggctgagagccgagggcgatgcggccccaccaggccgggctcctggagctgcagaagagacgtcccgttccggggtcaggacaggaggaatgcgggggaggggccagcctgtcaaacactccggggatggatccacagcagctctgctggctgagtccaagccacggtcgcacagtcaaggtcaggcgaggaacgcgttacctttgtttatgcagatgtcggccaggccgtccgtccagccgcctgtgccgagcccgctgtgggaagggcggggactgtccctgcctgtcctcgtcagtgggcattcccctccctggcacggaagaggagtctctcctcagtggctcatgttggcgtaacttggaacaactctaagtcacgcgggcccaggttgaatttccagggt

SEQ ID NO: 27431 - DNA, 1156 bp, Artificial sequence
  DNA replication origin
gggacggagtagcagcttgccgtggtgcagggggtgtgccgccacgtggccgctggtgtccctggcctccgtgcacactcctcgcggggcggaggtgggcccgggctgacgggagaagcgggccgttggcggggccgtgagagcccccgggtttgatgagccggacggttgatgaatgtgctccacgaggcctcctttgtcctcttgctgccgcccggtcgcttgccgggagcgggagctgtgggcagagagatccttgggtgggtgtggccgccgcctgcgtttggaggccccgtgcagcgtcaacccgggacgccagagcaccccatcctcgggtgcgcggccggcgaggaccgaggcatcagcccagtgcggcccccccccagcctcggtgcagccctgggctctttgcccaagttgagagcagggctggcagggagaggatccggaggcccccacgctgcctcggggtgaagaggctcctctgacccccaaggtgtgtagacctgacacagttgcacccccagccctgctttgatgtctgcagaactggctcctgcagaaaaggccttgagcgagacctcagcgtctgctggccctgctggactcgtctgaccctgggctgctggtggtgtgggtgcttctgccgttggcgactgatgggagcgaagctgttcctttgtggatggaccgttaggtgacacgggatgttggcattaatgaacgctgtcaactgagccggtggcagaggtgggggcaagccctcgcctctgttgaccgccaggccgccctgtgttctcaccccttctcccctccccagctgtctgcacctgggcagagccccctggccggaggtggttgtctctgggcccctcactggcctgaggactgaggtggggataccttgaggcctttttttgggcaaggtggtctttagtagccccagatgttaaagactcagcctcaactgggtggagcctcctgggattctggggtctccatggccacaggaggggggctagcgacccctgccagcctgggcagtgcctccacgtgggcctcagtttccctgtcacaccactttggtctgtcatctcggtcactgatggagtgaggctcccagcaggcgggtgagagaaggggccagatgcggtcc

SEQ ID NO: 27432 - DNA, 846 bp, Artificial sequence
  DNA replication origin
cagctgtctgcacctgggcagagccccctggccggaggtggttgtctctgggcccctcactggcctgaggactgaggtggggataccttgaggcctttttttgggcaaggtggtctttagtagccccagatgttaaagactcagcctcaactgggtggagcctcctgggattctggggtctccatggccacaggaggggggctagcgacccctgccagcctgggcagtgcctccacgtgggcctcagtttccctgtcacaccactttggtctgtcatctcggtcactgatggagtgaggctcccagcaggcgggtgagagaaggggccagatgcggtcccgggagataggctgtcagccccgtccagtcggtgggtggccagtgcggcggctgatgggggacagaccgctggccaggccccacgccagccctgtccccatctgtgagcagcacccggacctcctgggtccccttgccgcagcctgcctgtggggtgggtccgtggggtgggcctggtcggacgcgttaatggagctgcaggcaaggctcggggcagatctttctagaaggcagcagagccatcacggtgggtcaggctgtgtcccgtgaagtctgaagtggactggcagaggtgggcactgaggtccctgctccggaccctgtcggggtcgtgtcacctcctgggcgttggttttctcatctgtgaaatgggcctgctgccctcctggcctctgggtgtgtggcggggactcctcgtccccactcagtcccatgggtgatgcaggacatgggatcctgtcagccccatgacccctcgccctgggcctctggcctccagagccccaa

SEQ ID NO: 27433 - DNA, 1278 bp, Artificial sequence
  DNA replication origin
ccaggatgcccgttcagttatgtttggatttcagttaagtaagaatgtcttagggtgaggggtgtccatgcatgtttgagacgggcggcagtgtcgtcagttgcaggggtgcagtccaaggccccaggaatacccgaagcctcagatctgatgaaccctgtcctgtacgtactgttttttcttttcttttttgagacaaggtctcaccctgtcgcccaggctgagtgcagtggtgcagtcacccctcactgccacctcgatctcctggttcaggtgaccctcctgcctcagcctccccaggtgccaggattacaggtgtgagccaccacgccgggcctcatactctgttctctcagcctgataactgagatggctgctaagtggccatcaggtgggcagtggcctgcagcgtgggcacaggggcgatttggaccccgggcggtgccgagcgtggctacaccaggctcactgctgcacagaatggggcacagttaaaacctgggagtgaggcctttccgtcggagacccttcggatctcccttctgtgagatcttggccctcaagccccgcagaggggcctcctggggttctgtcggtggagctggggtctggtggtgctgccctcactggccgggctccggatatgctgcttggggtggagggcggctgtccacagccctggggtctggaggaggtgtgggtgagcccgtggccccgtttgggtttttgggggtgggtcgagtcgccccttttgctggtccctggcttggcagatgtgtgttttctccttgggtgcagcaggtggggcccctcggtccagcatgggctgacctcagggtgatttgtctccgtggggttctggggcgtgaaggacacctgtgcaggggtgggaacagtggcgctcacctgaccggggcaaggagggggctgatggggcaggaggagcggagaaggtgctggcatgtctgggcccgggagtgggtgggggtgcggcaggcaccagctgaccaccgtggcgcgattgctggggagacggggggaagagcagagagcacacgaggcacaggccccattggaggaacattctagaagccagatgtagcgtcacaggaatggcttcagcgggcctgggggcaaaggctcagaatcggcagacccagaccccagttggtgtgtttgaaagctgagcctgctggtcctcccgggccacgctctttcgtgacagcacagagtttttattttctaaccttccgtggaaatctgggtcactcaaataag

SEQ ID NO: 27434 - DNA, 1727 bp, Artificial sequence
  DNA replication origin
ccgggccggtcaaccaggagcagctggggattagtgacaggcgttgccacggcaaccccattagtggcaccgccgcggtgaggagtgtggctccagccttcctcgacttggcaaaggtaacaggaaaccccagagattcattagcaacaggttcccatggcaaccgcaccaagctcattaataatttttttttttattccaagtgtgggtgttgaaattctccagaggacggatggagggatggatgccgtgcaaacacacacgccagattctcccacccgcggcccgggcgccaccccgcccgctccgcgccgatatcgcccccgcacccgtgtgtcaggaatccaaggttcctgacattcgcgggcggccggcaagccccacccaccgggacgggctgctgacaggaggcccataccccacaggccccccgcaaagagcccgtttcatccccacggggcaggtcaggggctgccatttcccgatgggagacgccccaaagggtcggcgaggaaaggaagggccgtgtccactcccacagccctggactccggctgggtgtggttgtcagcactcactgctgctgaaccaccactcagggacccaaaagctgggggcgagaggtgggtcaacaggtgggcaccgctttggaaaacagcctggccattcctccgaggactcaacactgtttccgcctgacccagcaattttgctcccagatttacgtccaagagacacgaagccagggtttcccccgaacctggagcagggacggcccggcagcgccatgaacagcagcaaagggtgaaacggcccagacatccaccagcggtgaagagataaacaccgcagcccgtctacatgagggcgcatctaaccgtggaagggtcagggctctgcggggaggatggacgaccggcccgcacaaagctcgagagaagccggtgcaggagtccacaccacgtgggatcccatatacagggaacgtccagaacaggccaacctcggagacggaaaaggccagcgggagacgccgagacagctgactgcagggtttcctctcggggcgaggaaagcattctggaacccatcgctgctggggctgcaccaccgcgaggatacagggagaacgaccgaattggacccttcattggcgagttaggtggtggataaattacctctcaataaaactgggaaaagaccaacaacaggaatgagttggtgccgggctggccagagggccttgtacgctgcgcggcctcctctgcagggctgagaggaaggcaggggccgggattcagggcaccgttacttggcctggagccacggagctgagcagggtctgagccacagggagctcctgtctcccgctccccacgcagacaaatggagcagccagtgaagaccccactccggacgcaaaggatttgctcgtggacactctgcctgcccccaggggcaagaggcaccctcaccccaacacccactgtcctctcaggcctgcctgccccttccccaggcctcaccatcctctgagtctgagtgagaaaacacaaacaagaaatctcggcgtcagctctcagagtcacccaattccaagtcacaaatgggaatgtgtccccctacggtgccaacaggacgaggaggaccgagaagggacctcagcccagaaagagccaccacaattaaaagatgcacgggccggtgtgcccaccactcttgcccca

SEQ ID NO: 27435 - DNA, 788 bp, Artificial sequence
  DNA replication origin
tgcggcagccaagggagtttaatgcctggaaaataaaacccaccctgacccccatctccattcgacctttgtttccagaagcttcccgcgggcctcctccgggctccaggctctgcagactctgtggtcagagcccagggccaaaaagtgggctgcgggggttctctgcccgggaacccagtgactttctaaggaaagcctgtccccagggccactggcccatctgggcctcgtcctcttacccccctgggctgctgacagccccaaagccccacgatccccccagacgcccagcccgcccaggagggccccacagagcaggctgcccgagagacctccccacgaggaggtgatcctgggcggcgcgggggtgagcagacagctgggcagggcagggacttccagggctccccagagagcaccccaggggtgcgggtgggaaggcactaggggaggggaggggctcagcagggacaaaggcctggccgtggagtgggacagggagccaagggtgtgcaggaagagggagggacgggctatgggtgcagtggttggggggagagctagagagaggatctgccctgtcctgacacctggctgtacctgtccccctggggagcagaaggcccccagaccaggcaccccaaccctccacacgggaaccactgagccaagcagacaatgcggggttggcgccttgaaccctgacccacaggaccggggccagcacccaaaacaaaaagaaaacctgcacagcccacaggaaagaaggggtgcagtggggagct

SEQ ID NO: 27436 - DNA, 901 bp, Artificial sequence
  DNA replication origin
agtacctgtgtgttgtcccgagcatcacccgctctgtggagggaaccccgaggcgtgggagcagtgggtagtctgcactccacaccgctggatcctagcaggagctcccggcttctgtaattaaacgatttattattaaagcagccgctttcccataaccggcttcctgtagccacaggggcagagccacccgcatgggtgtggggcagggaggtgcatggggtgagctggggcacccttctccccggggcacccaggggcggagtgggctgctgctgcctgggtgcccccgagggctcctgtccaggcccagggctgtgggctgggaggactcacggctttgctcctccgaggcggggcaggggctgtgatcagggccaggacagccccgtggggactctcgcagtcactggccctaagccttgttggtcctcggcagctggccccagggacaccaggtccctgcaggtgggtgctgcctgggagggaggggaggggtggggccagagtcccagggccgcagacctgccctgggtgtggcgtggagagccctctgtgtggccatgggcctggggagctgggaagcccaagtgtccttgtggatattggggtgtcgaggtgtggggcaagttggaggtcctagcgtgtttaagcagctgacgggcgcgaggtggaggtgtccaaaaggccgaggctggaagggggcagtagatggggtgctggtggccaggcagggaggaaaggggtgcggagctttgcaggggtttgggtgggtggcatcgggaggcccagcaggcaaaaggtggccagagccctggggtagtgggatgcccttccggagtgtgggatgaggcgtgctcccccacaacctccagaacagcggctgcgcctccaggcctcg

SEQ ID NO: 27437 - DNA, 1001 bp, Artificial sequence
  DNA replication origin
gccctcccagacccatgcctggctgtcctcacagctggacccaaggatgggcaggggagctccgagacattgctgctgcgcctcgcccctgccctcccgtggtgggtgagatgccccgtcgggcactaattagagctccaagctcagaaccgacagtcagggcagctccagcacaaacatctctaaccacacagcatctgtaaccacacagcgtttatgtttaatgggttaggctgaaattcccaaagtctagaacccagctgagccattatgcaagccaatctgcgatgaggtgtaaagatcagagcccgctagacacggtgtgtcctgtgactgggcgatgggagtgggaggcgcctccacgaacggggttgggacccagcagccaccaggatgtcctgggagcatggcagcccccaggccaggtccagacggaggaactggggtcaaactccaggctgttgcagagcctgcactgggggtccgggcaggaggaatggcagcccaaggtctgcccgagacgggcaggggccactggcacacgcccctcaacgcaccatcccaagcccagcccaactcgcccgcggcctgcaacgcccactgcccacctacctgcccagcctgggaacactcctacgcagccctcaaaacccactcccaggatcttcctctaggaaggagatctggtctcctcctcctccctccggcatctgcggagtaactagtgtgtgtcagggaccgcttcagattctcggacatgagagtaaatggacggggccagctgtcagcagtgggcacggcaacagtgaaggacaagctcgggacacggcgagcagacggggacctagagtgggtggtgcttaggagctggaggctacagggtggaggggcaggggtgcatccagcccaggccagggcccagcaggagcgacgacacagcagtggggagtcctgagggccccagaccctgtctcctgtcaaccccctcaaagccctgcccc

SEQ ID NO: 27438 - DNA, 813 bp, Artificial sequence
  DNA replication origin
gaggacagccaggcatgggtctgggagggctgtccccgcagagtggggtcggccgctcctactctcggcagcaccagggtctctgcatggaccccagctgccgtctctttctgcaggtgggcatggcaatgacctgtggctcgggctgaggaggcctggggccagtacttccccccatgctcagaggtgacgggcctgggctgctgtggggattccgagaatggaatctgggtctcaggtgaccccccaaccaaggggttccgggtttgtctgcacaggccccgggaccagccactgtagcagtgagcagggggctgatgggggtccgggggccggctgggcaccaagtctctgtgacccacaggggatgctcatgaagctcagtttatcagcccagaaaatgatggtgctgggaggggagcggggccgccccgccggggagctgcctctgtcctgcctcccctcggcccttcccccgcgtctcttcaccccaggggacggggagggggtcctaaggatgatgtggctttctgagggctgagtgtctgctacggctgctgtgaggatgttccgtggacagggtggcctgggtttggcttaggtgggggcagagtccccaggctgggaggaggcgctggaaaaggcctgggcagcctcactccctccccccaggagcttcccccaggccctccgcaccttctctgaaccctacactgaaccccaaaggtcactgacttcacaggctgccaccttcaggtgtctgtcctgggcggccctttttgtcattccactgacatttacaaaggacatctc

SEQ ID NO: 27439 - DNA, 934 bp, Artificial sequence
  DNA replication origin
tatgaatatggggactcgggggtgggttaggactctgagatatgaatatgggggcaccagaagaagcccgtaaatgaggcggctggggaggccgtgggggagggtccagaaagagggggcgggagggaccatggagggatccaaggagccggggcaggagagcccgttgggggatcccaggcagagccgggagggaccatgaggtgccccatggagagggggcgggagagtccatgggggggcggtttccggggtgggggagtgaccatggggtccccagggagagggggcgggggaggccccagggagagggggcaggagagtccatgggggggggggttccggggtgggggagggaccatggggtccccagggagagggagtgggggaggcctcagggagagggggcgggagagaccccgggggtcccagggagaaagggcggtgcccgcagcccgggcacctgctggggacggagagtttgtgtccccatggagttcagacgctgagacccagtggggcctttgggaggtgactgggatgaggtgaggtcaggagcggcggagccctcaggaatggggttaatgcccttgtaacaaggaccccgagagacccctccacctcccaccaggtgaggacacaggcagaagcaggcgtctgcacccagaagtggcccccgtggagccccatcctgcccagcccttccctgggacgtccagcctccagaaccgagaaacacactccctctgtccccggccaccacgtcctcagaatttctgtcacagcccaagcacactaggacgccccctcccaagcctgtcctggggggccccttcccttccaccccaacaccccatttctcacttggagctcgttccactctctgccccggtcagaattcagccctcaaacctatgacagacgtgtgaccgtg

SEQ ID NO: 27440 - DNA, 836 bp, Artificial sequence
  DNA replication origin
gagtcttgctctgtcgcccaggttggagtgcagtggcgtgatctccgctcactgcaacctctgcctcacgtgttcaagcgattctcctgcctcagcctcccacgtagctgggattacaggcatgtgccaccacgcccagctaattgttttgtatttttagtagagacggggtttcaccatcttggccaggctggtgttgaactcctgacctcatgatccacctgcctcggcctccaaaagtgctgggataacaggcgtgagccaccatgcccggcccggccttgttttttaatatacatctggttgccgggtgatactgagggggccgggctctgcaggcacagggctgaggggcgtcgtgtggatggacggccagcccgttgggtgccctggctgggtccctgtccctgcacaccgggtcagccggctcctgggtgcacaggcaggtggtgtgcgtccgcattgcagaacacggggcgttgcaggccggagctgggttttcacacagattgagaccaggcgtcgcccacagagcataatgtgaggcgagagggactcgggctgctgtgggctggggaggacggtcccatagctgggggcagagcagggcaggctgggtgaggagggggcaccccaggtgtctgaaccccaggtctgtggaggcccgaggtctgaagggaaatccccagtggtgggactggaggtgccgtggagggtgggcctgtgtcctggtgtccctggcgtccccataccccctccgaggcacagccacagtctctgggtcctgagcaggggctgcagtcacagccaggccgtgggggggccagggaggaggg

SEQ ID NO: 27441 - DNA, 1166 bp, Artificial sequence
  DNA replication origin
ggttgggcccaggactcaggactcagctccagagaggtcacctgcaccccatcccaggcagggaacagagggtctgggcaacgtcagaggagggccagggtgggggtccccgccacagtgactgacagcctcgtcggggggctgcgagctctcctggcctctgtcctggtcctcaaccctggcctctcccagccaacccccagtctgctctgagtctcaatgtgcagcctgcccagagctttcaccccagccaggcccccgatgtgggagcccctctccccaggggcctggccaggggaacgtggccggagccagccgcctggacttgcgtgactcacacgggcagttgggggtggggagcccgggcagcagccaaacatggagtgtttgtctccagccggcgccgcgggtcacaggagggcacgggggctgggctgcccgtgggagagcaccgcccccagcgcaggggtgcggggagcccacacccaccacaggccaccacctgggggattgaaatcactgatgcatgagtggacggctcactcccggctgccggaacattccatctcaacagagctcctccctgagcaatggcctcgggagactctggccccacagagagcggccctggcctccgcctctatgtccgccaggctgcacccaggtgggctgaggcccgcctcctccaccccgcagagcctcccacctgccacccaccggaggggccaaaacaatcacatcacctgcgctgtctcaggcacggaccctgctcctgcccctgccacagcccggggaaacaccaggctcacctgggcggccacttctcaccctggggagcgttgtgtccatctgtgtggggagacagggagggccggaagcacacagcagccagggacaggcagcagagtgagcctgtgtgcatgcgtgtgcgagggggcatgcgtgtgcgagggggcgtgtgtgcaaaggggacatgcatgtgtgaggggcgcatgtgtgtaagggcagtgtggggacctgaggcgcgtgtccgggtgtgggtgtgtgatgtgtgtgtagctgtgtgcatgggccgggctcaccccacacacaagtggagaactcacacacagccctcttcaggcctgagatgagggcgggtcccccacctccaggaatgaaaggag

SEQ ID NO: 27442 - DNA, 2775 bp, Artificial sequence
  DNA replication origin
gcccattgcacagggtgtaggcgggactgctctagaccccagggcatcactcctgcccacagggggcttccggtgcttcaggaatggtcaggcccagcctgccgcatgcatggggcccctccccgagccctgagaccagggagcagaccctggccaaagcttcccctgcagcaagcactgagtccttgaaagctttgggccttactgcccgaggcagaggccagaggccggactgtggaggccggcaagcgtgggaccgaggctcaggggtgaatggggccagcagccccagaggactccaggcggcttggcctgggcacctgcacacagcagctgtcctgtctttgagaggcatccgtggggagggctcatcacctgccggcctgggctgctcgtttcccggccctcaccctcatcctctgtgagcctgggaggaggcacggatgccgcatcagcctccaggcatccctgccctctcgtaggcatccaggccccctggtggaaggcaggtctcaaggggctggagggtgccaggagttgtcacgtggccgggtgggtctggggcatgtgagggccttctgctcagcgagagtggaggccacgtggcaggaggaggagacacccccaccaacctatgcctgcccatgtgccgggtctcaattcctggtccaaagggcgccttcagtggcgactgcagacaggtgcggggctccagcgaagggaagctgccatttaaaggcaaagctgggaacgcaggctgtggtgatgactgaagtgaggttcacgtaccatgggattagccattttttttttacttgtttatgtgacgaccagcggattttaaagcgcacgggttagcgaccttcgtgttgttgaaccatcacctctgcctagttctggaatgtttccctcactccagaaggaaaccgcatccccatcagccctcgctgcccagccctggtggtctctaccccgctttgtctctgggtttgcctgtgcgggactttccgtgtgacatgtggtccttctgtgcccagttcttcccagcatcatgttcccgggttcacctgtgttgtggcgtgtggagctttcttccttttcatggctgagtaatattccagcgtgtgaccagaccacgttccgtttgttcacgggtctgttggtgaacaccagggctgtttccatcacaggccatcggggtcagtgccgctgtggacacgtgtgggcccgtctgtcgtgagtgcccgtttcctttgtccctggtgtaggcaggattggcgttcatagcctcacccaccggttatccggagcttagacgtgcccgggtggcagctggactcctggacggtgtctgtgggtcctgccagcggcagccagactcccacatggacgctgccatctgcagagtccccccccccgccgagtctgcttttctggggaaccctggagatgctcagaaagcctagtggggcacgggggtccatggcgggtgagtagacggtcagcgtgcgtaggggccggaggcggggtacgtggggggcgggcgagtagacggtcggcatgcataggggccggaggcggggtgtgtacggggcgggtgagtagacggtcggcgtgcgtaggggccggaggcggggtgtgtacgtgggcaggtgagtagacggtcggcgtgcgtaggggccggaggcggggtgtgtatggggcgggtgagtagacggtcggcgtgcgtaggggccggaggcggggctgtgtacggggcgggtgagtagacggcgtaggggccggaggcggggtgtgtacggggcgggtgagtagacggcgtaggggccggaggcggggtgtgtacggggcgggtgagtagacggcgtgcgtaggggccggaggcggggtgtgtacggggcaggtgagtagacggcgtgcgtaggggccggaggcggggtgtgtacggggcgggtgagtagacggcgtaggggccggaggcggggtgtgtacggggcaggtgagtagacggcgtgcgtaggggccggaggcggggtgtgtacggggcgggtgactagacggtcggcgtgcgtaggggccggaggcggggtgtgtgcagggccagggtgtaccgtgctggtcctcccagggctgcttggggagagcctgtttccttagtggtgttttgaataagaatgcgcggctccctcgaggtgtcccagtggggctgttcagaagctgggcccagggagccctgaaggcaggggtccagcctgccgtgaccgcacaggcccagattcctggacgtttcgctttcgtaattgcacacgcagggcctggattcgccgtgcagaaagccggacgatgccgcggcgtggggtgaacgtcaaagggtcactgtggactctgcccacgtcctgagtgccctcgtcttgtccctctccacggcgttctcatcctccggcgattccctgggaacgtctctgtacctctgcacacgtgcccacacacatgcccctcgagatggcctgcactgtggcttctgtcgtgaatgtggtcacgtgtcctccgtgactcgctcctcctgccccgtgtgccctggacctggctcggtcccgatgcccgtggcaccaccgcctcctcaacgggtggccacgtaatgcttcctggccggtgaatgtgccacggcagtggagatattctgcccttctagctcttctgtatacaagcagtgcgccctggttctcagggccgtgaccaccaccatgaccggcagacttcagggcggtccgtccc

SEQ ID NO: 27443 - DNA, 1360 bp, Artificial sequence
  DNA replication origin
ggggccgggaggggaggaggcggccagcgccgcgtggggccgtgggcagagcggacagggagggagcggcctcagccttggcaccctctacccagggcagggaggggtttgcccagccaggggtgggtacagagaggggagcacgtggctaagagtcctggttgcctgtgacctcagctgcagtctgtgccctgcaaggcatggggtcctgagtggggggctgtggcccaccttgctctgggcttctccttcctgctgtgggtgcctttcccgcccacacccctgcccctggctcaggccgcttgtgcccagctgttgcagatttggcctaatggggctcagctggctgagcagattgctctaggggacagcgggtggggcaggaacggcccagcctcccgatcctcccagctgcagagctctgccaccccggcactgatgtcaggatgcagccgagcagggagccctgctgggatccctggaggccacagccctgcttgggggccactctgaccatagaggaggagccaggcagcagccgcacctggagacgtccatcccttcgctgggctagcgctgctacagtcccctccctggtggtctgaggagctgaggctggcctgtggctttgatgccttaactatctcttgaggaggggcacacagccccgcctccgtccctctgtagaaacatctgtcctgaccttccttcggcaaacgtggaggtcttggtgtggtgagaacgtgtcctccagggccagcaggagccaggccgagccgtgtcagtcaggagagtagatggaggggcttgttttgcaggaaggtctgcataaaacctgtcagcgccagaaagatgaaatagcccttttgtacagatggggaagctgaggcttagaaagggggaggcacaggtggaggtagaattggggtcaggctcttgccccatggccctggcctgaggattagtcacggggcagggtcggggaggccctggccccaggatacgtgagccagcgggtctgggcggtcctgggagctgatgttacctgggatgttagctgatgtttcgggttggggttgtccaggaccaccctttgggccacgctggtcccacagcacacgggcttctgaggaacccctgtccctacccaggaccctggagaccgctggctctggggagaggggtcccacagcacctcagggctcagtcggcactgtttgggggtctggcagccccgacactggctgagccgccctgagactggctcctggccccaagaatcccaggtctccagcatcttcggcgcagagatagcagctgccagggttcccgccactcgcagacactccccctcacccag

SEQ ID NO: 27444 - DNA, 964 bp, Artificial sequence
  DNA replication origin
ggtggtatagcagggtctggggggccccaaggaggcctctcacgacagaggacgtgacaggcaggcgtattgcgcgcctcccaaccgggtcacaccccagccaccagccctccctgccctggagagggactgccagatgtaccaggtcccagtgcccccctggggctctgcctagagaggggagcagtcagccgaggtcccacatcccgcacaggccagcaggggctcgggcagctctgggctgagcaggctggccctcatgtgtcacacttctgtgggcagctgaggacaggcagtgtctgccggctgtgtcgcacggagcctggtgacttctggaggcttaatcatacagatggattttctgggttttaattaaaaattcctttagatttcaaatcaacttctataaattagaatcaatttccactgcgggtcggagaagcaggccaacgtagccgggaacagccctgggagggggcctgctggctgcagggcggcagaacggtcagggaacccagccagggaagggccgggcagtggcgcagtgaggtggtcttggctacggggtctccctcaggcagggagcctccaccagaccctgaggcccaaccagcagcaatgcacccactcaccctccctccttcatctccctggaccaagccccaggacctcagtgattctcctcttttctgacagaccaaggttgtggggaccacattgtccttctccagcccctggagtctggcctggatgacatgttccccaggcagcccccactggactgggctcacgagccaggggctcgtaacgatgaaaaccccccagagagaggcctgaacaggggaacagggctgaagaccccctcggtggtggggccctgtctgttgaaatactcctcaggcacagtacccatcctgtccctcagccccacactctataatcagtgctctcaggctgggcccgg

SEQ ID NO: 27445 - DNA, 1196 bp, Artificial sequence
  DNA replication origin
ccctgcttggaaaagacagcaccccatcccccactaaaccagacggtccgagaggtcggggaggggcacccaggccccctcctggcttccctcgctgccagtcacaaaggcttggggtgggtctcagtggcatggcagagggggcaaaggtgtccaggtaggaccctggcctggggacccctagtcagctgtctttgaggagttgctaggcactgggtgccacccacccctgccagcccctctgccgtgggcagctttcatggtgactggcactgatgggccctgggctctgacaccatccactccactctgctggctggacagtcttagagatggctggtcaggggtgctggccccttcccttctgtccccattgggccctccgcctcagggtctgggccgggtccagaagtcagcattcccctcagtgccaggaaggccatgccgtagctttagctcaaagtcctgagctggctagggtggcaggaactgccagggtcaggcaagtggctgggggccagctggggtacagggagggtgtgaaaggccttgtgtccaggtagccccctagcctagggcaccctctgctccagcctggacatttctggggggtctccggggtgatctgagagcaaacatggggcaggcctgggagaaatcgggcaatggctggagacatctggaggcgggtctcagccctcagtcctggagtccaggggtggctggaaattgcctgctttggtagtggaatgtgtgtgtgctggttgggagccggcccaacttgaaggagagtgtggagagaggagacagaaaggcggtccgaggcacccacaggacaagcagtcccaccaccccccattgggtagatgggtaaactgaggcctgggatgccctgtgcccagggagaggcagtgccacctacaagacccctggctcagccaggctggggtagagtgccgtgggggctcaggtcagggagcaccgttccccacacctgcctgctgtgtcctgtttgggccgggtgtctttgagctcctccccgccagcctgttccgtttacccaagaaaacccctcccctcgggaaatgatggccctcagagatgcacaaagacagtccccagccacccccgcagaaaggtgctatttgcggcagttaggggacaaaggtgcccgaggctgggggcggagccgccat

SEQ ID NO: 27446 - DNA, 1565 bp, Artificial sequence
  DNA replication origin
ctgcctgctgtgtcctgtttgggccgggtgtctttgagctcctccccgccagcctgttccgtttacccaagaaaacccctcccctcgggaaatgatggccctcagagatgcacaaagacagtccccagccacccccgcagaaaggtgctatttgcggcagttaggggacaaaggtgcccgaggctgggggcggagccgccatccaccatcgctcccttgcactagtgccgggtcaggaggctgggagaggccaaggggcctggcacggcttccacagcagggcctcggctcctgcccccaccaccttgaccaaggcacgcaaaccccacccccacctcgtccagcaaggactgtgctctgaggcttgccgtgaaggcgctcacacactctggccgctggggtcgcagtgggtgcgtcatcggtaggcggcagtgcgtgctgtggccttgcccacctatgggacagcgcgtggctgtgccagcatgccagctgccttggcgggaggctgatttcggctttcttgcagcagtgttacagcagaggcgcctgttaccgctgaacccattaagtgtaattaccgcactcttggtgggaatatgtaattacattggtggcctggagccgtggcactggcatcaaatgctgacctgctaggaggctgggccctggcttggtgggagggagggttccaggatgagctgctggggtccctgggggaggggctccaggctggagtgacaggtgggggcagggaaggccctcgtcaccaagcctgttcccctcctaccgtggcagctgcccttcctgtgatccctgagagtttgagacactcagaccctgaccccagtgctgcacgcagcacccaggacctccgctgtagtgagcgtggcccgtgttgggcagggggcgctgctgccaccatcatccgggtcccaagcaggcctgccaggggtgagggggagccgtgggcgctgaggcctgtggtctgcgccaggtgggtgctgggaagggcggcccccgagagtcaagcacaggcccaagtccagagccaggggtgggggcggccaccgggctgcccctgaatcagctgtgagaggatgcccagctctgtctcctcctcggttcccacgtgttggtgacggcagggactgtcagagctggtgcctgacttcccaaggctgttcgctgacaagttggtgctttccaaatgccggcttctaccttaaggaaggtccctcctgggtccacagtcagctgacggattgcctctccctccttcctctggttccctggtcagggtggggccgcgcagccctgggacaggggccctggaaagtctgccccgagttgtgccaccgtccaggcctggagggtgggacggggagtcctgtccggtgggttgcatggcggtgccccgacattccccctgccctggggccctcccagttgcacagggtgccctgcctacagccccccagcgcgggagccctatgcaacctgggccccatgtgggcagctaggccctgggagtctgagtggccctcactggggcctcactaccgatg

SEQ ID NO: 27447 - DNA, 2544 bp, Artificial sequence
  DNA replication origin
cccgacattccccctgccctggggccctcccagttgcacagggtgccctgcctacagccccccagcgcgggagccctatgcaacctgggccccatgtgggcagctaggccctgggagtctgagtggccctcactggggcctcactaccgatgcggccagcccaccgagggctcctgcaccccgctttcctgatgagccaacgccgagggccagggggccgggcctgggaccctcacggagcagagcccggccaggcgcaggccccaggcgccacctggtggctgctttcaggaggggcggccgtcggtcccgagtcccccaccccatcctggacacccccacgcgcgcacacccgtggcggggctccggctgaccgggtgggcatttggagggccccatgggagcgggtcccgggccgcgccggtgtgctccttaacccgcggcgacacatggttcgagcacgtgagcatgctggtaatcatgctcaactgcgtgaccctgggcatgttccggccctgtgaggacgttgagtgcggctccgagcgctgcaacatcctggaggtgaggggcgtgggtcggggtggggaaggagcgtgggtcgctacgaggtttatggttcaaggcggagtggggcgggggcggggcaaggttcaaggtggggcgtggagtgggtcagggtcggggatcagggcgaggttcacggcggggcgcgaggtggggctgggggtggggcagggcgagaggcgaggttcaaggcgaggcagggctcagttcctggggctcagggcggggcaggggcggggcgaggggtgtggcaagactgggggccgggctcttgcggggctggggttgggggttgtgggctgagctgagctgttccacgggccctcctgatgcctcctcccgcaggcctttgacgccttcattttcgccttttttgcggtggagatggtcatcaagatggtggccttggggctgttcgggcagaagtgttacctgggtgacacgtggaacaggctggatttcttcatcgtcgtggcggggtaggccccgcctgggagaggccacagcgctggcgaaggggccccgcccaccccacagggatccctgtgtcccacctgtaaagaaaaatgggaggtgtgttctagagggatccaggtagagccagggaccctgtctgggactccggagaccctccctcctgggcacaggtgagggaggtggcctcctgatgtgaccaagcgttgtgctcctgctacctcggggcccttcctggccagtacaaggtcctccgggtgccgggctggccggttctatgcctgcccaccctactttgcaccccagccccaccctggaccacctgggctccttgttgagctgctccccctcggccccgcccccagcatgatggagtactcgttggacggacacaacgtgagcctctcggctatcaggaccgtgcgggtgctgcggcccctccgcgccatcaaccgcgtgcctagtaagtgaccggccccgactgggcttgagatcaacaggcttgcgtgtccgccagccctgcagagctctcaaaagggcccccaggagcacaggactgggaaatgaaggttaccaggcactccggccccagcccagaccccagcagtggggtggcccctgccgctatccgtgggccttgcatgtcaggggagaatcaagctgcggtgtggtgggcagtcagcattcacagggtacctggctcccacacagccgagtgacaggggccactccgaacctccggttccttctctgcatggcatctggggcaaggctggaggccgagcagatccctggtggctttgctgtctggcgcatcctggtgtggctcgtggtggagacactcttgtgggtgtggctcagctcacctgggggctctgtgaagccccgccttcacacccacacaagtgaggggagagcctgacacctgtcctgaggacacctcgctctccccacccgccactgcttctggcccctactctcctgccaggatccccacctaaggaaaggggaagttggctggccagggctgggcctccgtgtcccctgctgagcagctgattttctagaaggaaggctggaaatccttcaggatttggccagcaggtgtgaggagggggcctggtggagaggagctgctgtgtgtctgctgtgcgctgggtgtgaggggaggcggaggaagagcttccaggaagtcatatgcctgcttgtttgggaaacatcctgtcaaatccgggccacccacctgcatcaggggatggggtgggatcgttctttaagcactcagggctacattcaactgctctggttcctgggggtcggcgcggcccccacgaggccgtaccaggcgcgagtgcatactgcgtgtagatgtggccccgtgtgtgcacgtgcgggtgtaacacagcctttctggctgcctgacctgggtcctggtggccttggcactcagggcttgacctgcagcaaccccccaaagtcacagacccccaaggctaggcactcctt

SEQ ID NO: 27448 - DNA, 1161 bp, Artificial sequence
  DNA replication origin
ccactgttcacagtgggtgtccacgcccactgcacactgactcgggccaccccctggtgattttcccgcacccctagtgtgatcgggactcccctcctaccaccaccggcctccagggacactgacaccctggggtctgacgtgcatccagcggggcgccaggtctccacctccaaccatcccagggcagcaggtctgctgcttttggagggctggggtgtggaggggcaggagtggaggcaggggactggccgaggcagggaactggctgcggcaggtctgaccacgtggcatctcgggctcgggatgaccaggcggagcccagtggccctcgaggcttgtctggcgacaccctgaagttgccaccaaggcagcaggagccttgggagccccagaacctcaggtggtgggctgcctcctgggggtctctgcagcaggtctgggatcctgaaaactttgtctgattcccagtgagaatcctgccagaacagagccccatctcagagagaggctgctggaggcggtggggaggaccggcagcggcttttcaggaggtagcactgaagccatcggtcctgggtgctatgggctacgtgaactccagattaatccagcaagtgggtcagccaagccccacgcgcccctcgctccatcctgggcctgctcccccaagacgtcctttccctcaaatttaatcaagggccaggctaaggcagcaggtaaagccctgggccaggaacctggggacgctgagttctcacccagcacccaggggtatcaatggcaaaacgggcccctcaggtcacaagggtgagtcagagccaggaggagcactgaagtgtcaaaagagccgaccggagcagacaatcagtgagcactgccctggccagaccgcaaccgcctcaaagatcacagatgacccagaggtcagagtggacccctagccaacagaacaggatgcagccctgagcgtgtcctcattatgagaagcgtattatccagtctggaagagttccctagttctctcctagagacaggagcagatccccaggaggccaggctgctggcgacaattagggccactctggcaatttaacctgaaaagtaaacatccatggaaggaaggggctgtgtgtgctgggttgcttcacgcttcaacag

SEQ ID NO: 27449 - DNA, 2390 bp, Artificial sequence
  DNA replication origin
ccacccagccttccagcgtgatcacctgggggggcagtggcttgacttgggcccgcacgacccctcctcctcctccccgtgcccctggggtctgggctggggggggcgagtcctgcacccgctcccctgccgtgccccagggtccccgtcccaccatcttgccgcccacctggaagatggcaatccaggcgtagccgatgttgtcgaagttgatggcaccgttgtgggggttggagtcacccgagcggcacacgttgtagtactggttccagttgatgcaggcgttgcgtgcagcgcccaccccctcggcctgcggctgcgtgtaggcctcccagcccagggtgcagggcatgcgcagctcgcggcggccggggatgtgcgagcacttctgcatgccgttgtctcggcgtgaggagcagatgaacgggttctcctcgccctcctccgtctggtagtacggccgcaggaaggtcaggttgttgttcctggggatgggcacagccagggccaaaaggtacaatcagggtcagggacggtcagagtcgggggcacgattgtgatcagggacgtgatcaaggtcagggacgtgatcagggtcagggccagtggactaatcatggttagggaggcacggttagggtcagggggcatgataggactgagggtcaagacccggatcaggggacacagccaggaccagggtcaagaacacagtggtgctgcagaaaccacactctcctcagcccaagtccacagagacaaacacacaaagaacagggatggacagagaaatcaacaaagaacagcacagacaaacagggagggagacccaagagccagaaacccaggctcagacctcagcaactcctggaagcggatgaggggcaaagggcaagggacgaggggagggaagcctggggtgagggaaaggaggcagccctggggtgagggctgagaggatccaggggtgagggctgagggcagggaaccccggggtgtgggctcaggggaccctggggtgaaggctgaggggagactcgggggtgagaattgaggggagaacccggggtgagggttgaggggaccccggggtgagggctgaggagagactgcagagcaagggccgaggggagaccctggggtaaggtgtgacggactctggggtgtggggaggggatgaagtgttgggactaacctgtcttgggggctgagaggtggcagcactgggggtgggacatatgtgcaatgaccgcacggtgggtggagccatgatgggggtggggcatatatgcagcgaccgcacggtgggcggagccatgatgggggtggggcatatgtgcagcgaccgcaccgtgggcggagccatgatgggggtggggcatatgtgcagcgaccgcacggtgggcggagccatgatgggggtggggcatatgtgcagcgactgcgcggtgggcggagccatggtggggggtggggcatatgtgcagcgactgcacggtgggcggagccatgatgggggtggggcatatgtgcagcgaccgcacggtgggtggagccatgatgggggtggggcatatgtgcagcgaccgcacggtgggcggagccatgatgggggtggggcatatgtgcagcgactgcgtggtgggcagagccatggtggggggtggggcatatgtgcagcgactgcgcggtgggcggagccatggtggggggtggggcatatgtgcagcgactgcaccgtgggcggagccatgtggggcggtgactgccagctgggcggagccatgatggggggtgggggcgggagacagcatggtggacggagccatgacggggacagcagtggcggggcgggtgactgcacggtgggcagagccacgtggggcggtggagccacatggtgcgttatctgcatggtgggcagggccatctgggcaggggcctcacgggggtggggcctgggcacctgacaaaggcactgtccaggaagcagcggttccgcaggaggccagcccagagctggacgccaacgatgccgaaaatgaagaagacgaagaagcacagcagaaggacgttcccgagcatgggcagcgtatccagcagcagagtgaccaggatccgcatgcctgtgggcagcagggccaggattggcactgctaagccctgcaggagtgtcctcggggctgcagcccctcccgggacccccgagccccgtccactgttcacagtgggtgtccacgcccactgcacactgactcgggccaccccctggtgattttcccgcacccctagtgtgatcgggactcccctcctaccaccaccggcctccagggacactgacaccctggggtctgacgtgcatccagcggggcgccaggtctccacctcca

SEQ ID NO: 27450 - DNA, 1669 bp, Artificial sequence
  DNA replication origin
atcgtgcccccgactctgaccgtccctgaccctgattgtaccttttggccctggctgtgcccatccccaggaacaacaacctgaccttcctgcggccgtactaccagacggaggagggcgaggagaacccgttcatctgctcctcacgccgagacaacggcatgcagaagtgctcgcacatccccggccgccgcgagctgcgcatgccctgcaccctgggctgggaggcctacacgcagccgcaggccgagggggtgggcgctgcacgcaacgcctgcatcaactggaaccagtactacaacgtgtgccgctcgggtgactccaacccccacaacggtgccatcaacttcgacaacatcggctacgcctggattgccatcttccaggtgggcggcaagatggtgggacggggaccctggggcacggcaggggagcgggtgcaggactcgccccccccagcccagaccccaggggcacggggaggaggaggaggggtcgtgcgggcccaagtcaagccactgcccccccaggtgatcacgctggaaggctgggtggacatcatgtactacgtcatggacgcccactcattctacaacttcatctatttcatcctgctcatcatcgtgagtgtgggcggcagtgttcgccatgatgggccctggtgttagctggctgggggtggggtggggtacctgggtggtcataggggctcctgtctgtcttccagctgaagggagcacacaggggagggaggcagagcttgcgggggtggggaggtgtggctggggaccccaagaggccatggcatcacctagacagggtccaggcctgtgggtgctggctcagggctgaagagccaggaacaccctggggagtgcatagcctcccagcaccgctttccacgggcgtgtgtggccccaggtgtgctccttagctggtcctctcataggccccagtgggtcctggcagagttgggttaatcaggccgcagacgtctgtggggtcctaggtatacctagagccaccctgcggggacctagtaggtaacagaagcagacagacgtccccagcttgttctgagagagcaagcgaagcgaacgattagagacttgctgcacgctggtccatgctaaggaggaaacgcacctggggtgctggggaggggagagtggccaccgttgagagggtcatctcaaggccagatctgcaggtaaaggaggggccgagccacatggagaagcaggaaagagggttccaggtcttttgtccagataggcacaaagcagctactgtatgccgtctgctccagacgtgggggctcagcactgaacaccgcagcagcctgcccatagcagggcacctcgcccactgtgcctgtgacgcggcccccactcgaacaggcagcgcacagtagggctcagtggcgaatcagagactcgctcactcactgccacttacccgcccgcccccgtcacaggtgggctccttcttcatgatcaacctgtgcctggtggtgattgccacgcagttctcggagacgaagcagcgggagagtcagctgatgcgggagcagcgggcacgccacctgtccaacgacagcacgctggccagcttctccgagcctggcagctgctacgaagagctgctgaagtacgtgggccacatattc

SEQ ID NO: 27451 - DNA, 2188 bp, Artificial sequence
  DNA replication origin
gctgtgcaaggccagggtcccgggcaccgccagcgccgggcaggcaggcacacagcctcggtgcaccacctggtctaccaccaccatcaccaccaccaccaccactaccatttcagccatggcagcccccgcaggcccggccccgagccaggcgcctgcgacaccaggctggtccgagctggcgcgcccccctcgccaccttccccaggccgcggaccccccgacgcagagtctgtgcacagcatctaccatgccgactgccacatagaggggccgcaggagagggcccgggtggcacatgccgcagccactgccgctgccagcctcagactggccacagggctgggcaccatgaactaccccacgatcctgccctcaggggtgggcagcggcaaaggcagcaccagccccggacccaaggggaagtgggccggtggaccgccaggcaccggggggcacggcccgttgagcttgaacagccctgatccctacgagaagatcccgcatgtggtcggggagcatggtgaggacccagccccaccccacggaggaggcggtgggacctaggcagggcgggcagggtctccggtgtgtcattcccacacccattgtgggcactctgatgagcccagctttgacttgtgaaacagaccagctatgcctctggagcccataagaaggggaaagaggcaggtcccgcccctgacagcgccaaagcaagctcccggtggcccacagctcatggcaggagtggtagccgcggaggtgggattttgaatctgacaaggcttgtcagaccctcctggggcagcatcccattgcccctgcctggccccgagagggaccgtatgcttgtgtccacagcctggacgcttccctggaggacgtgcagcgtccttcgtggccattgaggctggccccccttctaggtggggacgctgagtgggggagtgtgggggaggcaccgtcgcagagtcaccgagagtcaggaagagaggctggcgtggggttctcctatgcggggcctgggcctctgtccaccaggtgaatgggagactccagggcccccagatggtagggttccacacgggcctgggggcccttcctggttctgtacacagatgtagagacgcaggcgggggtgtgtcccccgtggtggggagaggtgcgagcgagggtgccgagggtgccgggatgctgtgtgccctcatgcgctggtacccagggcgtgcagacgagtgtcgggcgcatgctcctagcccttgaattgtgggagtccagccgctgtgtgttataagaggcacacgggctccaaagacagcacgaaaacatcacaggacggctcgatggtcattttcatgtcagtttcgtgttggagtaaccatggtttgctcgcatcgagtcaaacagaatcccgtagctaacttcgcctgtgtgctgtggctgctgggaagtggctgctgttatatttctgtggatggcacagcccaaggcaggcaaacgtctctgcacctaagtgtgtccctgccccagtacgtgagcaggaatgcggctgtgggggttgggtgtgtgtgcccaggtgtgtgcccaaatgtatggtttttctgatgtttgtggctgctgtacccacgaactagtgggtttagaacagcggaaaatcactcagctctggaggccagtgctccaaaatccaggccttgcagggttgcttcctctggaggctctaggggagaactctcctcgcctctcctaagttctggcggttttgcaagtccccggcttgtcgacacgtccctgcggtctctctgtcttcacatggctctttggtttcttcttattggaacagtcgtggctcagggccctccctactccgggatagcttcattcctcattgtaacccatgacacctgcaaagatcctgctttctgtgaagtccagtcacaggttctggaggttggactctggatggatctttctgggggggacacattcaccccaccgctcctgtgtgtgagggttcccgggcccttgtggcagcaccactgagtgggcctgcccctgtctgtgccctctcccgcaggactgggccaggcccctggccatctgtcgggcctcagtgtgccctgccccctgcccagccccccagcgggcacactgacctgtgagctgaagagctgcccgtactgca

SEQ ID NO: 27452 - DNA, 1492 bp, Artificial sequence
  DNA replication origin
acctgatggtaggacggtcaggcagggctctagaaagccggggatggtgaggataggagaccaggtgtgccgagcctccactggaggggatctccttggattcctggcctcctctctagacggcagctgattaggctccttttgagatgctgctgcagccctcttgaccctttgggtcttgatgcagccaaacctgctcccagatcagtgccggggaggggtgggagccgtgggtggggccccagatcagtgccggggaggggtgggagccgcgggtggggccccagatcagtgccggggaggggtgggagccgcgggtgggggcccagatcagtgccggggaggggtgggagccgcgggtggggccccagatcagtgccggggaggggtgggagccgcgggtgggggccccgatcagtgccggggaggggtgggagccgcgggtggggccccagatcagtgccggggaggggtgggagccacgggtgggggccccagatcagtgccggtgaggggtgggagccgcgggtgcggcctcctgaactgtccccacctctgcctgcagcccgaggagctgactaatgctctggagatcagcaacatcgtgttcaccagcatgtttgccctggagatgctgctgaagctgctggcctgcggccctctgggctacatccggaacccgtacaacatcttcgacggcatcatcgtggtcatcaggtgggtccccaccctctccccaggaagaggggcccgggaagctccactctctggcagaaatcccacctgcagagcaaaacccagagcacaggaggaagtacgacgatagctctttatgacaggccgtgggaagcaggtgcttggtgaccccagtggcccaagggaccgtcctgggcagagtcccctccccagacgctatgcttccctgcaggcactacggggtgcgcacctgttaggtcagctgcgtctcagatgtttctagaaactagcggagctgtttcctgcaggaacaaagcaggtgtggggtggcctcagggccgagcgagaaagaccagcttaaaaggctgaatcctgcttgctgctggaggagcatttgctacaagaaaattaaaccagaaaggattgggaaaatttgaggggaaacgcccccggtcttcccctaggaggacgctcatccctcaagagtagagaggggtgcagggtctcccatcctggggcggggagggagtgagcagaacggacaagccaggtctggctgtggaaggcccaggataggagagcgccctcggcgaaggagcttccctgccctggccagagccaggcttctttcccagggggcactgggggccgggtagcccccggggccatcagcggataagcggcttttgaggtgcttccgcagctgttcatgcaccttgatgcagccataccctctcccatctgtgggatgcagcacaggccgctgtggctccctggctggtgaccctgcttccag

SEQ ID NO: 27453 - DNA, 3157 bp, Artificial sequence
  DNA replication origin
tgctggattcctccctggcctggcctgcttctctccccttctgaatcccctcagtcaacaacacgccctgaatcccatctcaaaccccacttgagggaacctgccccagacagacgaaggcgagtcggcggtgggcccagggccacgcactcacgtcctccgagtcgtcgtcaagctcggctgcatcctcacggtggctgtcgatgcgcaggaagaagtcgctgggcagggccaccacctgcccgtcgcgatcgcggcacttggtaggcgggagggcggccggccgcaggggccgtgggtccagggactcggcccgccgcagtggggtggcacggggcccgggcgcggccctgccgtcctcagcttcgtcgtcggtgctgcccttgccctcgccagacagcagggactcacgttccccacactggccgcggcgcttgaggctgggggcacggcccaggctgctccagctggagcgccggctgctccaggcgccactggggccccagggggcacagggagaacttcggaggctggcctggggggtggcgggagtcagtgacctggtggcatcactattagcaccgaccgctgtcattacggagcacccactgtgtgcaagccacacgtggatcatttaatgcatagccccgccagggaggcacggtggaggctgtgattttagggggacaccgagccagccacaggcgtagctcatgagggtcagggtgtccgcctcgcgggggtgatgccctgggctctgctgggtcaggggccagaaccagcccaggaccagacaaagtgtgggtggcccccgtgtccccaggagcacactgggcctgcggctctgcctcacagctgccccgcttcctcccctgctagggcgtctggctcactcccatcctccgtgtctgttgtgggtggtactgcctggagttcgtttcaaaactgctcccctccagtccccctggacccagagagatgccctggccgtaaagggaatcgggctgcttctggtggcagcggaacccccgcctggcctgccgtctgcttgccgggcacgcttctgcccctgcttgcttcggtctttctgtgctgtgcgctgtgcactctgctagactgttgggcgcacagagcttccgcgtctgccccttcacaccggcctcacacaacagcagccacagcttccatttccggaaaccagaacactctttctcagtctctgcacaggctgggacttcaagggtgtggggggtgcggccctcactcatcttcagggaaggccataaggagccaggcagggaaaacctgaaggggcctgagagctggggcaggagatggtccctaccggaggcttctggtctcccagtggcgggtccccggagctgctgctgccacgccgagagtctgggaggctgggggctgcatccaggaatggtgagctcttgggggtaggcatgggcgtggcagctgtgcacatgatgaggggaggggacaggctgcctcgtccctccaggtgcccgttgggggtcacggccagggaacacatcttcagctctgcgggacagagggaggaatgggcccctagagctgccaggctcccaggaccaggaatcccccaacctagggattgccttatgggggccctgcccggccagcccagcgtactccacccgccagaacccggaccacccaccgaccacacgcacctgtggtctggagttctctgagcttgtggaagtcctcctcgaagtggaccgacgtcttgtcctcgtccgtgtcggatctgttggcatcgccctaaacccaacaaagcacaaggcaggcatgaggggccccgtgagtggggacccttcatgccggacagaagtctgggctggcctgggaggtggggtgtggacagaagggcccagaggatgatgtcactgccagggtgggcaggtaggtgaggaatctgcctctcccgaccgacccctgcccactccgctgggctcctggcctcccctctcctcatggcagccagcttcccttctctatccctcacctcttggcaggccccccacacccctcccctcgacctgaagcccgtctctcttctcatcgccctcctcctggcagcccctctccctgccccctcacctccgcctggaagccctccacgaggatggccaccagcaggttgaagagcacatagttgccgaaggtcatgagggccacgaagtagagggcggcccaggaggaggtggaggccatgccgttgtacaggaccacgttccagtcctcctgggtcaggatctgggggatagcagggggcctggggtggtcaccccagccccgaaatgccggcaagtccttggggcagaggcagctatggatgcgcaggacggcacctccacctctctggggaccacactcagcacccaacactgctgcggggaccccgggcactacctggaacacggtgacgatggcccacagcagggagtcgaagttcttcctgtcaggcacggtgtctccggtgtctgtcttcaggctgaacttgcagccgaaaaggtgcatgcccaggatgctgagggtgggggcaggggcgtgttgagggtggaggcaggggtgtgctgagcggaagaaggtgggggagcgggaggggggtgggaggagggaggggcaggactggctctgcccgtcttggctctcctggcctcctaccctccctgggcgcccgagctctctagcttaaaagggacttcctgccctacaactcagtagtgtccattccacaggcgagagaaccaagaccagaggcgggacagacagagggaagccactctggatttgggtggcaactggaacctgggacacctgcctcattcagcctctctggactgtgaaagcccggcctgcctggctgcctagcctccagccgaccctgaccctgagctccaggctagacgggcacacagcaggcgctcagaacaccccagttggagcctggtgcctgcccccacccccggtattctgctcttgagtaaatccccagcttgtccacctggcggcccatctctgacccctgccatctgactccctgcatgtctaacacgtggcacacagtaggggcccaatcagtgcttctcaaatgaaggcagcagaggccgagtgtctg

SEQ ID NO: 27454 - DNA, 1862 bp, Artificial sequence
  DNA replication origin
cctgagtgatgatatcagcgtctccaccaccagcttgaggcccggggcccggctgatgaccctggaggggagtgaaggatacactgcagtcatctatggcagcagctgccaggcgccggcagagctcagcaaaggtcccaaggtggggccgagtgggcggcctgcgaacagcccaggactgcgggaggagtaatgggcagtggcgtcaggggactgtgcttccaggttgccccgggagcccacggggagccccccacctcagaggccgcagggtccgcagcagacgcagcacgcgcagaacacccaggatcttggcgccaccagccgaggccatggccacgacaatgtccaccagggacaccagcaccagcagcccatccagcaggttccagctgctctgcaggtaggcgtgctcgccggacagcagccccagggccaccacctgcggagggccaatggcactgagctcaggctcaggcgtggggggtctggggagctggcgcgctgctgggtgggggtggggatgagggcagaacggggacctgggaacaagggcagtccccgggccccgcggtaccttcaccatcatctccgccacgaagatggccgtgaagatgtaattggagacgctgaggaagacccgctcctgccgggagaggacggtggggggctgtgtccactccacccctccctgggggtcgtggtggcccgggacgatggggttggctgactcacggtgctgccgggatcaatgtcaggcctctccagggcgatggtgacgcagttgaggaagatgaagacgaggaccacgtgatcaaacatcttgtgtgtgatgaccttctggcaggagacgcggaacctgggtgggcgggggcgggtgagaggtggggcggggcggcgtggatggcagagtggatgggggttgcaggacagccctggccacgcctccacttcagccccggtccctgcggtgtgagaaggggtgcccactcggaaatatccaccatgtgctagccccacccaggagggacctgggggcgggggtcccgtggggtggaactagccatgcagcctcctgacccggccgcctcaccggttctgtggggagaagaggtagagggcccaggcctcgcggctccggcaccactggggcttgtagggctccagcactttatgcaggcggaggcagcagctctgtgggatgaggcggcggcttctcagagcctgcgcctgcctgcccggccccccatcagggccctctgtgctcagctcggccacccctcccagcaccttctcagccttctccatcctcactcctcacccgctggcctttgggctctggctttctggcctctggggcccataccgtggagcctcccccttccctacgctggtgacggcagagtgacccgtgctggagtccacggggccaggtgagcgggtgctcttgggtccctgactctgggagtggtccttgacccacggaagcctgagagcctagcggatgcctggccctgcctcggcagcagctctcggccagtggctgacccacggcgcagagcccagcccccgtatgcaggccgtgcgtggagcgtttagctcacagcccctagacggcagaggggggactctgggatcatctgtggctgaatccctgaacactgctggattcctccctggcctggcctgcttctctccccttctgaatcccctcagtcaacaacacgccctgaatcccatctcaaaccccacttgagggaacctgccccagacagacgaaggcgagtcggcggtgggcccagggccacgcactcacgtcctccgagtcgtcgtcaagctcggctgcatcctcacggtggctg

SEQ ID NO: 27455 - DNA, 2499 bp, Artificial sequence
  DNA replication origin
gaagggctgggcagggcagccccactccatctctgggtctgggcccacaaggcctcactggagcagagacgagagtgtaacctgccctcctctggccaccagcccaagtacctcccctccccatcctccaaggggccatgggctgtggtctagggtctgccggactccagaccatctgaagtcggcgcccgccatctgcgtgtgtcccccaggcaggtgtgcactgaatgctcagcctccagggcccctccacgtacgaggaggagctcccgcgggtgaaggcgtgagctgccaccacaccccaggacctgcctcggccacagaaccacacacgggtggggactgctggcccagggcctggaagagcaggatccacccgccacccgaccctcatgctctgcggccggcatgcagtcactgaagcactcagcgcagcccgggcagccggagagggcccgcggccagtcaggctggaccagcaaggacacaggacagccacaagcctgcaggggtgtgggcggcccctcgttgctctgggtgtcccggcgcacggcggagatgcaggcagactgtgagccgggcagagccgcacgcgtgcacgcacacagcagcccggacactggcgggcgagcgcagcccctcctcacgccacacgcccagcacctccggctgcctgtgcccaccctgcggaggaccccagcaggcctgggatgcccgcccttccccgagcagcggccgcagaagcggggcctgaggcatgcgggacagggccggtacctgggctggggaaagtgcctggaaagacaaggagatggtctgagggccgagggcgtggcgcactcgggcctggagccctccctgctctccctcagcccccgtgtctcgggggctgtgctggctcctcgtggagtgaggactcggtggggaacctgcctcttgggcgctggggatggggttgggggtgtctcctcctctcctgccatggcgggctccccgacggccctctcgggccagcccctccaaggcccagcccccatgcaggcccaggcaaggcgggtggcgtgcagagccattcggggaggccggggcgggagtggaggggctggagggcccggtgggcacacaggtaccgacccgccaccgccaccgccaccgggagcgccttactcctgcgcctcctctctaggcgccgcagccgcttctcctctcgccgccgcgcctcctccgcctcctggtgctgccggcacttgtggaagttctcgaccacgacgcccacgaacatgttgagcacgaagaagctgacgatgagcaggaaggagatgaagtacagcagcatccaggggttgtggttctgcacaggctgtggcacagaggcggtgggtccccgcccgcctgccccgccaggggccctacccaggatggccccccgagtccccagaggccaaggcagccgctcgcgggagaccctgaggtgacccagctcgacccgcctgtgcgcacctgctggtcgacacccacggcatccagcccgtcgtacatgatgttcacccatccatccttggatgacagcacgaacagcgacatcagggcctgagggccagagccagggtcactggcgagggttagagctggggtcgccggccctctcgctccagggtgtcctggagacccccagctcccgcccggccgcccagcccacctggcccaggttgtcgaagttgtacttgcgtcgcacccagcggtagtgggcggcccggcactgtgccttggtggagatgttcctggtgtcggggccctcgcagtagtagaacttccctttgaagagctgacggggtgcgacggtcaccgcggagggcctggcctgtgccccaccccacaccggacttcctggggcgcgagtgaggcccgagctgtccctccccgtcccgcagcggcgctgctgggagccacgctgggaaggcagaccctgtctgcgacggggcagacccccgggcacgtgggggccacacacctgcacacccaaaatgccaaaaatgatgaagaaggcgcagcagatgaggacgatgttcccaatgggcctgagtgatgatatcagcgtctccaccaccagcttgaggcccggggcccggctgatgaccctggaggggagtgaaggatacactgcagtcatctatggcagcagctgccaggcgccggcagagctcagcaaaggtcccaaggtggggccgagtgggcggcctgcgaacagcccaggactgcgggaggagtaatgggcagtggcgtcaggggactgtgcttccaggttgccccgggagcccacggggagccccccacctcagaggccgcagggtccgcagcagacgcagcacgcgcagaacacccaggatcttggcgccaccagccgaggccatggccacgacaatgtccaccagggacaccagcaccagcagcccatccagcaggttccagctgctctgcaggtaggcgtgctcgccggac

SEQ ID NO: 27456 - DNA, 1228 bp, Artificial sequence
  DNA replication origin
ggatgctcacgtcctgccagcccctccttgggtgggacactcacctcccgccagcccctccttgggtgggacactcacggccaggttggggaggggccccaaggacagggggaggggagtttcaatcaacattaaaagacccgtgttcacacaaaaccccacatccccacgcaaaccccagcgagggctcagcggagcgccggtccagggttgtgcccactgtgttggctgccccactgggggtgccccagcccctgggcccctcgcggccccctcgcacccaccttgggttggttatagtgctccatggacatggtgatgacgttgacacagatgatgaaggtgatgaagaggtcgagatagtggctggtgcacagcgagtgaatggagcggcgcgtgggcgagtagtcggcatagtagggccggcgctgggcctctgcggggagggcggccatgagcgccgggcaggagggccgcccggcgctcctggctcctgcagactccattctcctcctaggtggccaagtgtagggtagaagttgggggcccacggctcatgtgaagatggggctggccctgcctcatggcagggctcacataagactggagaagggggactctctcaggaaaaggaccctgttctaggtgagatgcagctccctggggagctggctaggccaggaggcctgggctggagcaggccttcggggcaggccactgactaacctcctcctcagcaacgcggttgcgccaggcagcccccaggagtgggtatgaagctgagatggctcccccacatcccaactgggtgcctggcagggcccgcccccctggagctcccaagttggcgcagcacgtggctgggcctctgtggtctactccttgcctggcctcaggctgagacactgatgaagggctgggcagggcagccccactccatctctgggtctgggcccacaaggcctcactggagcagagacgagagtgtaacctgccctcctctggccaccagcccaagtacctcccctccccatcctccaaggggccatgggctgtggtctagggtctgccggactccagaccatctgaagtcggcgcccgccatctgcgtgtgtcccccaggcaggtgtgcactgaatgctcagcctccagggcccctccacgtacgaggaggagctcccgcgggtgaaggcgtgagctgccaccacaccccaggacctgcctcggc

SEQ ID NO: 27457 - DNA, 2148 bp, Artificial sequence
  DNA replication origin
gccctgcccagcccttcatcagtgtctcagcctgaggccaggcaaggagtagaccacagaggcccagccacgtgctgcgccaacttgggagctccaggggggcgggccctgccaggcacccagttgggatgtgggggagccatctcagcttcatacccactcctgggggctgcctggcgcaaccgcgttgctgaggaggaggttagtcagtggcctgccccgaaggcctgctccagcccaggcctcctggcctagccagctccccagggagctgcatctcacctagaacagggtccttttcctgagagagtcccccttctccagtcttatgtgagccctgccatgaggcagggccagccccatcttcacatgagccgtgggcccccaacttctaccctacacttggccacctaggaggagaatggagtctgcaggagccaggagcgccgggcggccctcctgcccggcgctcatggccgccctccccgcagaggcccagcgccggccctactatgccgactactcgcccacgcgccgctccattcactcgctgtgcaccagccactatctcgacctcttcatcaccttcatcatctgtgtcaacgtcatcaccatgtccatggagcactataaccaacccaaggtgggtgcgagggggccgcgaggggcccaggggctggggcacccccagtggggcagccaacacagtgggcacaaccctggaccggcgctccgctgagccctcgctggggtttgcgtggggatgtggggttttgtgtgaacacgggtcttttaatgttgattgaaactcccctccccctgtccttggggcccctccccaacctggccgtgagtgtcccacccaaggaggggctggcgggaggtgagtgtcccacccaaggaggggctggcaggacgtgagcatccgacccatggggaggggcgggagccaggcaggcctgaggtggagtttttctttattcgggtccccctgcatcctctcctttcctcagcggaaggacttcgtcctcccagccttttagaagaaggaggtagcctctgggtagcagtaagcttttgaggctgaacagactcagctctatggaaagcgttttgtgtggagccgaggatggccgtggccagaggccaggagcctgggctgggaggggcaggatcttccctctccggaggttcgtcctcagagggtgaggggctcccaggtccatctgggcagtacctcccagcccagcccaggctgcataccgtcggtgctcagagttgggccctgtgagcccatgtccccatgtccccgaggtgctcaagtcagtagaagacagggtgggaggtcaggacactgccatcggggtgcacagacggctgcagggtgtgaaatgggctgggggctcagggtggcttcctggagacagtggcattcagctggtcttgtggatgctgggagggtacctttcactcattcacctgatcagacacttacggagcacttcctgtatgctgggctggaggagggccgaagaggctcccggtgcccagggaggagctactgagctgacctgggagcctccagggccggccagcgggggcactcgggcgtgcagagtgggagccagggggaagaggggtggccccagccccacctcagccagcccgaccctccacccccagtcgctggacgaggccctcaagtactgcaactacgtcttcaccatcgtgtttgtcttcgaggctgcactgaagctggtagcatttgggttccgtcggttcttcaaggacaggtgtgtgtggtggggccgtcttgggttctgggggcccctcagggctctgggggctgggggcaggtgaggccgcaggctttcccacggaggtctgcagaagcaacgctgctgagccgaggcggggaccccagacgtgtgcgctgagcctccggccacacaggtggaaccagctggacctggccatcgtgctgctgtcactcatgggcatcacgctggaggagatagagatgagcgccgcgctgcccatcaaccccaccatcatccgcatcatgcgcgtgcttcgcattgcccgtggtaggtgcccgcgtgcccgccaggttctctctgcgggtggagggtgggggctcagccatgg

SEQ ID NO: 27458 - DNA, 1187 bp, Artificial sequence
  DNA replication origin
ggccaccagaccccacctgcccaccttcttccaggtgctccgggcccggccaagtggaagcaagttcccagagctgggcggggacccctgttcctcagccccatgcccctctcggggcaccatgacctcaccaggtagacagagcccacccctctgtgctggcccgcactggcttctctcttcctctgccctgcccctgagcatcagcctctggcccagagcccactccacactctgcccagcaggttccccaaggcctagcatgctcttcctgggggctctggcccgccctgttcagcggctacctcagagatcccatggcggggcccaggccagcacgcagctgactgaggggtcccggcaggtgggcctgggcctcacccctcccctgccacggctctcttgtgagccacccaccagccccagcatttgcacacactgccccgctgggcggcgcaccctccaaggctggccaggcctgtcctacgccacgccccttctctgcacagctgagcacctggtggagtggtacctggccctcgggagtgttacttggacgaagctaggcacgccgctgaggacagggtgagtggggacagctgaggtgggaggcagaagacaggcagggggcaagtgacagatggcgcagggacaggaaatgggtgggaacaggaggaggtgccgggtgcataggcagccgtgggggttgggggtggctgggaacatggctgggctggtggatggacggacacacgggggttggataggtggactagaggctacggacgggacaacgtgttgggtctcttggccttggaggacagaaaggatctgggcaggggccaggggcacaggaagcagggaggctgggcccatgtgggctccgagggggccccgggcccgcagccgacgcctgcatcctgggtgtattcctgtgcccacacacacccaccttggccacctgctgccctctgcctgcatccctctggctctccacggcccccgcctctggaagtgcaccggggagggggccccggttatgagtcttgcccagaggattgaggccagagggcagcggctggatccacctctgccagcccagccaagccatgcactgcacacagcagggacgcagcttcagccaccacacaaccgagggaccagagaaacgagtgagggggagaggg

SEQ ID NO: 27459 - DNA, 1250 bp, Artificial sequence
  DNA replication origin
cgggacatgcacccagcctccacatgccccttggggagcccagaggcaggatagcccggaggatgtggatgacgaggccctggcggttcgccctgcctggcagagggtgaccctgggtgtgaggtcggagcccctgggccgaggcccctgctgccgcacctgggctggggctcatcaggcctggcggctgccatggaagaatcattattgtgtgtgtctgtgactgcgcgtggcgggggatgagtaggcgccggctgaccaaaatcaagcttacctggtggacagacactggactgtggcaacgccacacccaccgtcgggacagggcccgggggagggccctgcagggactgggctgcctgaagtggaacccggcaggggcagggctgggccgtctaaggagggtccccacctgccccgcccagcctgggccgaggctgaggcctgggtgggggcctcaggaggctacggccaccaggtaaggggagacagccaacatttgtctcctgggaccatgtgacgttgggcatggcgtgtgtttccagatgtctgtgtgtgcacgtctctaggtgttcttgcttcccctcacgtgtggcaggcatccctgtgtctgtgttgctgtgtgcacgtccgcacacgtgtcacaagcctgggcacatgcctctgcgtcaacacgagactcggcctcgtgcagaaaaggctccggaagcagggccgggtgaggacgcccaggaggcgtgtggccctgatcaggccccacgctatttgcaagcatgtgcctgcgtgtgagtggatgggcacaggggcgcctgtcaggaccccatgtgtgccaggaggagggcgcaggagccactcacccagcctcccgaacagctccactcccagcgcagcatagataaaaaacaggagcatgaaaagaaggcccaggttccccacctacacaagagagaagcagagctgggtcagacgggcgggcagggaggcctcagcccaccctgcagggcactcggcgcctcggccaccagaccccacctgcccaccttcttccaggtgctccgggcccggccaagtggaagcaagttcccagagctgggcggggacccctgttcctcagccccatgcccctctcggggcaccatgacctcaccaggtagacagagcccacccctctgtgctggcccgcactggcttctctcttcctctgccctgcccctgagcatcagcctctggcccagagcccactccacact

SEQ ID NO: 27460 - DNA, 1308 bp, Artificial sequence
  DNA replication origin
ggctccgacctcacacccagggtcaccctctgccaggcagggcgaaccgccagggcctcgtcatccacatcctccgggctatcctgcctctgggctccccaaggggcatgtggaggctgggtgcatgtcccgcctccacccggagcgggctcggctgaccgggcggggtctccctccccgcagagtgcagtgaagacaacccctgcgagggcctgagcaggcacgccaccttcagcaacttcggcatggccttcctcacgctgttccgcgtgtccacgggggacaactggaacgggatcatgaaggtacccgccgcggccatgcctctggcacctggcagccccagcggtttttcaggctctcccaggaacgggtcggatccgtccttgcagggcagggggaaggggacggcactgccagggtggcacccgcgggtgggtgtggaccccggcccacagctgtcccccaccgcaggacacgctgcgcgagtgctcccgtgaggacaagcactgcctgagctacctgccggccctgtcgcccgtctacttcgtgaccttcgtgctggtggcccagttcgtgctggtgaacgtggtggtggccgtgctcatgaagcacctggaggagagcaacaaggaggcacgggaggatgcggagctggacgccgagatcgagctggagatggcgcagggccccgggagtgcacgccgggtggacgcggacaggcctcccttgccccaggagagtccgggcgccagggacgccccaaacctggttgcacgcaaggtgtccgtgtccaggatgctctcgctgcccaacgacagctacatgttcaggcccgtggtgcctgcctcggcgccccacccccgcccgctgcaggaggtggagatggagacctatggggccggcacccccttgggtatggtagccagcaggaagatatgggctgggtgggaagcaggacagggaggaagatgggggcaggtgggagggaggatggggtcaggccagagcagggcaagaggaaggatgggcgggaaggaggatgggggcaggcaggagggaggatggaggccagattgaggaggctgggtgtgggcaggtgagagagaggacgggtcgggctggggctggccaggaaggaggatggtggcaggttgggggaggacgggggtgggtggcagctgggcaggaaggcaggggcagagctgccagcttagattcttccctgccccaggctccgttgcctctgtgcactctccgcccgcagagtcctgtgcctccctccagatcccattggctgtgtcgtcc

SEQ ID NO: 27461 - DNA, 1510 bp, Artificial sequence
  DNA replication origin
ccggcacccccttgggtatggtagccagcaggaagatatgggctgggtgggaagcaggacagggaggaagatgggggcaggtgggagggaggatggggtcaggccagagcagggcaagaggaaggatgggcgggaaggaggatgggggcaggcaggagggaggatggaggccagattgaggaggctgggtgtgggcaggtgagagagaggacgggtcgggctggggctggccaggaaggaggatggtggcaggttgggggaggacgggggtgggtggcagctgggcaggaaggcaggggcagagctgccagcttagattcttccctgccccaggctccgttgcctctgtgcactctccgcccgcagagtcctgtgcctccctccagatcccattggctgtgtcgtccccagccaggagcggcgagcccctccacgccctgtcccctcggggcacagcccgctcccccagtctcagccggctgctctgcagacaggtaggagaagccgttggcctgcagcagaggctggcggggatggggggcttgcagggatgcctcgtctcatctgaaggaccagcagacgaggacaaggcaggaggagggtcgcactgggtccttggggctccgaaggtttctgcctgctgcttggtggatcttggagcattgggcccaggtgcgtcttcaggcctgtgagcctgtggctacagagctcttggctacagggacctgagtcttcttggacccacagcttcaggccccacggtgggcagacagcggtttctcaggtcccgtggtgggcagacagcagtttcccagggcccacggcgggcagatggcagtttctcaggccccatgtgggcatgggtcccgtggtgggcagacagcggctttttcagtcctggcttgtgttcagatgtcccagccttgcccacctgcagcctcagctcctcttcctgccctttcctacctcttgctgcccagtacaagacgcctgtaccgcacaggagcagttaggagagccccatcctgggggtgcccagctgggctgctgatgtccaggggtggggaggtggcctcagcctcagctctgtgcccctgggggccatggcatctctgcccacagagcagcgggtacaggctttccccgggagcctcacaggtcaggagtgagactaggacgtccacaccagcggcttccagccccatctcgagggtcaggagccacccaggggacctgcccagtttggcctctccagtacctggatggtgaggggtctccgagccctggccactgacagggctctcccagggccccgcccctcactttgactctacgcccccacaggaggctgtgcacaccgattccttggaagggaagattgacagccctagggacaccctggatcctgcagagcctggtgagaaaaccccggtgaggccggtgacccaggggggctccctgcagtccccaccacgctccccacggcccgccagcgtccgcactcgtaagc

SEQ ID NO: 27462 - DNA, 1512 bp, Artificial sequence
  DNA replication origin
ggctatacgcgggagggaggtgaggagcccccgtggggatgctgggatggaggaaggcaagggcggcaggaagagagctggcttgagggatgctgatgctaccacctgctcctggtggcttccacacccagccaaggccgcccctatcggctgtcccttttcaaagcctgtcgtgtggatccaaagcagcagccaaacgtcagatcacaacccacgtgccgtgacgagggtcgtggtggcatgggacttgtgtctggcaaggtctcccatccccccagtgcagggcctggtgccccaaccttctctgaagcctgttccccccaccccagagcctctgccacccccgtacagcctgcgggaggtgaaagtctccgtggtggacacagagacctgccgccgggactatcccggccccgggggcagcatccttcagcccgacatgctgtgtgcccggggccccggggatgcctgccaggtgagcctgccaggccgtgacagaggatgggggcggctgaagcccagggaggggctccccatcttctcggctcccaatgctcgccttctctgtcctcaggacgactccggggggcctctggtctgccaggtgaacggtgcctgggtgcaggctggcactgtgagctggggtgagggctgcggccgccccaacaggccgggagtctacactcgtgtccctgcctacgtgaactggatccgccgccacatcacagcatcagggggctcagagtctgggtaccccaggctccccctcctggctggcttcttcctccccggcctcttccttctgctagtctcctgtgtcctgctggccaagtgcctgctgcacccatctgcggatggtactcccttccccgcccctgactgatggcaggaatccaagtgcatttcttaaataagttactatttattccgctccgccccctccctctcccttgagaagctgagtcttctgcatcagattattgcaacatttaacctgaatttaaaagcacacgaaacaaaggtgtcaatgggaatctcgcggccaacgcccccagatgtaggggaggcctgattcgcatcggggccgggcgcgttactccatggggtcggccccttagtgaggtgtcacctctcccagagtcacaggacgcttctgggaaggcccgagcggaacggaaagggtggtggctggaaggggagggtggtgagggcgtgacaggcggacaagaactcagactgtgagtgaaggtgacattgggccgcggtggctgcaacctgccgccggcaagggcacagggcccccagcgagtgtcctgtaacaacgcggggcctgaaaggacgcaacctggtaccttcccctctctggcgggtgcccggtcttcgtcccacagacgcggcttctctcctgacgggaggctgacccagttgcccgcacagcctcggctggtagcaaaactcggagaaacccgaaccagaacggacggaggctcgtggggcccggcagctactcct

SEQ ID NO: 27463 - DNA, 1632 bp, Artificial sequence
  DNA replication origin
catccgcagatgggtgcagcaggcacttggccagcaggacacaggagactagcagaaggaagaggccggggaggaagaagccagccaggagggggagcctggggtacccagactctgagccccctgatgctgtgatgtggcggcggatccagttcacgtaggcagggacacgagtgtagactcccggcctgttggggcggccgcagccctcaccccagctcacagtgccagcctgcacccaggcaccgttcacctggcagaccagaggccccccggagtcgtcctgaggacagagaaggcgagcattgggagccgagaagatggggagcccctccctgggcttcagccgcccccatcctctgtcacggcctggcaggctcacctggcaggcatccccggggccccgggcacacagcatgtcgggctgaaggatgctgcccccggggccgggatagtcccggcggcaggtctctgtgtccaccacggagactttcacctcccgcaggctgtacgggggtggcagaggctctggggtggggggaacaggcttcagagaaggttggggcaccaggccctgcactggggggatgggagaccttgccagacacaagtcccatgccaccacgaccctcgtcacggcacgtgggttgtgatctgacgtttggctgctgctttggatccacacgacaggctttgaaaagggacagccgataggggcggccttggctgggtgtggaagccaccaggagcaggtggtagcatcagcatccctcaagccagctctcttcctgccgcccttgccttcctccatcccagcatccccacgggggctcctcacctccctcccgcgtatagccccagccggtcacccagcaccggatcccagggcagaagtcatctgaggcctccgggaggcagacgggcaggatccggctggagagggtcacggggacactgagctccaccagggcgatgtccccgctggtccccggctgtcctgaggggctggagtgcaggatgatctgcctcacggtggagaagtggggagacagagtgatctccagttcccccaggtgcacctggtagtcggatgagttcagggacctgggagggaaggtggctgggtgagaggggccagctgcggaggctggaggtcagtgtcggccccgcccagaccctacccttgcaggcatccgaagcccagctcttccctcctaggcttgggacgcagaaagcctgggcagtggcctcaccctgcagggcccaaggaccacggcagcaccttggggttcctgccagcccctggaaaagccagcagcatgcccgacaccagcaggggctggtcaggaggcagattgcaagctcagctccacgtgaagagaccgaggggagggaaggagggagggagctgtccatccctagaggtgagcaaagagctgcagaacctcacagaaggtgggcaaccagctcctccctttccattggaaggaagtaggctcagagttcccaagcctcggagtgagtcaagaccaagtggaggcctctgcgctggcgcatgccccactggggcctggacattgagactgcccctgcccacccggacactcacccggagaagcagtgggcagctgt

SEQ ID NO: 27464 - DNA, 1632 bp, Artificial sequence
  DNA replication origin
cctgggcagtggcctcaccctgcagggcccaaggaccacggcagcaccttggggttcctgccagcccctggaaaagccagcagcatgcccgacaccagcaggggctggtcaggaggcagattgcaagctcagctccacgtgaagagaccgaggggagggaaggagggagggagctgtccatccctagaggtgagcaaagagctgcagaacctcacagaaggtgggcaaccagctcctccctttccattggaaggaagtaggctcagagttcccaagcctcggagtgagtcaagaccaagtggaggcctctgcgctggcgcatgccccactggggcctggacattgagactgcccctgcccacccggacactcacccggagaagcagtgggcagctgtgagcacccactgggggctgagcagtgacccgccgcacacgtgcaccctccgcaggcggaggctggcctgccatggccatgcgccggccggggcagcgtgaccccccacgatccggccgcctgcatccgaaacctgcggccggccacaccctaagtcgaaggaggaaggggtgcctggtggggatcccaagaaacccactgcacttcctccatgaagccttccctgaccacacctccctgccttcttggggactttgctcttcagctctctcgtctgccagactctccccagaagcatcgtgggtgcagcagaaatgacgtctcaggagcagtgagcgcgcctggggctcaggtcgtcctttctaagcaccatgctccacaaactaaccagggctcccggaggcggtggaaaggctgcagagggcccctaggcggctagaaaggggctcagaacggtggagcccccgagaaggcccggggtgctgggggtggctgcctagtgggccccggttttccttcaggggtggtggagatattcgaagctggataaaattcggggggcggggggcagacagcactgtccaaggtgctcggggcctctgaattggacgcttgataatgtaactttatcttctgtaaacttcacctcagtaagttaagaagaaattaagaggaagtcagctggagacccactggccacacctgggtctgcctgagctggataattgtgctggtgatggagtgtggccactgggctgaatggaagggaagctgggatgtagacagacagagatgtttatagataggcagcgggtgtggggtggggcaccggctctcccacacggcaaagcccccagctggttccagggccacggtggggacgctgtggggagaaagttcgaggagggccaggttgtttcatggcctcagagcatctcccaaggtacagactgactacagtggtggtgggggagacagccctgcagcacaccccgaccagccccactcaaccgagagatgcgagcagaaaccacggcgacaaactatgacctccccgggcccccattgggaccccagggaaggagagggtcaccgaggccctcctgccaggccttgcctgcaccctcccccacaccccacacctgtcagagacgtacctggctgcaaagtcctgagggacacacctgtgggaaagacgaagggcccaggatggagggggctgccaaggagaggggt

SEQ ID NO: 27465 - DNA, 742 bp, Artificial sequence
  DNA replication origin
acaagcagtggacggaggggccgggagaagagctcgtgggaagcgtggggtaggggctcgtgatgggcagccctggggctcccggtgaccattctctgtcttgacccggttgcagggacctggctgtcctttataatcaactgagttgcccgagtggctctgtgtgacccgaatgctggatgcatcgtgtggggagaagccagcctcggggaccagggctgcccaggaggccccgtcccacggtgactggctgtgccttgagggctaggacctcacactgtggcaggtgtcctcagcacacctggaccccttctctcccagtgacatccacaaccagaaacacagcgatgcacaccagtgatttccatgcactttaatgaggtccagcactcaggaggattagcgcccaccaccagctgcctgggcaggggagggccggagggcccggtgcaggcgtcaggcttaggacagggaagggggctcaggatggggaagggtcctcaggacaggggaaggggctcagaagagagcagggggcttaggacaggaaggggcactcaggacggggcagggaaggtgtggggggcagtcgccacctgggtaggaagcagtggtgttttgaacaggaggggctggctctccagtgacccaggtggacaccccaggcctgactcacggctttttggggacatagtggtggatccagtccaagtagtaggtgacacgggtgtagatgccaggc

SEQ ID NO: 27466 - DNA, 1518 bp, Artificial sequence
  DNA replication origin
ccaggcctgacccaatcggagcattcctaggaggagcggccccagagcccctgactcgggggtcccagagccctctgcacaccacagccccggtgtccccgtgtgtccctgggttctcccagccctggtgtcccctgagtctcttcttcaccgtcagccctggtgtctcccgtgtccctgccacaccctcatccctggtgtcccccgtcaccccatcccctcacctcctgggctcctgaaggtcccatcttgtgggcctcattcatggaaccaggacggggcaggtggaggcctctggggagtttgtccagagaatggaggagaagcagggtcatgagcaggagcggtctgggccacccctgcctgtcccccggggggtgcagcccggaaggagtccagatgcatatggccccgcagtgcagagtcagccccaaaccaggctggtcccaggcagggtgggggcaggaggagccctggagtggccctgtgttgggggtcggggggcaggcagggggtcctggggctcagaagcggaggaggtgggctggaggccccagtgaccaacaggcccaggggagtcaggaggtggggtggacggacctgcagggacagtgtcagcgctgaatgggatggagagcacagggagctggggccgggggcaagtccacagggagctggggccgggggtgagaccatggggagctgggctggggctgggggtgagaccatggggagctggggccgggggctgggactagtccatggggagctgggctggggctgggggtgagtccatggggagctgggctggggctgggggtgagaccatggggagctgggctggggctgggggtgagaccatggggagctggggccgggggatgggactagtccatggggagctgggctggggctgggggtgagaccatggggagctgggctggggctgggactagtccatggggagctgggtctggagctgggggtgagaccatggggagctggggccgggggctgcgactagtccatggggagctgggctggggctgggggtgagtccatggggagctgggctggggctgggggtgagtccatggggagctggggctggggctgggactagtccatgggcagctgggctggggctgggggtgagtccatggggagctgggctggggctgggggtgagtccatggggagctgggctggggttgggggtgagtccatggggagctgggctgggtctcctggggttgcacctgcactcctgtctgcccttccctctgccgatgaagctcagatcccatgataaggaggcacctgcagaccaggggtcctgcacggacagccccagaggtggacattgaggactcgtaggaggacttgggtctcatacggcgggtggggagcagggccccttcctggctgaggacacttggtgctgtcccctctcaaggctgtttccccatctgacaaaggggtctcatgtgagcctcccaccaagtgagtcgaggaggg

SEQ ID NO: 27467 - DNA, 903 bp, Artificial sequence
  DNA replication origin
gctcctcctaggaatgctccgattgggtcaggcctgggaggcggaccaatcagcaccatggggatgcgagagccttgattggctaacactgggccaatcagggcgcgtcctgggcaccccgccccgatccccggccgctcccctggggctgctgcagggctggggtcccaggccattgacagacactgggcaagaggccacgtggggcagtgtccccgagagaagggtggggagtcgggtgagacgacagtggccgcgcccagactcagggcagcgatgggaaactcagccccaggagcttgctgggctggggagacgcacctggcgcgtgcagaggccccggcagccatgactcacgaggcggagaactgcacggagagctccgggcatccgcagggggttccccccggcgtcctcggccgagtgccggagatgcagagagacgtgggagccgcgtcggaaacgagaaccaccagatgagaggggcggagtccgggagtgcgcgcggggctggggatatcgcgtgttcccagcagctgagtggagaaaccttgtcagaggcaggcactggagagtcctcggaagggtatggaagggtacgaggggagaaagtaatcccgaaaccaaaggcttctccggacccaccctcacaaagctgaaaagcaaagcccagacggatccaaatgattgcaagtgacttaactgcctgtgagaacacatctcaaaacgatgtcaaggaatagaacacaacccagcacgcaacaaaacactccagagagtactcacgagatccgggggctagtcaagaacgagcgggtggccgggcgcggtggctcacgcctgtcatcccagcactttgggaggccgaggtggcagatcgtgaggtcaggagaacgagaccag

SEQ ID NO: 27468 - DNA, 1128 bp, Artificial sequence
  DNA replication origin
cgcagtggctcttcctcccccgacctctgacccttggcccctgacctgcatgagcccctccagctccctcctcccagaggagtggagggcgatggccacagcctaggcctggaggcagaccccgctccaggcctgcacagccccggctcgcaccccagtgcagcctcttctccccgtggggaaactgaggcagagagggcgccgtgacctgctacggtcacacgcaaggcctatcccagccctggaagctccagggctctgagacccgacccagcgggcaggtgggctgggcggggcagctgactcctctccgccccttcctcgcccctccccgcacctgccctgccccctccccgcccccgccccgccctcccgcaaacgccccgccttcctcccagcgcctgcctcggccgcgcccgggctccgctttgcatggtcaggggccccctctgctggagacgcggggaagtgcagcgctccggagggagagaaaagtcggtgatcgctgcgtagaaaatccaggaataatggaccctggagtaatggacttagcagggctgtgacatacaaaaccaatatgcaaaaggattactgtgtttctaaacgccagccatgaatattggacgataaacgcgaacatccataccctttgctacagaataaaaaaatcaaacaccaggaatacatttaagggaaggcatgcaagatctctacaccaaaaagtacaaacattgctgggaggagatttcaaagccctacgtaggtggagagacaggagcacgggccattttcatcaccctagaggtttcctcacctctcggtcacctgcctgaaggggcggggagtagacaccctagggtgatacgtcttgctttgggccatggttacacaggtttggcaatcatcacaattcattggactggacatttcaggtctgtgcattctgtttatttaatttgctctcaataaaaaaatatatctatacattcagttcccactcggacatacgaagggactggaagccaacctcacaaccacatcggaaacgctgggccaactgaaacgcagctgaacagccttctgagaaccgagctcacgggacaaagcactgcccccaaaccggacaga

SEQ ID NO: 27469 - DNA, 1051 bp, Artificial sequence
  DNA replication origin
actccagggtccattattcctggattttctacgcagcgatcaccgacttttctctccctccggagcgctgcacttccccgcgtctccagcagagggggcccctgaccatgcaaagcggagcccgggcgcggccgaggcaggcgctgggaggaaggcggggcgtttgcgggagggcggggcgggggcggggagggggcagggcaggtgcggggaggggcgaggaaggggcggagaggagtcagctgccccgcccagcccacctgcccgctgggtcgggtctcagagccctggagcttccagggctgggataggccttgcgtgtgaccgtagcaggtcacggcgccctctctgcctcagtttccccacggggagaagaggctgcactggggtgcgagccggggctgtgcaggcctggagcggggtctgcctccaggcctaggctgtggccatcgccctccactcctctgggaggagggagctggaggggctcatgcaggtcaggggccaagggtcagaggtcgggggaggaagagccactgcggctggcccagaggtcacttagccaccagatgcaggagacagccaagaggaggacgagttggaggaggaggaagaagtcccctgggagggggcctggggagccgcctgagcccccgatgctgggatgcggcggtggggccggctcacccaggcagagaggagggtgtagacccctggccagcgcccgcagctgtagctcttgacccagctcatgacgccaacctgccctcaggaaccatgcgcctggcagaccagaggccctcccgagtcaccctgagggcagagaaggcaaggactaggaggtggggggtcccgtttctgggctccggcacccccacgctccgtggccagcctggctcatcaggttgctctcgtcggggaaccgcagagtgaagccgcagggagaacccacttcacacccaccgaaacggccagaagctttttaaacagtcaagctctgctcacatctccaccccaccccttccctttccctccaatagattctgtccta

SEQ ID NO: 27470 - DNA, 1235 bp, Artificial sequence
  DNA replication origin
acccaggcagagaggagggtgtagacccctggccagcgcccgcagctgtagctcttgacccagctcatgacgccaacctgccctcaggaaccatgcgcctggcagaccagaggccctcccgagtcaccctgagggcagagaaggcaaggactaggaggtggggggtcccgtttctgggctccggcacccccacgctccgtggccagcctggctcatcaggttgctctcgtcggggaaccgcagagtgaagccgcagggagaacccacttcacacccaccgaaacggccagaagctttttaaacagtcaagctctgctcacatctccaccccaccccttccctttccctccaatagattctgtcctaaagcctagcatggggcaggtcccagggtggacctggggcgccacagccacactggcccagagtggggggcacacgggggattgatgagatcagtgaattgggggtggaaccagctccccgctgctggagaaggcagcccgatgggagaggagaaacgcagagtaagccctgtggggtggaatcacagctgaggcactgtgagagctcatggttttcattatagatatggccgtgtagatgtgcacgtgggagtgtgtgtgtgtcagtgtgtgagtgtgcctgtgtgtgagtgtgcatgtgttatgtgtgtgcatgggtgagtgtgaatgtgtgtgcatgtgtgttcgtgtttgcatatgaacattcgtgtgtgcatatgtgcatgtgagtgcacagatgtgcatgtgtgagtgcatgtgtgtgtgcatcaggtacatgcatgtgtgtgcatatgtgtgcgtgtgtgcatgtgaacattcgtgtgtgtgcatatgtgcatgagtgtgcacacatgtgcgtgcatgtgagtgcattgtgagtgtgcatggatcaagtgtgtgcaggtgtgtgcatgtgtgagtgtgcatctgtgtgcacgtgtgagtgcatggatcaagtgcgtgcacgcatgtgcatgtgtgtgagtgcatggatcaagtttgtgcatgcgtgtgctctgtcccctgaggagggctgtgagcagtaacacccaagagcgatgggcaatcccttcacctacatcgtggtctctaaataccgtttgccaccgacaggagctgggcctcctggaggactgcctggcgcagaggcggatatgagaggagcccagaagaatcttgtaggaggaaaagttcaaagatggagacatg

SEQ ID NO: 27471 - DNA, 1023 bp, Artificial sequence
  DNA replication origin
ccaatcggagcattcctaggaggagcggccccagagcccctgactcgggggtcccagagccctctgcacaccacagccccggtgtccccgtgtgtccctgggttctcccagccctggtgtcccctgagtctcttcttcaccgtcagccctggtgtctcccgtgtccctgccacaccctcatccctggtgtcccccgtcaccccatcccctcacctcctgggctcctgaaggtcccatcttgtgggcctcattcatggaaccaggacggggcaggtggaggcctctggggagtttgtccagagaatggaggagaagcagggtcatgagcaggagcggtctgggccacccctgcctgtcccccggggggtgcagcccggaaggagtccagatggatatggccccgcagtgcagagtcagccccaaaccaggctggtcccaggcagggtgggggcaggaggagccccggagtggccctgtgttgggggtcggggggcaggcagggggtcctggggctcagaagcggaggaggtgggctggaggccccagtgaccaacaggcccaggggagtcgggaggtggggtggacggacctgcagggacagtgtcagcgctgaatgggatggagagcacagggagctggggccggggatgagaccatggggagctggggctggggctgggactagtccatggggagctggggctgaagttgggggtgagtccatggggagctgggctgggcctcctggggttgcacctgcactcctctctgctcttccctctgcgtatgaagctcagatcccatgataaggaggcacctgcagaccaggggacctgcacggacagccccagaggtggacattgaggactcgtaggaggacttgggtctcatacggcgggtggggagcagggccccttcctggctgaggacacttggtgctgtcccctctcaaggctgtttccccatctgacaaaggggtctcacgtgagcccccaaccaagtgagtcgaggagggctggcccc

SEQ ID NO: 27472 - DNA, 1408 bp, Artificial sequence
  DNA replication origin
tcacccaggcagagaggagggtgtagacccctggccagcgcccgcagctgtagctcttgacccagctcatgacgccaacctgccctcaggaaccatgcgcctggcagaccagaggccctcccgagtcaccctgagggcagagaaggcaaggactaggaggtggggggtcccgtttctgggctccggcacccccacgctccgtggccagcctggctcatcaggttgctctcgtcggggaaccgcagagtgaagccgcagggagaacccacttcacacccaccgaaacggccagaagctttttaaacagtcaagctctgctcacatctccaccccaccccttccctttccctccaatagattctgtcctaaagcctagcatggggcaggtcccagggtggacctggggcgccacagccacactggcccagagtggggggcacacgggggattgatgagatcagtgaattgggggtggaaccagctccccgctgctggagaaggcagcccgatgggagaagagaaacgcagagtaagccctgtggggtggaatcacagctgaggcactgtgagagctcatggttttcattatagatatggccgtgtagatgtgcacgtgggagtgtgtgtgtgtcagtgtgtgagtgtgcctgtgtgagtgtgcatgtgtgtgtgtgaatgtgtgcatgtgttcgtgtgtgcatgtgaacatccgtgtgtgcatatgtgcatgtgagtgcacagatgtgcgtgtgtgtgcatgtgtgtgtgcatgtgtgtgtgtgaatgtgtgcatgtgtacatccgtgtgtgcatatgtgcatgtgagtgcacagatgtgcgtgtgtgtgcatgtgtgtgtgcatcaggtatatgcatgtgtgcatatgtgtgcgtgtgtgcacacacatgtgtacatgtgtgagtgtgcatgtgtgtccgtgtgtgcatgtgaacattcgtgtgtgtgcatgtgcatgtatatgtgagtgtgtgtgcatgtgagtgcattgtgagtgtgcatggatcaagtgtgtacaggtgtgtgcatgtgtgagtgtgcatctgtgtgcacgtgtgagtgcatggatcaagtgtgtgcatgcatgtgcatgtgtgtgagtgcacggatcaagtgtgtgcatgcgtgtgctctgtcccctgaggagggctgtgagcagtaacacccaagagcgatgggcaatcccttcacctagatcgtggtctctaaataccgtttgctatcgataggagctgggcctcctggaggactgcctggcgcagaggcggatatgagaggagcccagaagaatcttgtaggaggaaaagttcagagacggagacatgtcagatgacacagaagccagctcgcaggagctcccagtgtccgcatcagagcgagtttgcacat

SEQ ID NO: 27473 - DNA, 1060 bp, Artificial sequence
  DNA replication origin
tcacagccctgctaagtccattactccagggtccattattcctggattttctacgcagcgatcaccgacttttctctccctccggagcgctgcacttccccgcgtctccagcagagggggcccctgaccatgcaaagcggagcccgggcgcggccgaggcaggcgctgggaggaaggcggggcgtttgcgggagggcggggcgggggcggggagggggcagggcaggtgcggggaggggcgaggaaggggcggagaggagtcagctgccccgcccagcccacctgcccgctgggtcgggtctcagagccctggagcttccagggctgggataggccttgcgtgtgaccgtagcaggtcacggcgccctctctgcctcagtttccccacggggagaagaggctgcactggggtgcgagccggggctgtgcaggcctggagcggggtctgcctccaggcctaggctgtggccatcgccctccacccctctgggaggagggagctggaggggctcatgcaggtcaggggccaagggtcagaggtcgggggaggaagagccactgcggctggcccagaggtcacttagccaccagatgcaggagacagccaagaggaggacgagttggaggaggaggaagaagtcccccgggagggggcctggggagccgcctgagcccccgatgctgggatgcggcggtggggccggctcacccaggcagagaggagggtgtagacccctggccagcgcccgcagctgtagctcttgacccagctcatgacgccaacctgccctcaggaaccatgcgcctggcagaccagaggccctcccgagtcaccctgagggcagagaaggcaaggactaggaggtggggggtcccgtttctgggctccggcacccccacgctccgtggccagcctggctcatcaggttgctctcgtcggggaaccgcagagtgaagccgcagggagaacccacttcacacccaccgaaacggccagaagctttttaaacagtcaagctctgctcacatctccaccccaccccttccctttccctccaat

SEQ ID NO: 27474 - DNA, 1144 bp, Artificial sequence
  DNA replication origin
agtgacctctgggccagccgcagtggctcttcctcccccgacctctgacccttggcccctgacctgcatgagcccctccagctccctcctcccagaggggtggagggcgatggccacagcctaggcctggaggcagaccccgctccaggcctgcacagccccggctcgcaccccagtgcagcctcttctccccgtggggaaactgaggcagagagggcgccgtgacctgctacggtcacacgcaaggcctatcccagccctggaagctccagggctctgagacccgacccagcgggcaggtgggctgggcggggcagctgactcctctccgccccttcctcgcccctccccgcacctgccctgccccctccccgcccccgccccgccctcccgcaaacgccccgccttcctcccagcgcctgcctcggccgcgcccgggctccgctttgcatggtcaggggccccctctgctggagacgcggggaagtgcagcgctccggagggagagaaaagtcggtgatcgctgcgtagaaaatccaggaataatggaccctggagtaatggacttagcagggctgtgacatacaaaaccaatatgcaaaaggattactgtgtttctaaacgccagccatgaatattggacgataaacgcgaacatccataccctttgctacagaataaaaaaatcaaacaccaggaatacatttaagggaaggcatgcaagatctctacaccaaaaagtacaaacattgctgggaggagatttcaaagccctacgtaggtggagagacaggagcacgggccattttcatcaccctagaggtttcctcacctctcggtcacctgcctgaaggggcggggagtagacaccctagggtgatacgtcttgctttgggccatggttacacaggtttggcaatcatcacaattcattggactggacatttcaggtctgtgcattctgtttatttaatttgctctcaataaaaaaatatatctatacattcagttcccactcggacatacgaagggactggaagccaacctcacaaccacatcggaaacgctgggccaactgaaacgcagctgaacagccttctgagaaccgagctcacgggacaaagcactgcccccaaaccggaca

SEQ ID NO: 27475 - DNA, 913 bp, Artificial sequence
  DNA replication origin
tctggggccgctcctcctaggaatgctccgattgggtcaggcctgggaggcggaccaatcagcaccatggggatgcgagagccttgattggctaacactgggccaatcagggcgcgtcctgggcaccccgccccgatccccggccgctcccctggggctgctgcagggctggggtcccaggccattgacagacactgggcaagaggccacgtggggcagtgtccccgagagaagggtggggagtcgggtgagacgacagtggccgcgcccagactcagggcagcgatgggaaactcagccccaggagcttgctgggctggggagacgcacctggcgcgtgcagaggccccggcagccatgactcacgaggcggagaactgcacggagagctccgggcatccgcagggggttccccccggcgtcctcggccgagtgccggagatgcagagagacgtgggagccgcgtcggaaacgagaaccaccagatgagaggggcggagtccgggagtgcgcgcggggctggggatatcgcgtgttcccagcagctgagtggagaaaccttgtcagaggcaggcactggagagtcctcggaagggtatggaagggtacgaggggagaaagtaatcccgaaaccaaaggcttctccggacccaccctcacaaagctgaaaagcaaagcgcagacggatccaaatgattgcaagtgacttaactgcctgtgagaacacatctcaaaacgatgtcaaggaatagaacacaacccagcacgcaacaaaacactccagagagtactcacgagatccgggggctagtcaagaacgagcgggtggccgggcacggtggctcacgcctgtcatcccagcactttgggaggccgaggtggcagatcgtgaggtcaggagaacgagaccagc

SEQ ID NO: 27476 - DNA, 1397 bp, Artificial sequence
  DNA replication origin
tgattggtccgcctcccaggcctgacccaatcggagcattcctaggaggagcggccccagagcccctgactcgggggtcccagagccctctgcacaccacagccccggtgtccccgtgtgtccctgggttctcccagccctggtgtcccctgagtctcttcttcaccgtcagccctggtgtctcccgtgtccctgccacaccctcatccctggtgtcccccgtcaccccatcccctcacctcctgggctcctgaaggtcccatcttgtgggcctcattcatggaaccaggacggggcaggtggaggcctctggggagtttgtccagagaatggaggagaagcagggtcatgagcaggagcggtctgggccacccctgcctgtcccccggggggtgcagcccggaaggagtccagatggatatggccccgcagtgcagagtcagcctcaaaccaggctggtcccaggcagggtgggggcaggaggagccccggagtggccctgtgttgggggtcggggggcaggcagggggtcctggggctcagaagcagaggaggtgggctggaggccccagtgaccaacaggcccaggtgagtcaggaggtggggtggacggagctgcagggacagtgtcagcgctgaatgggatggagagcacagggagctggggccgggggtgagaccaaggggagctgggctggggctgggggtgagtccatggggagctggggccgggggctgggactagtccatggggagctgggctggggctgggggtgagaccatggggagctgggctggggctgggactagtccatggggagctgggctggggctgggactagttcatggggagctgggctggggctgggggtgagtccatggggagctgggctggggctgggggtgagtccatggggagctggactggggctgtgggtgagtccatggggagctggggctggggctgggactactccatggggagctggggctggggctgggactagtccatggggagctgggctggggctgtgggtgagtccatggggagctgggctggggctgggggtgagtccatggggagctgggctgggtctcctggggttgcacctgcactcctgtctgcccttccctctgcggatgaagctcagatcccatgataagaaggcacctgcagaccaggggacctgcacggacagccccagaggtggacattgaggaatcgttggaggacttgggtctcatacgggaggtggggagcagggccccttcctggctgaggacacttggtgctgtcccctctcaaggctgtttccccatctgacaaaggggtctcatgtgagcccccaaccaagtgagtcgaggagggctggccccacccccgtggattcggagtc

SEQ ID NO: 27477 - DNA, 1120 bp, Artificial sequence
  DNA replication origin
cccgtgacacccacgaccagaaacacagtgacggccacacctgctttccatcatgcactttaatgagagtcagcactagagaggatgggcgtccaccaccagctgcctgggcaggggagggccggaggggccgggaggggcggattcagggttggggaggaggctcaggatggaggagggggcaggatggaggagggggctcaggatggaggaggggctcaagaaaggggagggggctcaggatggaggagggactcaagaaaggggagggggctcaggatggaggagggactcaagaaaggggagggggctcagggtgggggagggggctcaagaaaggggaaggggctcagggtgggggaggggctcaggatgggggaggggatcaagaaaggggagggggctcaggacaggggacagggctcaggatgggagaggggactcaggatgggggaaggtgtggggggcagtcaccacctgggtaggaagcagtggtggtttggacaggaggggctggccctccagtgacccgggtggacaccccaggcctggctcagggcttcttggggacatagtggtggatccagtccaagtagtaggtgacacgggtgtagatgccaggccggttgggctgggcacagctctcctcccagctgaccacgcccgcctgcagttaggtgccattcaccttgcagaccaggggccctccagagtcaccctgggaaggtcagaggtcagtgctcgctggccaggcttcgggggtcaggatgagggatgcgctcgctggccaggctccggggattggggtgggggacgcgagggcccacctggcaggagtcgtgattttcgctccccgcacacagcatgtcatcgcggacgatttgaaagctgtggcccgtatggaggccggtgtgatattccgcgttgcaaaggtggttttccactacggggacttccacctccttcagcgggtatggcggcggcaggtgcactgggggcggaggggggcgtggagccgggtctggggccggctgggtgctgcttcgtggacttggtggcagagtcacgggcaggggagatggcaccatgggcccagtgctgttctgtgcctgcagccccg

SEQ ID NO: 27478 - DNA, 813 bp, Artificial sequence
  DNA replication origin
cctctggtctgcaggctgcgggggtcctggcgcctggtgggggtggtcagctggggctacggctgtaccctgcgggactttcccggcgtctacacccacgtccagatctacgtgctctggatcctgcagcaagtcggggagttgccctgagcaggctgggctgggctcccacctgggtcggctgaggagggaccaggaccttcctcctcccagcgatctccgcttcggcctccgctgcaggccaccgtcttgagcccggcttctctggctcctcagcgcccaggacctccctgatgccggggtggggaaggggccggggaagggagggtgggggcctcgctgcgtctctgtctgattaaagagcaagagcagagtgtgtggcgtctctgtgggatggatttgcattccaagctgcagccaggtgcggtttgctcagccacctcctgttggaggcctccacattttggctatggtaataaagatgctgagaacattcatgctccgggctctgtgtggacgtgcgtctctgggctctgtgtagacgtgcgtctccgggctgtgtgtggacgtgggtctccgggctctgtgtggacgtgcgtctccgggctgtgtgtggacgtgggtctccgggctctgtgtggacatgcgtctccgggctctgtgtggacgtgcgtctctgggctctatgtggacgtgggtctccgggctgtgtgtggatgtgggtctccgggctgtgtgtggacgtgggtctccgggctctgtgtggacgtgcgtctccgggctctgtgtggaagtgtgtttcctgtcctctgg

SEQ ID NO: 27479 - DNA, 1588 bp, Artificial sequence
  DNA replication origin
acgggacgggcacttgtacacacctccacgggtgcaaaagtatcagccagagggcctgccagaggcacttggagcctgggccaggggacccgcctgctccatggtggccgccccaggcccaggctccagtccttggagggagtttgtggagcccacacagggagatcttctggatgggctccaggaacctgttttaatcagtacaaacctcaggttgcaggaggggcacactctgctctgggagaggggccgtcacctgctgggagtctcagagggtggggagctgcattctcaggccagggcccagccccctgggccccagctgcccactgctgtgccttggggctccggcagcaaatgcctgtttcagcccaggtggcagacacgttctggggctgacaggggcagcagaggccgaggcccaaccctacagcctctcctccagaagtcttgctttgccatgagattgtaaccagggtgattgtggtggtgtgggaacacaagggagcactgtgaatgggtgggggtgtggggggtgcctgtgtgtgtgtgcatacgtgtgtgggcatggggtgtgcacatgcctctgtgtgcatgtatgtgtgtgcatgtgtgagtataagtgtgtgcatgtgtgtaagcatgtgagtgtgcatgtgtgtgtgtgagcatgtgtgtgcatgcatgtgtgcatgtatgtgtggatgtgtgtgtgcctgcatgtatgagtgtgtgcatgtgtgtacgagtgtgtgtgtatgagtgtgtatatgggtgtgtgcgtgtgtatatgtgtgtgtgcatgtgtgtatgagtgtgtgcatgctgctgtttgtgtttgcgtgtgtgtgcgtgtgtttgcatgtgtgtgagtataagtgtaagcatgtgtgtaagtgtgggtgtgtgcatgcgtgtatgagtgtgtgtgtgcgtgtatgagtgtgtgcatgtgtgtatgcgtgtgcatatgtaaggatgtgtgcgtgtgtgcgcgtcagtttgcatgtgtttgtgtgcctgtgtgtgcgtatgagtgtgcatgtgtgcatgtaagcatgtgtgtgcatgcatgtatgtgtgtgcatgtgtatgagtgtgcgcatgtgcgtgtgtgtgcatgtgagtatgaaagtgcgtgcatgtttgaaagcatgtgtgtgcgtgcatgtgaatgtgtgtgtgcatgtgtgtatgaatgtgtgcatgtaagcatgtgcatacgtgatgtgtgcatgtgtgtgcatgtatgagtgtgtgcatatgtgtgcatatgcatgtgtgtatgagtgtgtgtctgcatgcatgtgtgtgcatgcttgtgagtatgagtgcatgtgtgcgtgtgtgcatgtatgtgtgtgcacgcatgtgtgtgcatgtgtgcatgcatcagtgtgtgcatgcgtgtatgtgtgtgcatgcatgtatgagtgagtgtgcattgagtttgtacattgtgcgtgtgcatgtgtgtgtgcatgcgtgtatgagtgtgtgtgtgtgcccgcatgtcctccagctggagcaaatccagccttctccatgctaccagcagcttcctggtgatgcctcaggattccccgga

SEQ ID NO: 27480 - DNA, 1020 bp, Artificial sequence
  DNA replication origin
actacgtacccacaacaattaaaaaattaaaaaaattgaagtaattggctgggtgcagtggctcacgcctgtaatcccaacactttggaaggccgagtgggggacgattgcttgagctgagaagtatgagaccagcctgggcaacatagtgagaccaggtctctaccaaaaatataagtattagctgggcatggcggtgtggcccagagcttcacgagatgaggctcagggcacatgtggtagacatggggagcagacagatcccaggccttcccggcagagcagtgggaagaatacagtggcagaccccctcagcctgtccctgtggggcacggctctgcccaggggctgtccagaggctgtcagacccaggagagggtgggtcacagcgttgagatgacccagggacaggtacaggacgcatccgtgggcctgcatcctctatgagcgggggggggggggggggcgacgtcagtgagattcctgtccctcatcagggtggcccctttgtccctgtggcagggcctgagaacagctatcgtgtagcaggtgacatgggtgatgggcctggggacggccatcgtgtagcaggtgacgtgggtgagggtgctggggatggccgtcgtgtagcaggtggcgtggttgaaggcctggggatggccatcgtgtagcaggtgatgtgggtgaagggcctggggatggccgtcgggtggcaggtgacgtgggtaagggtgctggggacagccattgggtagcaggtgatgtgggtaaagggcctggggacggccatcatgtagcaggtgatgtgggtgagggtgctggggacagccatcaggtagcaggtgacatgggtgaagggcctggggacggccgtcgggtagcaggtgacgtgggtgagggtgctggggacagccatcaggtagcaggtgacatgggtgaagggcctggggatggccgtcgggtagcaggtgacgtgggtgaagggcctgcagacccactcctggccctggcccatgtctc

SEQ ID NO: 27481 - DNA, 1387 bp, Artificial sequence
  DNA replication origin
gcttcactcacggtgtgaagccggaagggaccagactcagaccccctcccgggccagcctctccgtgaagcccctttctccagcaggagagtgtagctgcccctctgggtgctcaggggccttctcagcctcacctgaccctcaccttgggggtggggggtgcaagagaaaggagaatgaagacttccccatctcaggttgaggatgcctggtgccccgtcacagcccagcagcctccctgacccagccctagtcccagaccttctgcgaggcgggcacagggcggccatatgggaagtctcagtgctaaatgctccaatgccccagggcaaacagtggcccagcaactagggatgtaaaccgtgcttgggtttcctcagaagcctcctgtgccacaccctggagatgccctgggcactgggcatggctgggcagggctgcaggtgggcactgggcagggctgggcagagctgggcaggttagatgggtgggtgggtggacggacagatggacagatggacgagtggatagattcgtgggtgggtggatggatgggtagatcaatagataggtggatggatggatggatggttggatggatggatggatggatggattgattaattagtggataggtgggtggatggatggatggatgaattgatggctggatgagtggatggatttagtacgggtagatgggtagacagatggtagatggttgaaatttggtaatgaggctgacctgttcttttagtggagggctgggctgggagctgggcccccaagagtagagtcatcactgagaatatttcccctgatcttaccaccccattcatcatttccctccaccaccaaagaatgtctggtctggagcagccatttctacagtgcaactgtccagagcagatgcacccacgtcaggaagcccccggtcactgcccgccagccgcacccacactcaggaacacactggccactttctggtttgccttgctaacagtttaacgagacgatactgcaaactggctccaggacttccatccctaacctcacccccattcaaagcaccttccatgcctcctcctcccagtgtgagggaggaaggtgataggtctgaaaaggtggaggggagtgaggaccatgtgcgatggaggagcagagaaggtgggtgctggaaggcgcagggagcggaggggccaggacgaggaaggaactggattcttggggagctgggaggagcctggggcttagaggtgcatttgctgcaggatccagggcacataggtctggactcacgtgtagacgccaatgctgggccgatcactgtaaaatccccagctcactactcccgcctggagccaggtacccttcttcttgcagacca

SEQ ID NO: 27482 - DNA, 961 bp, Artificial sequence
  DNA replication origin
tagatcctcaggctgacctgccacgaccacttcccctgggggtgttgtggccccccacaatgcccaccaggtcattctcggggacgggagctgggaacaacagaaggaggtcagggagcccggcctctgccacccgagcctcaccccacgcctgccctcgggcaggagccgggccgtgcacgtgtcccctggatcctggggacggggtggcagagcccctgggaagggagggctgtgtggggtcgggactcacctggactcccagtgctacagctccccagggaggagacagccaggaacagcagcagcagcagctgcggggagagggcgtggagtgcgggctgggggctcagacccggggtcaggggtggagggcgtggggtgcgggctgggggctcagacccggggtcaggggtggtgggcatggggtgcgggctgggggctcagacccggggtcaggggtggagggcgtggggtgggggctgggggctcagacccggggtcaggggtgggggccaggagccgcccgcaggcatcagggaggggacggtgcccttacggtgccgggactcagctgctctctcccccggccccttggagcccctttatcctcagccacaggaggagggcagcgggagggtggggccctgtggtggcctcaggtctcttcaccctctcctccactctctctcccacccaccctccaagtctccacccaccccgcagcctgggctggcaggacaggggtaagaggagagggtgagggcagagagcggccggggcggggttgggaccctccagcctgcctgttcctccacgaggacgtcacagcatcacagggctggtttggacggcagggcccttggaaaaatctcagatctggagctcaggaaggagcccgaggcagcggcaagcctctgcctcccaccatggggtccccaggacagtttccagcagttca

SEQ ID NO: 27483 - DNA, 1129 bp, Artificial sequence
  DNA replication origin
cacgtcctgctggtcaccctggacacctggcctggggcacagggaggtgcctctgagtgcccggagcctgagattcttgggggtgctggtggaagtagagggtcctggaatagtggagagggccctggggtggtggagagggtcctggaatagtggagagggccctggggtggtggagagggccctggaatagtggagagggccctggagtggtggagagggccctggaatagtggagagggccctggagtggtggagagggccctggaatagtggagagggccctggggtggtggagagggccctggggtggtggagagggccctggaatagtggagagggccctggggtggtggagagggccctggaatagtggagagggccctggggtggtggagagggccctggggtggtggagagggccctggggtggtggagagggccctggaatagtggagagggccctggggtggtggagagggccctggggtggtggagagggccctggagtggtggagagggccctggggtggtggagagggccctggaatagtggagagggccctggagtggtggagagggccctggaatagtggagagggccctggagtggtggagagggccctggagtggtggagagggtcctgcaatagtggagaggttcctgggggtggtggagagggccctgggatggggacagcacaatggggaggggtgggcagctcagggcccccatctgtaacctggctggtctctacctgactccaggctccacaccggccccttgtcccctgggaacctctgggacaaatagctttagtggaaagagtctgctgtctgtcctgagtcgggccgtggggtcctgtccccctatcttgggctgcattggcctcatgctgggtggggttggttgtggctccttggctctgcggtgatgcaacatggtggccgggtcctggggctggggtgcagttgagcgacgctctgattaatctctgtttgaacccagagctcagaagcgggtgctggggctgctgagccggcagagcaggggtgtccagaaaggcaggcggggggccacgtcagggccggagagccactccctcccccatcaccatctgtgcacggc

SEQ ID NO: 27484 - DNA, 1606 bp, Artificial sequence
  DNA replication origin
gaaaggagaggggagaggaaaggagagtggagagaggagaggggagaggaaaggagaggggagagaggagacggtagaggggagaggggagaggaaaggagaggggagaggaaaggagaggggagaggaaaggagaggagaaaggaaagtcaggctgggtgcggtggctcacccctgtaatcccagcactttgggaggccgagtcaggtagatcacttgaggtcaggagtttgagaccagcctgaccaacatggtgaaaccctcgtttctactaaaaatacaaaattagccaggtgtggtggcgtgcgctgtaatcccaactacttgggaggctgaggcaggagaatcacttgaacccagtaggcagaggttgcagcgagctgagatcgtgccactgcactccggcatgggtgacagagcgagactccatctgaaaaaaaaaaaaaaaaaaaagaggaaaggagagggaaaagaggcttgtagttctgcaggctgtacggcacggcatcagtatctgcttggcttctggggaggcctcgggagcttcccgtggtggcggaaggccaagggggagccagggtatcccacggtgaaggaggaagcaagagagaaggaccgagagggaccaagagccagaccgagtgggctgagcggcgcccacccaggtttcaggaggaaggagatttcgggtgggaaacaaactcaccgggtggggctgttcgtcacaggagcgtgtcctgctggtcacttacgattgctgggcccatgacagcagcagctggtcaggcacgggcagggcaggagagggctcccctcccacacaccgggagcatcagtcgtccttcgggcgatggtcaggcggttgttaactgcctgtgtaacataatacttgttgcagctggcaccagggaaaggcaggctcccaatagacagcaaacacctgaaaccggtgatcagcagcttcccggtaagatctcaggagctgggcgagggggctggagcaggcacactaagaggcaaaatggcagagtttaactggtctatggccttcaagggacctgcggctggtcatgaagagcgcctcaagtgagcacacgcacgactgcggcaaacgcaccacacacgctcccctcccgagcgccagcaggccatggcacacgcagacagcccactcacgggaggaatctcgggagaagggatgcgaggccctggaagcatgccaacctataagaacccaagtcaggctgggcgcgagggctcatgcctggaatcccagcactttgggaggccgaggtgggcggatcacgaggtcaggagtttgacaccagtctggccaacatggtgaaaccctgtctctgctataaatacaaaaaatagctgggtgtggtggcgcatgcctgaatcgtttgaatccggcaggtggaggtttcactgagctgagatcccgccattgcactccagcctgggtgacagaacaagactctgtctcaaaaaacaaacagccccaagtcaaaggtcaaactgcagacttctctttcgagttgcctgcttgggcgttttccaagtgtacttgccttcattttgttcctgctctaaagctgcttat

SEQ ID NO: 27485 - DNA, 949 bp, Artificial sequence
  DNA replication origin
atcccagcactttgggaggccgaggcaggagggtcccttgggcccaggaatttgagaccagccggggcaacacagggagaccctgtctctaaatgtattatttatttatttttgagacggagtctctctctgtcacccaggctggagtgcagtggtgtgatctcagctcactgcaacctccacccccccggttcaagcagttctcctgcctcagcctcctgagtagctgggattacaggcgcctgccaccacacctggctaatttttgtatttttagtagagatgggttttcaccatattggtcaggctagtcttgaactcctgacctcaagtgatccgcccacctcggcgtcccaaagtgctgggattacaggttgtgagtcactgtgcccggccaagggctgcgatttagaggaggccggaaagagccaccgggcgggtgaggtgggagggcggggcatgtgggtggggcactgctcagggaaaggcatggaggcaggaagcagcccaggtgtgcaggagccaggcttgggcagagggacgacgtggagggaatacggcatgggcaggccactcctgccctatccaagggctcctggtcttagcagcatctatcagaggcagaacaggctgcagtcggggagagagaggagggtacctgacccgcccacatgtaccaggacaagaatgctgcacgcagggccaggtgggaggaggaaaggtcacgccccatgcaccccggtctgtgggcttttccgtctgtttcagagggttgggggccaaaaagtcctggctcctggctggactctccctgcatgggtttccaggggctgccacgactccaccgggcgctctctttattctctgcagtgctcacgacggtcattccaactgtgctggccacgaccaggactggagacccatccctcaccccaatctggtcccggcc

SEQ ID NO: 27486 - DNA, 1085 bp, Artificial sequence
  DNA replication origin
gtcctggcccccagccttgaggtcctgggaatctgctttttttttttccttttttttgtgagatggagtctcactgtgttgcccaggctagagtgcagtggcgccatcttggcttactgcaacctccacctcctgagttcaagcgatcctcctgcctcagcctcccgagtagctgggattacaggcgtgcaccaccacacccggctaatttttgtatttttaatagagacggggtttcaccatgttggctaggctggtctcaaactcctgacttcaagtgatccgcccacctcggcctcccaaagtgctgggattacaggtgtggaccaccacgcccagctgaaatctgcattcttaaccagccccctgggcaagcctggcagagggatatggccctttggcttcctgacatgggctaaggttccaacgccatctttctggcgaagatgccagcacagggctgtgtggggaggcgtcagccagtaaaagccgtggctgaagaaaagcaagacagccacgggcctcggtggatcccgctgcagcctcaggcacagagagggcagggctggtgaggtggggggcttgtcatgagtggggcttggggagactgactggatgtggtgtgtggctggggagggcctgggcctgaacctgtgggccatgggagccatagaaggttgtggaacaggagaagtaagacaaggccctggttccctgtgtgtgtgtggtgagggactgaggagacatggctcaggcatctagagaattcctgtcctggtgggaagtagtgccaggaggggctggggtttggggaggctgtggcaggtgagggtgagggacatggagcaggtaggggtgagggtcatggagcaggtgggggtgaggggcatggagcaggtgggggagggaagaggctccctcagttgtgcatcctcagcccacaagtgtcctttgagcagcctgcacctggcacacgttttcaaggagaggggacttgttgggtccagctccctgggtacaaaggagaaactgaggcttggagagggtggggggtttgaatcagtaactataagatcctgggcaag

SEQ ID NO: 27487 - DNA, 1258 bp, Artificial sequence
  DNA replication origin
gaaggagggaatgagtgagtgagggagggaattaatgcatgagtgagggagggaatgaatgaatgagggaggaagggaatgagtgagggagggaatgaatgagtgagggagggaatgagtgagggagggaatgaatgagggagggaatgaatgaatgagggagagagggagggaatgagggagggaggcaatgagtgagggatggaataaatgagtaagggagggaatgagtgagggagggagggaatgaatgaatgagggagggagtgaatgaatgagtgagggaggaagtgaatgagggaggaagggaatgagtgagggatggaatgaataagggagagaatcagtgagggagggagggaatgaatgagtgagggagggaatgagtgagggaggcagggaatgaatgagggagggtgggaatgaatgagggagggaatgaatgaatgagggagggaatgaatgaatgagggagggagggaatgagggagggagggaatgaatgaatgagggagggaatgaacgaatgagggagggaatgaatgagggaggaatgagtaagtgagggagggaatgagtttgtgagagtgggaatgagtgagggagggagggaatgaatgaatgagagaggaaatgagtgagggagggaatgagtgagggaaggaatgaatgagtgatggagggaatgaatgaatcagtgagggagggaatcagtgagggagggaatgagtgagtgagggagggagggaatgaatgagagagggaatgagtgagggagggaaggaatgaatgagggtgggaatgaatgaatgagggcgggaatgaatgaatgagggcgggaatgagtgagagtgagaatgagtgagtgagggagggaatgaatgagtgagggagggaatgagtgagggagggaatgagtgagtgagggagggaatgagtgagggagggaatgagtgagtgagggagggaatgagtgagtgggaatgaatgagtaagtgagggagggaatgagtgagtgagggtggcaatgaatgagtaagtgagggagggaatgcgtgagagagggaaggaatgattgagtgatggagggatcgaatgaatgagggagggagggaattagtgagggagggagggaattagtgagtgagggagggaatgacggagtaggggagggaatgaatgaatgagtgagggagggaatgaatgaatgtggtcactccccgcggtccccaagcacccggacaccgtgaccttggct

SEQ ID NO: 27488 - DNA, 865 bp, Artificial sequence
  DNA replication origin
gggaatgagtgagtgagggtggcaatgaatgagtaagtgagggagggaatgcgtgagagagggaaggaatgattgagtgatggagggatcgaatgaatgagggagggagggaattagtgagggagggagggaattagtgagtgagggagggaatgacggagtaggggagggaatgaatgaatgagtgagggagggaatgaatgaatgtggtcactccccgcggtccccaagcacccggacaccgtgaccttggctgcggccccgccgtcggcgaaatgcgggcgggggggccgggagagcccgggggccagcacggtcgcgcgttggcgaacggactgtcccgcgcgctcgcgggtctgggggcctcccgacccggtcctgcttgttgcgtgggcgggaggggggaccggaagcgcccctcccccacgggctcgccccgcccccgccgctcgcggtcccccacgtcccgcccgcgccccggcccagggccagcccccggtttagggagcatccacacttctcctcccgtcggtcatgctcgcattcggccttttgtacggggtcagctcattgggcggatgagaaggtgtccccgcctaccgccccgaactggccaattgcaaggggtttcacagggcgctgaactcgcgggagcgtcaccgtcctgcgacgcttcagaggatccttaggcctcagtggtctttgacccccggccccaggacctgaccccaaggaaacctccgggacctgtggctggagaggtgaccgccaggcatccggggagcctttggagatctcggcttcctttttcccccgctgcttgccggcgtgtcctcgggtggacgcgggcagcccgaaggggagt

SEQ ID NO: 27489 - DNA, 1460 bp, Artificial sequence
  DNA replication origin
cggagggaagtcccgagacaaagggaagcgccgccgccgccgccccgctcggtcctccacctgtccgctacgctcgccggggctgcggccgcccgaggtgagcgcgtgcgggggccgggccggggccgcggggcgggggtcgggccgaggcctctactcctgttgggcccgggcccccgactgccccgcgccccgccccgccgagccgggccccgcgccgcggccgagctttccggggagcccgagaggccccgcgctcggcgccggctcggtccgcgctgctggcgccgctgggctgcggcccgagcggccgggccgccgcaggccttcggggccggggctcccccacttcgcccccgaggtgcgcctggcgcggggccggggcagccacctgcagccggggccccgcgaggccgcgccttcctcctgcgcggggagcggcttccggggtcacggtcgccccgcggacggataggatgggccgcggggggagagtcttggattgcaacatcgctggctcgcgggggtgggggccggcgagcgggcttgttttcggtgccttaaaaccaaaacaagtgtaagttttcttgtgcctctgaagatgctccgctggcgcttgctggggccctgaacgtgagcgcctcgctggagggggagttttattctgttttggacatctctttttatcggttgaatagtagttggttctggtagttaacgtgcgtaggaggaatgtaagggaatgattagttgggcttgtgatcgtggcctgtagtcacgcttgaatcgcagaatgaagtggttttgtttgtataattggaagttacgcttagtttctctgtttgcaaagtgcctgtctttggggagttcggtttgtttccttttacaggacctaccccaagtgtttcttgctcttcaagaaacgttgcctttgggtagagaacctatgcaacggaagacgggacggatcctcagtttgccctgattgctcattcagagaggtccgttccctaggccactgggtgattgctggtgtgcgcttgtatggtgtctcagggtttgggatcttgcttcagaaacattctcggggcctggggcagatcaggtgcggccaggtaagcgtctcccgactgcaggtgcttgggtcttgcagaagggaatacctccccaagcctgggagagtttgcatttgggtgcaggagggcctttaaaggcttcttgtgccagcctgtcgtggcgaccacccgttgtggagatcagtgcggtggagttgtgggaggtgagtgctttgctcaccctcagccaggaagttgctctgaagtcggtgctgtcaaccagcagagcaaggcggtgatccgagaagctaaagctcagccggttgcgggcgcccagcaggaggacagaaggcagactttcgggccgctcctggagtgcccggccctgtccccgtttctgcagtg

SEQ ID NO: 27490 - DNA, 1603 bp, Artificial sequence
  DNA replication origin
ggtgtttttacctgcccccccatctccgccccccgccaccggcccggccctaaggaggaaaagctactctccctgcctgccagaccctttccagcacaaagtcctgagaatgtgaaaagagccaggcttgaaaaatggcttttctcagctttgcacaagcagccctggtgccccagcagcctcctcaagctctgaccccgtctgggcagggggtctcgtgtcccgacacatcggtgggaggtgttcctgcacctgcgccatcccctcactgtccccggagcacggcagctgtctgcactccggtccgaaggcagagacgccagggtagccccttcagagtgaggcctggggctcagggtggggagggtgggcggcccactctcctgccctctctcttagtgggaggggactcacgcgaggatgggcttccagccccaagctatggaaaggtaaattgggtcactggaggggccggagttctggctgggtggctgcagttcccatccccaccaactgggactgaggctgacctgctgtgagttgagactggctcactgaggtcccccagctgcacccaaggtgggtgctgctgttgtccccattttacagaagagggaaactgaggcccgggcagtggagggtcgccctggggcaggggtgagcagggtgctgggactttgatccaggtcagcctgtcttcagcctcagaacaagttggagaatgaaggccttggtcactgagtggggtgtcgctcggatcgttcattcctcgactcctcaccaaatgtttgtggaggggacagtcctagtgaccgtcctctcctggggaaacggaggcccagggctggtttgggactcaacctatcactatgtggccctggaaaagccctttcccgtctccggactccagtctccctacctagaaaagagtggggagaggtctccaagggtgctcccgcacccaacggactgcagtgttggtttcagggttggtgctctcgtaggggccggagcagcggctgcccctcccaacttcctgtttaccgtagctgcagagcctgtcccttcacttaaagccagtgtgatcaccatggcaaccggcctgtgtttgttccaacaggtgggcagaacctggtgcaagaccgcagaggcaggggcgtcactcccagacccggtctccagacccaccagcccctcaggagaacactgctacagagtggggctgagggcccaggccccctcccctgcttcccccaccgcgtccctgtcccagccagtccctgcatttcctgcaagctccctgccctcccccaccggcctggctgtgctgggtcaggatccggcagagcctgggccgagcgtcccgaaggagagcccacccaggggtcctgcccccgatcctgcacagacaggtgtggggcgggcatggatttgagtgagttgggatccagaagccaagacagttgttggcagacgggccccctccctttgaagagctgtgttctggaagcctgtctggccttgggctgcccaggtgcccttcgggtgaaaactccaaagtctgaccaccccccaccccttgtccccaaagggctgcgagtgt

SEQ ID NO: 27491 - DNA, 1271 bp, Artificial sequence
  DNA replication origin
acagagtggggctgagggcccaggccccctcccctgcttcccccaccgcgtccctgtcccagccagtccctgcatttcctgcaagctccctgccctcccccaccggcctggctgtgctgggtcaggatccggcagagcctgggccgagcgtcccgaaggagagcccacccaggggtcctgcccccgatcctgcacagacaggtgtggggcgggcatggatttgagtgagttgggatccagaagccaagacagttgttggcagacgggccccctccctttgaagagctgtgttctggaagcctgtctggccttgggctgcccaggtgcccttcgggtgaaaactccaaagtctgaccaccccccaccccttgtccccaaagggctgcgagtgtccagctgtattcgaccaagggcaggtgcgaccggggggccgctgcgccctcggcaagtctgagagcctcaggcccccgacaggaccatgcttagcacggacttctcaaagtgtggtccctggactggcggcagcagactggagctgggaagtgcaggcgctggctggcgtggggaccacacctgtgatctcagcgccttaggaggccggggaagggggatcccttgagcctgggagtttgagaccagcctgggcaacatagggagacccccatctccacaaaagaaaccaaaaaacattagccggcgggtggtcccagctactggggaggctgaagcgggaggaccacttgagccggagagttcgaggttgcagcgagtggagatggtgccactgcgctccaacctggttgagagctatttttgagagctttttcgagactctgtctgaaaaaaaaagggaaaaaacgcagatcgcgcccccacccagacttcgggaccagcgggttggggacaggacccatcaatgccttaacaaaccctgcaggagaccgcgggcccgctggggttccaggacagcgcagcggaggaagagcggggagccacccgggaggggctggcggggtccagtgcagaccccaggggctccgggggctctggccggctgtgaccccacaagcgccaactgggccctcaccagagccccagggacgatcgccccacagaccgtccgcgtgggcgtggggcgtcccgagtggatccctgcaggacgcatccccgccccgagaagagagcggcggggcccgcgaggtgtccctgagtcaggcccttccagaaaggtctgcaccgctgctggtcttcgtgaccgtggcttccctggg

SEQ ID NO: 27492 - DNA, 2161 bp, Artificial sequence
  DNA replication origin
ccgaacgcgcaggagagggtgcggcggtggggtccgcactgcggagcggacggggagggtatccgggcgctggcgacggcctcccccgcacttgagccgccaagcgaggcttcgacccccgcgcctccctccccgggggagcagacgggcccggggcctcccagcacccctcccgggcgggctgcaccccccagcgtcctcgtcccttccctcctcccgcaggtcctcgtaaggccctttagtccccccgaaatccctgcgagtgcaaagcggcccctccttcagccccactcggcaaagggctgtgggctcttgcctgggccggggtctccgggggaggagtttaaagtgacacactagacccgcccccagactcaccccggaccgcccgccccctccgaggggagagacccccatagaactgggggtgtggctcctgcgggcgcccggggccccgggaaagggggtgccgcgaggcggggcagggagggggtcggtgagcagagggaggagggagcgctgcgcagacacgggcgaggggaggaagaaggcgcctcgggctccggtctcctgcgctcctgctgggcgccagcggctggaccttggcagccgtctgaggcttcggggagcccaaggccaccggcagcgcttgttagaatgcagattcccggggttcgactggaatgagaccccggggagcagcgtttgcagcgggcccgccaggtgacctgcacctgggcaccgccatcggcttcgcaggggccatctggaggagtcggtgagaccagggagagattcctgcgggaaacccccagggcctggtgaaggggagtcggggggctgagggaggaagagcagggaagctggagagaagaccaagagggcagcgtggagagccagcctgtggggcagatgtcctgccacctcccgccccaggcacacacccagggcaccatcagctaaccccctgccccaaatgtggtaagaagggcgcccccaacacgttgaaggcgtttgttcctagacagcctgcactggggaggaaggctgacccagcctctgctccgctgcccccagactcagctgcctcactgcccccaaccctgagcccccaaatggcctggcaggagacagcttggcttaagagtcccaggttcacatctgggctctgggcaagtcgcccccaccctgggctgtgaaatgagatgtgccatcctccttgcaaaatgtcattccccattcagcccaggcctgggggacagccagggagcaaggtgggatgggcaggtgtggctcagccccagtgccacaaggcaggagctccttggcggtcctccctctgctcactggacagatgggagtgtggttctggtcctggcatcaggcatgagcagagtatgggggggttcatcctgcctcatgctactgtcccagggtgagagactgggaaggagttacatcacgtctgggcccacgggaaagacggggggtcccctgcacctggctcactcctgccccgtaagtgctgagagccacccaggcagccagtgcttcctgtactggtcacagacagatgcatatgcccaccattcacagcagctccggcctctgtggcaggtggctcccagggcccacgcagttggctgcagccaggctatcagctgcccaggaagcctggggtttccaggggaaccaaaggggtttctgcgcacccaggatgagccaagtcttctgtacacctgtgccaagacgccattattgcacccatcctagcaacgggcagtgggaggggcaggagctgcagttggggtcaggggggctggcctagctggttgccccaggagcttagcactggggacaccaaagagaccttgactgccgtccccagcccacttgctggctctgggaccttgggcgggctcccagccctgcgcctccgtttgcccatctgagatgcagggagcaaagggcacccctctcgggccgctctggggatgaggaggtgaatgtggagaggaaaatgcagggagggtaccgagccccctttttctgcctggaacatcttgttatcacaaagacaccccctccccaaccccgcagttcaggccacttggctcctgcgtcacatttgtctccaggactgcgagcccccatcgcccct

SEQ ID NO: 27493 - DNA, 1535 bp, Artificial sequence
  DNA replication origin
ggagctgcagttggggtcaggggggctggcctagctggttgccccaggagcttagcactggggacaccaaagagaccttgactgccgtccccagcccacttgctggctctgggaccttgggcgggctcccagccctgcgcctccgtttgcccatctgagatgcagggagcaaagggcacccctctcgggccgctctggggatgaggaggtgaatgtggagaggaaaatgcagggagggtaccgagccccctttttctgcctggaacatcttgttatcacaaagacaccccctccccaaccccgcagttcaggccacttggctcctgcgtcacatttgtctccaggactgcgagcccccatcgcccctgtcacacgcacatgccgcggcggttgccctggcaacagctccagcagcggctgctccactggcttcgggggacagcagggggagcagcctcttccacccagcaagggaggggaagggggcttgtgactcccaggcccctgaggatttcacgactggctgtgggggtgacagcttccagaagcactgtacccagcctaccaagcccccccatcttttgggggggaggctcacaggggaaggcactgataggtttgaaggaggtgagtcccccccgcaagcattgcctctcacagggtgggagacgcaaaccctccttcctgtcctcagctctagggtctggtcccgtaagagcctgcacccagggctcgggggctggcagggaccctggaatcaagacgagatatccgggaatggtgtctgagctggtgtgggtatagcttggggctggtgaccctgaacccccacagacacagcaggggcccgggagctggctcgacaaagtccgtttggaacccaccactggcatggtgtgctcaggcccccacgctgcccactgagcttatgagtctagtgccactgtggggagctggcctggcatgcagggccaactgtccgtgagagcctgagtgggcggtagaacctgctggtcttcgtttcctctcctgtcccgtgagaatgactatgccctttgcgagggccagtgtgcccagcccggaggcaccctccgcaggtggatgagggagcactggcaagggaagggacccagacagcaaggccaggaccccggggggctgggggagcgcggtgtcctagaaatcagaggccggcaaggctgggacaggaacccaagagtgggtacctctcttgtggtggggcagaggtggcctggctctgggacagtttccatggagcggggaggagacctccctggggctgctggggggcagaggcagtgcagaggtggagggtctgcacctgcacccatgcagaggaagagggtctcaggaggctacggtgtcttagccatcatcctacccctgttgaagggggtgtgcagggcaggaccacccggccttcctccctgacacaggtgggctgggcggtgctggctcatgcctgtaatcccagcactttgggaggccgaggctggtggatcacctgaggtcag

SEQ ID NO: 27494 - DNA, 1538 bp, Artificial sequence
  DNA replication origin
gggggcagctcagcctcaccaggccccccacgcccctctgtccacaggcccccacgtatgccctgaaagtctctgtcatgcgtgccaagaaccttctggccaaggaccccaacggtgagtggggacccagcagacctcggctgcgccgaggcctggcggccatggagggccagagggcgtggggccagggctgagacgcctgccgtgcccaggcttcagcgacccatactgcatgctgggcatcctgcctgcctcggacgccacgcgggagccccgtgcacagaaggagcagcgcttcggcttccgcaagggcagcaagcgcggtggacccctgcctgccaagtgcatccaggtcaccgaggtgaagagcagcaccctgaaccccgtctggaaggagcacttcctcttgtgaggccctcgcccgtctgggtgcgggaggggggctctgcctggggtccagagctgggctgtgcctggagggtggtggctcgcagcagctcccggtctctttggggccgtgtgcccactttccagaggagaaaactgaggcccagagatgggcgttgtgccaccggggccacacggctggcaacacctggcgggatcaggatttggacctgaacagcctgtctggagagcgggtgcttgtggcctggtccctgctgcttctggactccctgaccccggcctgggcagagcctcgccggggaccctcatgggcatctctgttctccttgtagcgagattgaggatgtgagcacggaccagctgcacctggacatctggtacaggcccctgcgccatgcagggcggcggggatgcacaccttttgcgggggagcaggacggactcagggcccggctgcgggctccagacaagccaggtcctcccctgtccccaccagggatcatgacgacgatgtatccctggtagaagcgtgcaggaagctgaatgaagtcatcggcctgaagggcatgggcaggtatgactgctgggacctttctacccatcacccgtgccctcagcttggtcatggggcccggcgggcagtggctccccaggagccatcagcgtgatgctcaccacctgtggtggccaggtacttcaaacagatcgtcaagtcagcccgcgcaaacgggacagcaggacccaccgaggaccacaccgatgacttcctggggtgcctcaacatacctgtccgggtgagtgggtgtggggtggggctggtgacacttagagaagggcctggggagtgtcccagccttcaaggggcagggcactgcctggagaagctcctgcttttgggcctccactgagtgcgcttgtcaccctcattccccggagaagggaagcccaggccatgtggtctctccagggtctcacagagtcagtgtggaaggggagggggaggagtctggtgggcctgacccccatgctacccccaggaggtgcctgtggctggcgtcgaccgctggttcaagctggagccacgctccagtgcctcgcgtgtgcagggacactgccacctggttctcaag

SEQ ID NO: 27495 - DNA, 1345 bp, Artificial sequence
  DNA replication origin
acacttagagaagggcctggggagtgtcccagccttcaaggggcagggcactgcctggagaagctcctgcttttgggcctccactgagtgcgcttgtcaccctcattccccggagaagggaagcccaggccatgtggtctctccagggtctcacagagtcagtgtggaaggggagggggaggagtctggtgggcctgacccccatgctacccccaggaggtgcctgtggctggcgtcgaccgctggttcaagctggagccacgctccagtgcctcgcgtgtgcagggacactgccacctggttctcaagctgatcactacgcaggtggggaaagtgggcgtccccgtcctccacccccgtccttggggcgggggcagagctggtgactgggtgggctctgcgttgcagagggatacggccatgagccagcgcgggcgatccggcttcctgtcccacctgctgctgctcagccatctgctgcggttggagcactcagcagaggaggtagtgggtgcgcctaggattggaacagcccggcagggggcctgaggaggggatgtggggctgtcccgcctccacccacgacagacctcctcccccagcccaactccagcagctggcgaggagagctcagcacaccagccgccaccatcctctgcctgcacggagcccagagcaacctgtcacccttgcagctggccgtgctgtgagtgggtggagctacgagtgggcggggaatgtgggcgggcgtgagcgagtggggcatcgggggccatgcggtgagtggatgtcgtggctgggagggtggggcagggaaaggggcggtgctgagtaggtggggctgcgctgattgggcgggaagggaagggggcggtgctacgggtaggtgaggcagcgaaaggggcggtgccatgagtaggtacggcagcgctaattggagggcagggaaaggggcagtgctatgagtaggcgcggcagtgctgattgggtggggcagagaaaggggtagtgctgtaggcggtgctgagtgggcatggcaggggcggggttcataccctttgaccatgggccgggccccacaggcactggcaggtcagcagccgccaccatcaaacctgcacgctggactacagctacctgctggggctgctggaggacatgcaggcacactgggaagaggctccttcactgccccaggagcaggtgggtgcagccgggaccttcttgccagccatggcgaagggagtgctggggactggggtcgctcagtgccggtcggcgaggggcagagtcctgcccgcgtgggggtcaaagacaaatggacaaactgtatgacgtgggcgag

SEQ ID NO: 27496 - DNA, 1847 bp, Artificial sequence
  DNA replication origin
cgacaggagggagcggccctggcaggacggacgtgggaactgcaggggcacaggccctacgtgagctgcgtgggtggaaaccgaggctgggacaggccgtctgggacaggccgactgggcctgtggagggtgctgctcagagcagagctgggctgaccatgcccggggaagggtgttgcgggccaaggcagggaggatgtttctcctcatcagtggccggtcggggctgctggcactgaagggccctgtccccacaggaggagagcctggctgatagcctttccgccttctctgagttcgggctgcagctgctgcgccagctccgagactacttccctgccaccaacagcaccgctgtccaccgcctggagctgctgctgaagtgggtgcagcgccgcgtgtcagcgtgggtgggggcggctggcagggcaggccccacgtcagcgtgctgcccccacccaggtgtctgggcaagctgcagctcttccaaccctcctttgagatctgccccttcgagtcggagctgaacatggacattgctgcggccctgaaggtgtgttccaaagcccagtggaggccggctgctaagccctcccttccccttccctgccttcccgtcccctgcacctctgcaccacggtctcttgcccacctcttcctcttccctgcaatccaccatgctgtcttggtggtgtctgttgcagagaggcaaccgtgagtggtacgacaggatcctgaatgacaagagtccccgagagcaggtgcagttgtgggggaccctggccatgaggggtacgggcagccgagaggtgggtacgagctaggcttccttgcagccaggaccacagcgcctgcctgggctggttgtgctggctgacgccgtctatgatgaccttcagttctgctacagtgtgtacgccagcctcttccacaggtgggcctggcccctcagtgctgtcctggggctggggtcggagccaacagggcctgcaggtggggcgcaggtggatgaggtgtgtcccttgctctgcagcatcctcaatgtggacgtcttcaccctgaccttccggcagctggagcgtctggtgaggagggtccctgaccccgggtgcctgccaggcatggggaagtgggcagatgcccttggctaggacggtcctgggattccttgctgctggaggcctgatcctgctgtcccggacaggtggctgaggaggcgtgggtgctgacggaggagctgagccccaagatgaccctggaggtggcctcggggctctttgagctctacctgaccctggctgacctccagcgcttctgggatagcatccctggccggtgggtgccccgtccctatctcttgcagacagactttgggaccagggccccaggacctgtgagggggacggtcctggagctgtgagcctggaacgtgctggttaaggtgtctgagtcagggccgagccctcacaaccctcccaccacagggacagccgctctctggccctggctggcatccacgcccccttcctgcctgctgtgaagctctggttccaagtgctgagggaccaggccaagtggaggcttcagggagccgtggacatggacacggtgacagctgccctggcctgaggacactggggctggtccaggcccccagcctcccccgcctccccagcaaccccagcctccccagcaacccccagcctcctccgcctccccagcctccccctcaaccccagcctccccggcctcctccgcaaccccagcctccccagcaaccccagcctccccagcaaccccagcctcctcagcaaccccagcctcccccgcaaccccagcctcctcag

SEQ ID NO: 27497 - DNA, 1406 bp, Artificial sequence
  DNA replication origin
ggacgatgatctgcaacgggaggcccacacggtgacagcgcacctgacctctaaggtgggtggggcctggagaccaaggcgtggaggcagtccctggtgccccctgcccgtgctgagcactgctcctgccctcagatggtgggcgacatccgcaagtatgtacagcacatcagtctctcgcctgactccatccagaacgatgaggtgagtgccggggcgaggggccgtggaggactgtgtgtactgggggtagggcagaggtgcggggtaagcctggcctgaccacccctgcccgcaggccgtggccccgctcatgaagtacctggatgagaagctggccctgctgaacgcctcgctggtgaaggggaacctgagcaggtgcgggcgggtggggtgggatgggctgggctggcccgtggtcactgaggccgccctgcagggtgccggaggccctgtgggagctactcctccaggccattctgcaggtggggccagcggggcaggtggggctggcccgtggtcactgatgctgccctgcagggtgctggaggccctgtgggagctactcctccaggccattctgcaggcgctgggtgcaaaccgtgacgtctctgctgatttctacagccgcttccatttcacgctggaggtagagctctgtgaaggagtcctccccgccggcccccgcctcagggctgctctgatccctccctttgtccccactggcctgcctggtctcctgtggctggagagcagccactccagggctgtccacagcgcctcctcccgttaatgccgaggtgtggcctctggtgatggcctttccccacgcttcctgggagcttccgatgcccgccagggtgtgagaaagggctctgcccttggctgctgagcccccagtgctgcctgggcccctttgtgctgggggtctctacctgtccccagcacaagccaggctccctgacacctctgccttctttccctgccccaggccctggtcagttttttccacgcagagggtcagggtttgcccctggagagcctgagggatggaagctacaaggtgaggtgggaccctctgtggggcgggggtgtggatgaggggactgagttcaaactgcagccccacacgggctgtgtccttgagcatgaggtggccccacgggcagtcaggtctccaagtgccagcgctgaccaccagcacccaggggcccctcctgatgcgcttccccctgcagaggctgaaggaggagctgcggctgcacaaatgttccacccgcgagtgcatcgagcagttctacctggacaagctcaaacaggtagggaggcgccagggacagggtgctgcctccgaggctcccagagcccagctgcgctcacccgcctttccgcagaggaccctggag

SEQ ID NO: 27498 - DNA, 788 bp, Artificial sequence
  DNA replication origin
caggccctggtcagttttttccacgcagagggtcagggtttgcccctggagagcctgagggatggaagctacaaggtgaggtgggaccctctgtggggcgggggtgtggatgaggggactgagttcaaactgcagccccacacgggctgtgtccttgagcatgaggtggccccacgggcagtcaggtctccaagtgccagcgctgaccaccagcacccaggggcccctcctgatgcgcttccccctgcagaggctgaaggaggagctgcggctgcacaaatgttccacccgcgagtgcatcgagcagttctacctggacaagctcaaacaggtagggaggcgccagggacagggtgctgcctccgaggctcccagagcccagctgcgctcacccgcctttccgcagaggaccctggagcagaaccggtttggacgcctgagcgtccgttgccattacgaggcggctgagcagcggctggccgtggaggtgctgcacgccgcggacctgctccccctggacgccaacggtgagttgcagcggggacgggtcgggtggtggtgggatgggggcaggggggctcacgactgtgctcctgcaggcttaagtgacccctttgtgatcgtggagctgggcccaccgcatctctttccactggtccgcagccagaggacccaggtgaagacccggacgctgcaccctgtatacgacgaactcttctacttgtgagtgtcctaagccccagccccagccccaggctccaggctgccggagcgagactcccgactgg

SEQ ID NO: 27499 - DNA, 1697 bp, Artificial sequence
  DNA replication origin
tactgaattgctgatctaaagaggccctgatgaggcgtggggcagtcttggtgggaatgtttgtttcgcagcaaaggagggggacttggtcggttgcagaggtgtggactgtagcaagggaggtgcaggctgggggcagcacgggttctcaggactgtgagctgatgtttgctggggaccctgcggttacttgggagagcgccgccatccggcagcagggtgatcaggaggcacttgaggggaccgtcgacttctttgggtttcctgtttctcacaccgtcaggctttccagaccttgctgtcattttgctgcggaagtttaaatggggcaagggcttcttggacctgaaccgccagctcctggacaagtacgcggcctgcggcagcccggaggaggtgctgcaggcggagcaggagttcttggccaatgccaaggagagcccccaggaggaggagatcggtgagccttggcggggtgggaaccaaggccctccaaagcctggggggtgggaggcctggtcctgctctgagctcacttagaggccactttcctctctcggctcagatcccttcgatgtggattcagggagagagtttggaaaccccaacaggcctgtggccagcacccggtaggtccttgggcttaatttcatgatcactcagacccagggctctcttctacctctggcctgagcccttcctgctgcctgggggtggtgttgtaaacaacaccccgatggtcttctgactagaaaacctgcagtgcatgtcccactggagaggtttgggtgtggagagcacagggaggaagaggaatctgtcctcggctgggggctttttgtggatgacgttgactccagctagccagggaggacgtcatttgggaacgtgctccccctcctctcccaggctgccctcggacactgatgacagtgatgcgtctgaggacccagggcctggcgccgagcgcggaggagccagcagcagctgctgtgaagaggagcagacgcagggacggggggctgaggccagggccccggctgaggtttggaaaggaatcaagaaacggcagagagactgagggttgcagacacatatatttttgaggctgggtgacgagaaaatctagagacatgagggacataaatgggcctggcagcctcggctctttgcggctgctggcaggactgagctgtccgggttctccccacacttccagcacagctgtgctctgtgtcctgcctcggcgctctcgcaaatgaagctgcaggccaagaagccccttgtgagtctgtttttcacactgggcctggggaagggttggggcgaactctcggctctgcctggaagggtcgtggagcaggtctcaggtggccacggatatgtgcgtgaaggacagctgaccagttggcacggagcccttcacactgaccaccagccttgggtgacgtccctggcctcagagtgacctcaggggaacctttccccggcctgggagccccgtggggactggagacctatgcggttcttgactcacctgccctttgcatcccctctgtgggtggaggctctggaccatccacccagtggtgccagtggcacccttttcactccccagctgtgattaccaaaaatgcgtctgcacattgcccgttgtgcagagagcacagccactcactgagtccctggagaccagc

SEQ ID NO: 27500 - DNA, 1766 bp, Artificial sequence
  DNA replication origin
acggggaccggaagtggcgtccggcgcaagcgctggcagccgcacagcccattgggaggccgaggggcgcggccgtggggtggggagtccccggcaccccaggtccgcgccatgggccgcaggagggcagcgcgcgggccgggggcggaaggcggccgccctcggcacctcccgacgcgctccctggaggccttcgccgaggaggtcggcgccgcgctgcagggtgagcgaggcgtgatggggagagcgggtcagggtttgagggcctgcccgggggtcccacgctgaggccgagtgcccttctctctctcgtgcagcttccgtggagccaggggcggctgacggcgagggcggcccgggcccggcggcgctgccctgcacgctggccatgtgggagttgggccactgcgacccccggcgctgcacgggccgcaagctggcccgcctggggctggtgcgctgcctgcgcctgggccacagattcggcggtctggtgctgagccccgtgggcaagcagtacgcgtcccccgcagacaggtaggcgcgggaggcctgcccgaggtcgtcttcatttccagcgcgtggttcccttcagggatggtttagtggcacttgtatgtcgcacccacatccacacccacgtgggcagggaacgtctgtctagtttgcctccgttgcgtagcgcagagcctgggataaaggaggttttggggtaataaacgtttgttgagtgaataaacacatgctccaggtgccccaagcagctgcctcaaaagcttgctcgtgaagtccgtttgagggtgtttggggatggcggaatgatgtccctgaatcccttagctaggccattctccggggcatgctccaccttgggtagtgctggctcctgaacttatcccatgctgtccctggcagacagctggtggcgcagtctggggtcgccgtcatcgactgctcctgggccaggctggacgagacaccgtttgggaagatgcgagggagccacttgcgcctgttgccctacctggtggccgccaaccccgtgaactatggccggccctacagactttcctgcgtggaagcgtttgctgccaccttctgcatcgtaggtgagtccaggggccccacagcagtgtgacccggcggcctgctgttcctgctatgctcccagcatcatgtttcctgccgacagaccccaggaggagcataagggacggacaggggaacagttcagacagaccacggttccagccccaactgtcacttcaggttttcggcctgtggagttgcagtagaggcagaatgggatcgctgttctatcagggccggtgtgtggggtgccattcattatcagggcaccactgcccagagaatcctccttatcctccacgtcctccttactgaattgctgatctaaagaggccctgatgaggcgtggggcagtcttggtgggaatgtttgtttcgcagcaaaggagggggacttggtcggttgcagaggtgtggactgtagcaagggaggtgcaggctgggggcagcacgggttctcaggactgtgagctgatgtttgctggggaccctgcggttacttgggagagcgccgccatccggcagcagggtgatcaggaggcacttgaggggaccgtcgacttctttgggtttcctgtttctcacaccgtcaggctttccagaccttgctgtcattttgctgcggaagtttaaatggggcaagggcttcttggacctgaaccgccagctcctggacaa

SEQ ID NO: 27501 - DNA, 1064 bp, Artificial sequence
  DNA replication origin
agaattagataaaatacatagaatggccaatgatgaaaaatgccatgtagatgtgtgaagcagaggagggagtgtgtgtatgtgtgttagagtattgtttgggggatcgctttttttattttttagagacggggtcttgctctctcactcgggctggagtgcagtagtgcaatcatagctcactgcatccttgaactcctgggctgaagcaatccaccaacctcagcttcctgagtagctgggactacaggtgcacgccaccatgcccggcaaatgttaagtgttcttgtagagatggaagtctcactatgttgcccaggctggccccaaactcccagcgtcaagcaatcctcctgtcttggtggggattgctttaaatagggtgctgaggaaaagtctaagaagtgacatttcagccaaaagctaaaggagaaaagggagtaaagctgtggctatttggggaaagggatccaggaaagggagtggccaaaggccttgagcaggacagccagggccagaggggattcagctggggtagccacagatcagagataaaggggatcagatggtgccgcaccgtgttggtaggtttggtggactttgactccaaacacatctttttaagttttttgttgtgtggctgggcgtgatggcgcacctggggttaggctcacttccctgcggctcagaagccatgggatggtggcttcccagggcctgaagtgctggagtcgggccaccacctatcccaagaagctggggaggaggcaggccactgtgtaacagcgcagttcccgaccgaaccccttccagtaggagagaggcagccttggctaatgggaccacgtctttttggaggtgagagtcctggaaagaaaacagaatatgctggtcgtggtggtgcgtgcatgttgctcgggagcctgaggtgtgacgatcgcttgaggtcaggagttcgagaccagcctggccaacatggtgaaaccccgtctctactaaaaaaaaccacaaaaacaaaagttagccgggcatagtggtatcctcctgtaatcccagctgcttgg

SEQ ID NO: 27502 - DNA, 1213 bp, Artificial sequence
  DNA replication origin
tgggaggccgaggctggagaattgcttgaatccaggaggcggaggctgcggtgagctgagatcatgcccctgcactccagcctgggtgacagagcaagacttcgtctcaaaaaaaaaaaaaaaaaaaaaaaacccataaaaatttagaaaagaatacctcttctagttttcccacccccatccccacatcagggccagtcaggttcacatgtgcatttggttcattatgtgtctttagtgttttaatttggaacagttctcttcccacctttggatgtaagtggcacatttgtttcccagtttcctgatctttttgttttgttgatggtgtttttctccagaccattttttcctgcgcctgtggggtcaggcgtggatagtcccccgcgtctgtagggctgggcgtggatactcccccgcgtctgtagggccgggcgtggattgtctcccacgtctgtggggtggggccgggcgtggaaagtcccccgcgtctgtggggtggggcctggatactcccccgcatctgcggggtggggcgtggatcgtctcccgcatgtgcggggtcgggtgtggatggtctgccgcgtctgcggggtcgggtgtggatggtctcccgcgtctgcggggtcgggtgtggatggtctcccgcctctgcggggtcgggtgtggatggtctcccgcgtctgtggggtcgggtgtggatcgtctcccgcgtctgtggggtcgggtgtggatcctctcctgcgtctgtggggtcgggtgtggatattctacttgttttttctgtctttgatgtagcgctccttcaacatcaacgtgtgaggcggattgtgtgcagtgggtaggagagtgtggtctgtggaatgagctgagcagaaagataatcaggctgagaaactcaggggcgtggtgattgtggcctagggctcagaaggtccccgcagaagagtgtctgccaaggagaaggaaggggtgggcttgccagggccgaggctggtggggctgggctgggcagtgggcagctccatggcctccaccagatgagtcgggagcctcgtcccttgacagcaggaggagcagaggttggtaggtctgtgatttggagacagtgtcccgctgtggcatggagagggaatggggcacggtcagtgtggtggtcctgccagcgcccagcagagtccagcatagcccagcacactgtccaggagggagc

SEQ ID NO: 27503 - DNA, 914 bp, Artificial sequence
  DNA replication origin
atgtagcgctccttcaacatcaacgtgtgaggcggattgtgtgcagtgggtaggagagtgtggtctgtggaatgagctgagcagaaagataatcaggctgagaaactcaggggcgtggtgattgtggcctagggctcagaaggtccccgcagaagagtgtctgccaaggagaaggaaggggtgggcttgccagggccgaggctggtggggctgggctgggcagtgggcagctccatggcctccaccagatgagtcgggagcctcgtcccttgacagcaggaggagcagaggttggtaggtctgtgatttggagacagtgtcccgctgtggcatggagagggaatggggcacggtcagtgtggtggtcctgccagcgcccagcagagtccagcatagcccagcacactgtccaggagggagctctgcctcggtggcggtgggagggagcggccagctgggcaggactctggggccttggcagggtcctggatctggggagggggcgggggaggagtagagtggccccgggatcctggctagagaagccatggcaagtgcggctcccagcatgtgagttgcaggggtcaggctgggagcttgctttcggctggggccgggctgggtctgccaggcagtccctggtgcttggagagggtcacggtgggcacaggactcaccagggggtgcgtgaggccggagggtgagggtgaggtccccggtgaagttcttggtggcgtgtgggggttgtggaggttgggagggtactgggaccaggtgtggggccgggccagggagcagcgtgggagggaggaccacccttgagaagggattgtcaccaagagacgcagccctagggggagtgctgcccaccgaagcctgaccggggcagaggggaaacggagtccaggctcagc

SEQ ID NO: 27504 - DNA, 905 bp, Artificial sequence
  DNA replication origin
atctggggagggggcgggggaggagtagagtggccccgggatcctggctagagaagccatggcaagtgcggctcccagcatgtgagttgcaggggtcaggctgggagcttgctttcggctggggccgggctgggtctgccaggcagtccctggtgcttggagagggtcacggtgggcacaggactcaccagggggtgcgtgaggccggagggtgagggtgaggtccccggtgaagttcttggtggcgtgtgggggttgtggaggttgggagggtactgggaccaggtgtggggccgggccagggagcagcgtgggagggaggaccacccttgagaagggattgtcaccaagagacgcagccctagggggagtgctgcccaccgaagcctgaccggggcagaggggaaacggagtccaggctcagccaagctgatgggccttgagctgtggcctcgggtgcagggacagctggcagtaaggccacctgggcccgcgggagccaagggcaccggcgagtgtcctggccatgcaggccgtgaacacggagcctgcaggggacgtgcgggtgaagcaggagcagaggagaagcctcccggcaggggtggtggcatttgggggtggtggtatttgggggtagagactcccgctcaggtatggctgtgtctggcccaagaggcgtggaggggccagcccccacctgtctcaggaggacaggctgctgaaacctgagggccaggcggaggggaggggccgtggccggggttctggtgtgggccagcagcagaggacctggggtactgggcactgccagttgggggcttgtggtaccatcccctgcgggaggctgcacctcagccagtaggagtccactgaagctgtggacagcacccaggcagaggcctcct

SEQ ID NO: 27505 - DNA, 1370 bp, Artificial sequence
  DNA replication origin
caatcccaccaggccgcgagcacagcagggctgggccgtcatcgaccgtttcacactcaggtttgaacggtgtccccgggagcatctgggactttgtttccggcagcttctcccccagcccctcccccatcctgagtgccggccccccatcctcttcgagtgcaagtccaaacggagctgagctggcccgggtcaggcggcagctggacgaggccaagaggaagatccggcagtgggaggagtcctggcagcaggtgaagcaggtgagtgtgtgggggggccagacaggtgagggggagggagggccgcaggggactcaggtgagcgtgtgggggtgagatgggaggggagggagggagggccgcaggtgactcaggtgagcgtgtggggggtgagacgggagggggagggagggagggagggagggagggagggccgcaggggtctcaggtgagggggccacagctgatgctggggaggggaggggaggatcgctggtgacacaggcaagagggtctgcaggtggcacaggtgaggtggggggtgctgagacgggccctgggtttcaggtctgcgatgcctggcagcgagaggcgcaggaggccaaggagcgtgcccgtgtggccgatagcgaccggcagctggcgctgcagaagaaggaggaggtggaggcacaggtgaagcagctgcaggaggagctggagggcctgggcgtagcctccacactgccggggctgcggggctgtggggacatcggcaccattcccctgccgaagctgcactcgctgcagagtcagctgcgcctggacctggaggcggtggacggcgtgagtcctgctctgggcagggtgaggggccagcctgcctgcagggctgctgtccctgtctggggagggccctggctggtgcggtgtccccttcctcccctgccccagggtctgctccgggcctagggaggaggagacggtgccccaccccagcacagccccctgtggcctccttgcctgtctccctgggagccgcctttcctgtcaggctggcccttgccctttcacccctccctcttgtcagcgaatgccacactgctccccgtggccccatccctccctgttcacagctgtgaccctcacacatgacccctccacttcggcgtgcccctcctcacctcgcctgctaagggtgggctcttggactcgctgctataggacagagggtcctgcgtagcccacatcctgggcacccagctgccctcaggggcctggcctgtctggccactgccgtgtctgtggtggccccaggaggctgtcctctgcccagggctcttaagacagagcataccccctgaccccgcagctgccttctccctgagg

SEQ ID NO: 27506 - DNA, 1134 bp, Artificial sequence
  DNA replication origin
tcaggagtttgagaccggcccggccagcgtgatgaaacgccatctctactaaaaatacaaaaactagctgggcgtggtggcgcccgcctgtagtcccagctacttgggtggctgaggcaggagaattgcttgaacctgggaggcggaggttgcggcgagccgagatcgtaccattgcagtccaacctgggcgacagagcgagactcggtctgcggcgtgggggaacctgtgagcagcaggtcatgtggtttgccaccacagatagggcacaaggttccgtgtgaggcccctcagtcaggacggcatctgggagggagccccacggaggcttcacggcaacgccagcatggagggagccggcactcacctagggggctgtaggatgaggctgcagagcccagtgtgcccggctctgaacgcaggggtggcggctgctggggaggcgtcatggctgaggagcccaccggccctgggaggggctgggacagcgaaccgagcggcgaggtggacgcagaggatggcgagtgtagcgatggtgctctgggcagggagccggggatggcgacaggtgcagagccggccagcgacctgggacctggcgggggcggaccagtcagcgaagggagtaccgccaggcctctgcccaaacatctgccatgggcggcagccgtggaagacggaccctgcaggtggtggtggtggggatatggggggtgggaatataggggccaggccagccaccaccatctatgtgtttggagccacagcgcccccggtggccatgtccaacacagctgggcaagccatgggctcaaagggattccaaccagaggtggggagacgggggtttaacatgggccccccccaaagaggccggacacccaccaggccctgccggccaactaagccattggcacggtcctcccagcacttgtccaggccccctgaaatggtttactttcttttaaaagaaagaaaagatacacttttaggctgaatgaaaagatgttgtatacgatgttaagatacatttgtatggggccgggcgcactggctcacgcctgtaatcccagcactttgggaggccaaggcgggcagatcacggggtcaggagatggagaccatcctggctaa

SEQ ID NO: 27507 - DNA, 1342 bp, Artificial sequence
  DNA replication origin
aggaaggggcagtggggtccctgcttgccattcggggttgggggtggggacttgggagggaagggcccgtgcaggagggcagccccacggcctgcagggatgtgtggggacagccttggaaggcagggctggctgggtgaggccactctgaggcgggtccttcccactcagtcttgagccttgggaattgaggtcttggtgcttggcatgaaattgcacgtgaacacctgctccttgaaatcaccctcacagaaagttttttttttgtttttgtttttgttttttttgagatggaatcttgctctgtcgtccaggctggagggcagtggcacgatctcggctcactgcaagctccgcctctggggttcacaccattcttccgcctcagcctcccgagtagctgggactacaggcacccgccaccacgcctggctaattttttgtatttttttttttttggttgagacggggtttcaccgtgttagccaggatggtctcgatctcctgaccttgtgatctgcccacctcggcctcccaaagtgctgggattacaggtgtgagccaccgcacccggccctggaaagttttttaaacagtcgaatgtgcacacgtggacagatgctaacacacacttaggtatttaaactctgaggggcagcagcagcgtgtcagaggcgaggacccagctgctggtctgtggtgcggggcgtcccacctgagcacgctcgttttgccggaggaacagccaagcctcacactgcctgtggggggctgcgaggacgggctgggggtgtccttccctggctgccccagcaactcccacgccttctgcccttggtctcactctaagcccaggtgggacggtcgtcctcctcagctaggcttcctgagctctgcagcgctgggtgggctgtggatgatggggggctctgttgacaggttctgcgttagacctgcatcttagcaatgtgaatattgcatccctagagaaggacctggaagagcaagacggccacgacctgggagcagcaggtgagggtggggaggacctggggccctgctcctccagccgctgaacagccaagtgctgtggccggaggatcgcttgagcccggggaggtcaaggctgcagtgagctgaggttgcaccactgcactcctgcctggaccacagggcaagacccggtgtctggttttcggagcgggaggatccccttctggcggtacctcctcctcctctccctgactgcctctccctttccctcccctgcacatggactcctcagcatctctcctgcctcgggcctgcccacttcttcagttgacctttgtcccagcaaagt

SEQ ID NO: 27508 - DNA, 1320 bp, Artificial sequence
  DNA replication origin
tctctgtgcggtgttggccggcagtccctgtgtggtgtgccccacgctgctgaggtctctgtgcggtgttggccggcagtccctgtgtggtgtgccccacgctgctgaggtctctgtgcggtgttggccggcagtccctgtgtggtgtgctccacgctgctgaggtctctgtgcggtgttggccggcagtccctgtgcggtgtgctccacgctgctgaggtctctgtgcggtgttggccggcagtccctgtgcggtgtgttccatgctgctgaggtctctgtgcggtgttggccggcagtccctgtgcggtgtgttccatgctgctgaggtctctgtgcggtgttggccggcagtccctgtgtggtgtgttccatgctgctgaggtctctgtgcggtgtaggccggcagtccctgtgtggtgtgctccacgctgctgaggtctctgcggtgttggccggcagtccctgtgtggtgtgccccacgctgctgaggtctctgtgcggtgttggccggcagtccctgtgtggtgtgccccacgctgctgaggtctctgtgcggtgttggccggcagtccctgtgtggtgtgctccacgctgctgaggtctctgtgcagtgtaggccggcagtccctgtgcggtgtgccccacgctgctgaggtctctgtgcggtgttggccacaacactgggctgggctggggaggcggcgccggcccacagggtgtatcccagagctcctgcagccgctgcggtcctctggtctgccccaggtggcacgtgggctctcagatcccagatcctctggtcacccctcacccccaacccaacttctgtgcagtggctgcgggagtttgagacacgctgtggcttcaggggctggtggcctgagctcagcctcctcatgatggcttcctaattctaggaaggggcagtggggtccctgcttgccattcggggttgggggtggggacttgggagggaagggcccgtgcaggagggcagccccacggcctgcagggatgtgtggggacagccttggaaggcagggctggctgggtgaggccactctgaggcgggtccttcccactcagtcttgagccttgggaattgaggtcttggtgcttggcatgaaattgcacgtgaacacctgctccttgaaatcaccctcacagaaagttttttttttgtttttgtttttgttttttttgagatggaatcttgctctgtcgtccaggctggagggcagtggcacgatctcggctcactgcaagctccgcctctggggttcacaccattcttccgcctcagcctcccgagtagct

SEQ ID NO: 27509 - DNA, 1416 bp, Artificial sequence
  DNA replication origin
gttctctgccctgggccctgctgcctctgtgacgggatggggaaggacagtgttgccaggtggcgccacagcccggcctccacgccccggaaattccctcacggctggcgtgtggacgagggttgagtctgggtcgtgctgtgcggtggagtggggtgggggtggcctctgccttgcggcctctggagtccaccgtccactcccgagccaggcttctctcccgcctgccgctctgggtggtggagcacggtctccacacagtgtggctgctgagcgcggccagattcggggtgaagttcagaggcccggacctgccagctgcgccacgtccacgccagcctctgcctgtgctccgctggggccaccaccgcggcacgaggatactccggctgccctggggggctcggggggtgtgaccgccgagcgccaggcctcgggcgaggggccacccgccaccctgtggttgctcccatggtccccgtggcgctgactggtgccagctgcttccagggaggagaagcggaggcctgggcagaggggtgaggtgcaggccacgtgccccacagctgtgttcccgacaaatctcatgtgcggctagggcagcgttcttcttcagaagtcaccctcctgcctttcctgctgattatgctgaaaatgtctggaaaggccccagctgtcttccccggcagagtggggttttgtccctctgcggccccttggctgccgagtccttgtttctccagctgttttttgggatgccccctgtgtggtgaacctgctgtcaccctgacatggccaccaagtcctgacgagtcagccctgcctggctcagccagctccctgctgggtggggtgggttgtggggagtgaggctgcaggaggtctgcgagggcgggactcgatgtcgggtaggtggggcagtgaccgcctctttgcttctgctgggccccagcttgtctgaaccgagcaccaggcaggggctggccaggctgtggaggttcccggcgcgccgacccccacggtcgggtctgacaggtttccccggggtgcggttgcctggggccatggagggaccatcggtcccaggtgaggacaggaggaagggggtctagggcccttcagggacaggcaggggtggctttgcctgtctcagagcaggcctcagcagcacactgtccagtaccaggcatcagtgagggtccaagaacttgcagccagcagggacgacagggcagggccccccaggagagaccccacacagcgcacatgggagagtggatgccaaaggtgggcagcggggagggcgcctgcgcaacagtccctgtgtggtgtgccccacgctgctgaggtctctgtgcggtgttggccggcagtccctgtgtggtgtgccccacgctgctgaggtctctgtgcggt

SEQ ID NO: 27510 - DNA, 1327 bp, Artificial sequence
  DNA replication origin
ggaccctgagccagtgaccagtctccctataagaagaaacttggacagacactcggaagaggtggcccccagagcagaggcagacactggagccacgcagctgccagccatgaaggaggatggacgccaggaggaggagtgcaccccagccctggagggaggaggagtgtgccagccctggaaagagggaggaggagcatccccaagccctcagaggagggaggaggagtgccccagccctggagggaggagggaagaggagcaccccagccctagagtgagggaggagggaagaggagtgccccagccctggagggaggagggagagtggaggaggagcgtgccccagccctggagagagggaggaggagcgccccagccctggagggaggagggaggagcatgccccagccttggagtgagggaggagggaggagcatgccccagccttggactgagggaggaggagcgccccagccctggagggaggagggaggagcgtgccccagccttggagtgagggaggaggagcgccccagccctggagggaggagggaagaggccctgcccgccacagatctcactttcagccttggagccacctgtccaaggccgctcagtgcgtggtcctctgccactgcctgcagtgtctcggctctgctgctcagcacgacttcagtcaggctttgaggtcttgccctcttcagccatggcctgagaacgtcaagtggatgacagcgaccgggagggctggcccaccctgcaggccagggtggatgtccgctcagggacgccaccgtcctgtgaatgggaaggagaggagtgaatggctctgggtgcggctggcccaaggcctgcctttggctccgccgatgagcatccttgagggctgaggcattttcggatgctactgtgggttcctggtccccagggggtcttggcctggctgccccgacccccaacctgttactctagtttctggataagaccttcgaaagtccctaaaagcttcattggaacggtgtctccgtgggagtggaggccactcccgcatgcgccgtgtgccgtcccggacgccccaggggttcaggttctctgccctgggccctgctgcctctgtgacgggatggggaaggacagtgttgccaggtggcgccacagcccggcctccacgccccggaaattccctcacggctggcgtgtggacgagggttgagtctgggtcgtgctgtgcggtggagtggggtgggggtggcctctgccttgcggcctctggagtccaccgtccactcccgagccaggcttctctcccgcctgccgctctggg

SEQ ID NO: 27511 - DNA, 3156 bp, Artificial sequence
  DNA replication origin
gtgcgacgggggcggggccgagtcacgttgcggggcggggccagcgcggagggggcggggcgcgggccgggtttgaatccccggcggcggcgcggggcggccgcggaccgtgagtcagcattggcggcggccccagcgcgtggcagccgtgcgccgccaaggtgcgggtctcgttactcggcggtcaggagcgggccctcccttaggtgcgccccccgccaggtgcgtcccccgcgtcacggagccgggtgtgacagccgcggggtgggcccgggcttctcagaggcccggagcgaggcgaaggcgtcgccttctcggaacctgcctctgccgggcgctcgccgcttcccagcgcgggctcgggccgcctgcgtcccctagctaggcggggtcggtgccccgagggagggcaggggagcggggcaggagagcggagcggagcggggcaggagagggcaggggaacggggcgggggagggccgacccctgcgtcctggcctggcccgcctgcactcagcccgcgtggtacgggaatttccctggcgtcggcggctcccccgccctgtcctgagttccgagcagtctgtagcttgtcctcgcgtgtccctgaccccgggggaccgcggcgccttgaatgtgctgtgtcacggcagagccgggctgtgtcgcggtgactcagcggggccggtggtttcctaacgcccggggctgaggcagcctggcctgacccagctgtactcgcttaggtgaccagcctcacctagattttgcctctgcacaagggtcagctctttctttgagaatgtttcagaagatctgggtctaaccttgaaacagtgaggtgaggtgggggagaagctgcgggtgagaaagtgggccaggacggtgcagcagccgtctccccccttgatttctgggagtgagccctagatagcaccctaggggtggtggagcctccaggaccctctccggtgctctctttggatgaggggcacttggctttgaagcggggccggagtctctcgggggcacccacacgctccctgaacgtcccctctccaggcagcttcccgggcttcagcacaggtgacttggctgaggtaggtggtggctgacgccctctgagttgagtgcgagccgtagtttgtcgggtgagcattgaaggcagcttagcccctccacatgctgcgcactctgcagctggtgggtgaagcttctgccgacttagcacggagcctggtgggatcaccccactccaaggggagaaaaggcgcctccgttcctgtcccccaacttctttgcgtctttgattttcatgaggagtttctggatctctgccaggtgtgaggggcggtgagctctgaaggggctgccatatcctgatcctgggacttgggtgcagagggcaggtccaggttcccgagcctggctgacctgactatgggcaaaccgcttggccctgcccgtcatcaagcccccgtatgggagcatgagggggctgtgggcaggcctgcgggttggggggtcggtgcctgtcctcagtgagtctgtccagggccctgacatggttcaggctgacacctgcaaggatgtagtggggggcattccatgcagggcttggaggccgagcagctttctggggactggtgtggctgatcttactgaatggaaggcacagccaggctgagcctgcagtggcacagcaggttaggagcccggcaaaggacccattgggaagcggtgaccggcacgcgcaagggcacaagcttcctcctttcttgcaggtcaggattcaggatgcaatgaggcttttcttggtaggaaggttactattgcaatgcatgaaggcaggctgggcatgggcctcagggggtgtgggttgagcgagcagcccatgaggaagggatcctgcagtgccagcttccagcagcccctgcacacgtggtgtctgggaagggcctgcagtggggccatgggaacaagcaagggatcctttgccagggaggaggaagggctttggcccctgctggacatctgggctcggggctgcagagccactgtgttgggcgggtccaggccacaggagaggctgccagccctcagggaggagggtgggcctgggagggaagctggtgcctatgacaagaggcagttcagggcacaggcgcagggctggagggaagggcccggggcagcggtgggcagagtgagtggtgaggaggccccagaaaacagctgcagggggagtggaggcagagggggggtctcctttctgagggaggactcagggagggagggctgtgcacagcaggggccagatctgttgatacagagtcctgaggggcctggggaggacgggcaggaccaacaggggcatctgcaggtgggcccccatgtcctgggttgaattgtgtcccctgaaagttgcatttgaggctgggcatggtggcttgcacctgtaatcccagcactttgggagatgaggcaagcagatcacctgaggtggggagttcatgaccagcctgaccaacatagagaaaacctgtctctactaaaaatgcaaaattagctgggggtggtggagggcacctgtagtcccagctgctcaggaggctgaggcaggagaatagcttgaacctgggaggcggaggttgcagtgagctgagatcgcgccattgcactccagcctgggtgacagagcaagactctatctcggttgggggggctgggtgtggcgggggaagatgcacctgaaccccaggcgtcgcacctaggtacgtggcgttgcagggaaacacagcaggtcctcttatcccagggttcgctgtccactgcctcatttgctggtgcgaggtctgggttcaggacagcagtgtacagcatttgcgcaggtaacttttattactgtgcggtgctgaaatctatgttaccagttaatcttgttaatctcttactgggcctgacgtgcaaatgaggacgttcgtataggaaaaagcttggtatataggggttccgtgctatccgcagcatcaggcgtccatgggggggtcttggaatgtatccccctgctacagatcgcagggtgctactgcagggtcctcataaccaggttaaaatgaggccggtagggtgggaccctgagccagtgaccagtct

SEQ ID NO: 27512 - DNA, 2467 bp, Artificial sequence
  DNA replication origin
gccgctgacacatctttctgcacgtgccagattgatttttactggcaaatgtctactcctgaaacgttttctgcagaaaagctcacgagacactccccagaggtgtctgtgcctgtcccaagtgcaccgtagcccgctgccctgccgtcctggtgtttctcctcggtgcggtcagagtccctccgggtctgggaagctctccctgggcctcgccagggcgtagaagttggccgccgtcccgcggtgctttctgcagggtgccgacgtggcgctgcctcctccacgcagggggtgcgcgctcacggtgtttatgtctttgaacagaaccacctggccgtgtttgcagcggtccacccgccggcccccagcgtgagctccagcgtggcgtccagcctggcgtccagcgccggctccggcagctcctcccccactgcgctgcccgcgccccccgcccgtgccctcccgctcggccccgccagcagcactgtggaggccgtcctcggtaagtccagcaccgtcctcctttctccctgacctccttctgtgttcatgctgtagcttttcagggacagcgcttctatttcaggacatgttacagaatcgtcatttttgtagagaagccagacgcgtattttcagtcatctgtcactttggttgtgttgcacgtgtggttgtggaaacaagccctgactcagagaggctcctggcctgggtgccgcaggcgctggggacgaggagcctcccaggagccaggcagagcaggcgccgtccggctcagggactgagaacggggaggttgttgacagatgatgggagttgtgggagttggccgcctgtgctcccagcgctgtgggaggccgaggcaggaggatcacttgagcccagaagttgaagaccagcctgggcaacatagtgagaccccgactctactaaaaataaaataattagccaagcatggtggtgcgcacctgtggtcccagctacttgggaggctgaggtgggaggatcccttgaacccaggaggtcgaggctgcagtgagctgtgattacaccactgtactccagcctgggtgagagagtgagaccatctcaaaaaaaaaattgaaagtaggggttgtgggccagtgagggcactgagggtgggggacagtgatggggtggggagtccagtgaaggcttggagtcgggggcacagctgtgagcacctgggctggcagctttgggaggcctttagttggagggagtcactgggcactgagacacgtgatggtgctgggctgtggggacccgtgggggcctggctgggagcccagaccctggggggcagattcttccagaagcccggagtgggcagcaggcagagctgggggcaagacagtgccaggagctgggctgtgtgtgtccttggtccctttcagcccctggggaaaggccgtgttggggtggtggggacacctgccgtgttggggtggtgggggacacccaccgtgttggggtggtgggggacacctggccacacccgtgcagggctttgcttgcagagacgcttggtgagtgatgggatgtgctgaagccccatgttccatggccaccagcgcccaagggacccaaacctgcctctctgtcctgacagtgacagtgagggactcagggaaggccacctgtggtggtctccaagttctctgtccctgggctggggtggaatgggatggggttgggggtacagtgaggccgggccctgctcagctcagcccgggtctggcctctgctgctgcagccctggagcccaccccttcctctcctacatcctctgctgtgcagggtgtggcgggggagctgggcatgggatcaggaggacagggctgctggagccacgtggtgggggccctcgctgcagtccctgcctggacacactctggggacttggagtgggaccccagcaccatcaggacccgcgtcaatgtgggcggcggcccggcggccagacccgcaatgactcttgcccgagagccgcagcttctggtcgttggtggttgccccacacggaactgctcaggcccagctgcaagcccccagcaactcctagacgatgccggccaaggaggccgaggagagagagactcttcccagcggccacttaggccacagaccacacatcggcaggacactagaccagtcccatcctgagtggtgtctgcgaggaaagccaggtgcagctcctgaggccccaggacggtcctcagtcccccaagcacccagggccccgctctcagcacctctgcaaccaggtgcatcttctgggcacagctcttggcctgtgttgctgctgggccgtcccatccctgcatctgcttggggttgagcccaggcctttacatttttcttttgtgtgtgtgtgggttttgttttgttttgattttgttttttttttttttttgagacggagtttctctcttgttgcccaggc

SEQ ID NO: 27513 - DNA, 1734 bp, Artificial sequence
  DNA replication origin
tgtccgacccagggcggggcaggcctgctctgcaaaccccagcgtcgtccacggcttcttggtgggcccggggcccttccaggcaacagtccctcagctctcccttacatgggaggtggcctctgggcctgggtgatgctctggagttgggttcaggcaaggactgagacgcccacaggggtcatggagctgagaggacatccacaggggtgactgtgacccgggcggtggcctctaggctactggtgggtcaggacatggggaacctcagcctgactgagcaggggcagcttgtgtgtagggaccgtgccccagagcacggacctgggcagaccccgggacacagggtgggctgccaagagatgggatgaggcgggggtgggggagggcttccgcaggccgggcagccgtgcggcggtgcagtgtccacgtccccggagggccgggcagccgtgcggctgtgcagtgtccacgtccccggagggccgtgcgttgccatcctgagcttttggttctgagtgatagctgctggatgcggtgagctcagcagaccgccccacgtcactcaccccttgctggtgcctgcctcctcagccccacagcccaggtggccctgtcctttgctggtagagaaggtcggctccctccccgatccaagccatcggggtacaaggagctcccaggtgtgcgttgctcctggatgtctggtcaccagaacgtctgtcaagaggtccttctcagccttcctggggccacactgagggtctgaagcagggacaggaagtgcaagggatagggggcgggttgccactgagatggcaccaggtctcgaatcacccatagtgtttctgggctgcttgctggagaacatgaggcttccagcaaccctgtcaccaggctcaccatgggggattgatagggggtattggcagcaccatgcatggctgggagtgtccccggtgttgcatggctgggagtgtccccggtgttgcatggctgggagggtccccggtgctgcatggctgggagggtccccggtgctgcatggctgggagggtccccggtgctgcattgctgggagggtccccggtgctgcatggctgggagggtctgcggtgtagggtgcaggagttaccgccgtccctgatgctcacggggtggactgtggtccgttttttcatggcttgaggaaaagtggtctctgggccagggagaggaagtggattatggacgagggggcaggccccttctcgcacctgggcagggagctctggtggctgtctccagactttgcagctggaggggactgttttcagagtcagtcacggggggctctgtgcacctcctgggccgtgggctgaggggcaaatctggtatccagaaggaagccagggcaggcagcaggacccttaggtcacagaagccaggagccaggcgcgttcttgtcggggatttctgatctttaggaaatgcacattaaaatttcttcattatggacagttttacttaaggagacaaactagtaaaatcacacctcccaaggttaactttttctgcattactttgcagcaaaacccagatatcataccatttgaattgtaatatttcaggatgcaattcattttttttggaaacagagtctctctgttgcctgggctgcagtgcattggtgcgatctcggctcaccacaaccactgcctcccggattcaagcaattctcctacctcagcctcc

SEQ ID NO: 27514 - DNA, 985 bp, Artificial sequence
  DNA replication origin
tctgagttgctgggaccccaggcatacaccaccaggcttggctaatttttgtatttttttagaaatggggttgcccagcctgttctcgaactcctaggctcaagcaatcctcctgctttgacctcccaaagtgttgggattacaggtgtgagcctccacgcctggagtaagaactcatttcaccttaattactcctcacaggccctatctccaaatttagtcacaccgggggtcaaggcttccacgtaggaatttgggggggacacgtttggtccataacaaagacactgtgctgactgaaatgagccagttaccgaaaggcaaaacctgcgtgattccactcacaggaggtctctagtggagtcacattcacagacagcaggtggcatggtgggggccggggccggggccgggggagggggcaagtgttcacggggtcagagcttccggctggaagatgaggagttctggaggtggacgcggtgatggctgcacagcggtgtggatggaattcatgccacgtactacaccaaaccatggccactgtagcaaattttatattatatttcactataatacagagaagaaaaaccaggcaggcagtgctggtggtagcttggggtgtgctgtccccacggggcgaacggtgctggtgttagcggaggtgcggtgtcctcatggtgtgaacggtgctggtggtagcggaggtgtggcgtccccacggggagaacggtgccggtgttagtgaaggtgcgggatcctcacggagctctcgtctgacccctctcactgtgcccatccctcatgtggatggactcccacaccaggcccgtcatctgtggccattgtgccttggggtacaaggagtgacatggatgttgatgattttcaggtgatcgtttgggctgaagtcacagtgtgcgcatcaccctggccagctcccgggcagggtcagcatggggtctggggggtcactcagggctga

SEQ ID NO: 27515 - DNA, 1173 bp, Artificial sequence
  DNA replication origin
gcctgagcccctggcagcttgggtgaggagacagcatgcagcccacaggctggagagcgtggctgcaaccagaggcacgggtggggcacacgggggtcccagctgggcttggggtccctcctgcagtgctccgtccccttgcctggcagaggggccccggtaggggactgcatgggagacactgagcgtaggtggggaggcccatccccaggacagacgcgtgggcctccatggcacctcccacagccactgtgcttggagatgccctcccctcccggggatgatggtgccacaagggcagccctcccattagaaccccggggtgggcaacgcgagccacgggccgggaaggacgcccaccagccggagtcctctgagcacggtcccgcaggctcacctgtactggaaccgccgggggttgcgccgcctgtcccggctattgtggtagtgtgggcacgcatagccctggcggcacaggcgtggcggcttcgggcactgctccgtcttgtagctgcccagcacgaagttggcatctgaaaaatgggccacacggtgcctgagcagcgcgactggaagcaatgctgggcagaggagaccaaaggtggaaggacctggctgtcccccaaatggaaggggctgcaggaggacttggggagcgcagacacacgccacggcacacgctgatgtcaaaggactcgcgctccatgagggaagccgggccagaaggccacgtggtgtgattctgtttatgtgaaaatgcccagaactagggaacccacagagacggagtggagccgagaccaccagggctgggagggagtcctgctgtgggtgtgcggcttccttgctgggggatgaaaatgttctccaactagagagaggtgatgtgtgcacagcttttgagaatatgctaaaatccagagacatgcacaccccgaaatgccgcatggtgagcctcatgcgcaccacagcctctgggtgacaagcacacatcagtgtgggttcactgttggtaaagagcgtacctcgcagtgcaggaggtgcacggcaggggaggctgagggggcagggggtgtttgggaaatctatttttctactcagttttgctgtgaaccggaaaccgctctaaaaaataaagcctatttttagaagtcattcactgggccggacgtg

SEQ ID NO: 27516 - DNA, 890 bp, Artificial sequence
  DNA replication origin
gggaccagggtcagcgcctgggctacgaggtcgggtgagggtcgcgtctggagtcgggatgggggtgggcgcagcgcctggggcccgccgggaatgtgagtacgggtcgaccctgggttgaggctcctgaggccggtgggtcccgccgcccacgagtccgagtccctggaggtgctgccggaagcgagccgcggcgctgtctgtgtttgtaggtacctgaaggagttcaggacggagcagtgccccctgttttcacagcacaagtgcgcgcagcaccggccgttcacctgcttccactggcacttcctcaaccagcggcgccgcaggcccctccgcaggcgcgacggcaccttcaactacagccccgacgtgtactgctccaagtacaacgaagccaccggcgtgtgccccgacggcgacgagtaagcggccgcgagggggcgccgctgcctgggcggaggtggggggcctccacccggggatgcggccgggaccctcagcggacgccttagtgtccatacctggcccctgcagagggagtcgtaattatacgctgaaattttctagtgaccagggatgctggggcggcatttcctattctcaggccagttcccgagggattatgtgtgttttaggggtaacccttgtgtgactcaaaccaattttgcttcacctcccacttttttttgtttgttttttgagacggagtttcactcttgttgctctggctggagtgcaatggcatgatctcggctcactgcagcctctacctcccaggttcaagtgattctcctgcctcagcctccggagtagctgggattacaggcatgtgccaccatgcccagctaattttttatttttagtagagacagggtttctccatgttggtt

SEQ ID NO: 27517 - DNA, 923 bp, Artificial sequence
  DNA replication origin
gctgcggggggcgcggggctggggcggggccggggtctgcgggctgggggcggggccgcggggggcgtggccgcgggggcgcgcggggatatccgggggcgggggcgccggcgcggcgcatgcgcgctgcattgttttgactgaaaatgccgtcggtttcgaaagcggcggcagcggcgctgagcgggtcccccccgcagactgagaagccgacccactacaggtcagcgcccgtccggcctgcggccccccgcccgcgcccggtgcagctcggagcctcccgccggggctcgcgccgcctccgccgcccccgcgccccccggcctccgcgcagcgcctgggctgggggggccacgaccctctgctctcggcggcctccgcctgaggtcggagcgcggcgcccatggtctgggatggcacctggttccggggtccacgcgcctctggggagggaggaacgccccggggttgggggttgcgcctgggctcggggaccgggaccctctgctccggctgccgaccgtgaggtcacagcgggtcgcccagggtccggggtggcgcttgggcttggggaccagggtcagcgcctgggctacgaggtcgggtgagggtcgcgtctggagtcgggatgggggtgggcgcagcgcctggggcccgccgggaatgtgagtacgggtcgaccctgggttgaggctcctgaggccggtgggtcccgccgcccacgagtccgagtccctggaggtgctgccggaagcgagccgcggcgctgtctgtgtttgtaggtacctgaaggagttcaggacggagcagtgccccctgttttcacagcacaagtgcgcgcagcaccggccgttcacctgcttccactggcacttcctcaaccagcggcgccgcaggcccctccgcaggcgcgacggcacctt

SEQ ID NO: 27518 - DNA, 1187 bp, Artificial sequence
  DNA replication origin
cccagcccaggcgctgcgcggaggccggggggcgcgggggcggcggaggcggcgcgagccccggcgggaggctccgagctgcaccgggcgcgggcggggggccgcaggccggacgggcgctgacctgtagtgggtcggcttctcagtctgcgggggggacccgctcagcgccgctgccgccgctttcgaaaccgacggcattttcagtcaaaacaatgcagcgcgcatgcgccgcgccggcgcccccgcccccggatatccccgcgcgcccccgcggccacgccccccgcggccccgcccccagcccgcagaccccggccccgccccagccccgcgccccccgcagccccgcccccggcccgcagaccccgccccagccccgcgccccgccctgccctgccctgccctgccctgccctgccctgccctgccctgccctgcagcccccggcccgggacgctggtcctgcccggggccgcgcgtgggacccgcgatggtcgcccctgctgtgacatgacccgacataaccgtgtattttacatgaattaatcacaagagttgtatctcaatagagctgctcttccacaaacgaaccaagaggctgatgtcagggggagccaggcaccgggcggaagggccaaggggtcctggcctttgtagaaaggaatttgttccatttcgaaccttgacctcaaaaacttatactcagagatttatctacaaaggtaattatcacagttattttgcaaacacttgaggtcccccttcccccaacagcgcagtagctgagaaaagggaaaactctaagtgctctgcgtgatttgaaacagtgcttccgaagaatttttagtggtaggaggccgggcgcggtgtctcacgcctgtaatcccagcactttgggaggccgaggccggcggatcagctgagttcgggagtttgacaacagcttggccaacagtgaaaccccgtctctactaaacatacaaaaatattagtggggtgtggtggcttgcgcctgtaattcctgctactccggaggctgaggcaggagaatggcgtgaacccgggaggcggaggtttagtagtgagccgagattgcgccactgcactccagcctgggtgacagagtaacaccctgtctcaaaaaataaaaaagaaatttttagtgatatgaaaaatgtgcccatt

SEQ ID NO: 27519 - DNA, 1300 bp, Artificial sequence
  DNA replication origin
cctgcctcagcttcccaaagtgctgggattacaggcatgagccaccacacccaatacatctttttattttttatttttgcaatatgtctatgtaacaaaaacgtgtcatttcttatgcccagagtttgagaggaattcacattcattcccgtagagaggttagttggaagcctggacgtgcctccaatgaatggggaaaggtgaagtgcttctttcctctcaggatggccctggagctagaaggcctgctcctgacttccggtgcaggtcacccctcctgtcgcccgggtggtggcggggacctcggcccatctgctgcactgtgtgtggccggatggccctggacaagccccttcccctgagccagaatctgctcgcctctggagcaccggctcctgcacgtgcttcccagcagaagaagcgccagatctgggaccagttctgttcccccaggaactcttggcatcaaggccaggaaggggggctggaggtgtcctgagctcagcaacacctgggcggcctggccccagactgtgtttggggctgctgtgtcaacagaggcacctgtttgcccaggtcctcctcaacgggccctgccccacctgttctaccccagaaccccacctggaatcactgccaaaccagtccccctgtagggacctgggagcacccactgttgtgggaggagggggctcaaagtgtggttggggaggactggtcagcctcatcctggtgtgcagcccaggggggcttcctgaaggaggtggaaatcgaagggccctctggttagccatggagcctttgggttgggctggtgcaccttcctggttgttgtggttttgggcagttgcgcacaagctgccccaggacagcagagtcaggggcagagctggaaggtacaggcaggggctgaggcttcactcggggggcgggccagcctctgaggggccaggccaccaagttaatctcagtctcaaacagaaatgagacacctgggaagagtgtgaaatgggcatcccccgtcccactcagcccactgtgaggactggaagacgccaccccgggttcagcagtgccccaaattcacgtcccctcagaacacaagaacttgaccttgtctggaaacagggtctttgccaatgtcattagttaagacgaggcccttctggaccagggtgggccctaaatctaacgacacttctactaacgactaaatctactatctcttctaacgactaaatctaatgtaacactttggaggagctgggactccaggcgtgagcgcaccgccggctcccgt

SEQ ID NO: 27520 - DNA, 913 bp, Artificial sequence
  DNA replication origin
ggggcagagcagtgtgggactgtcatggacacccggggagctggcctgaggctcaggggtgacagtgccactgcaccggtccaagcaggcagcgaaggggaacccaggggtggccggaggggcgagggtgggatatggggaccccctgggggacgggtggatgaattagctcctcgctaattagccccctacccctgagttctgagactcaggaggccttcaggaggaggtgactgcggtttctggtgaggctgggtggggcagcagcctctggggcatctgggatggtggagaaatgcacgtcccacaccactgcctgcctgtgtcctgcctggggtggggggggcggccggggccaggccgaggagcacaggaggccccggcagtggggctgggcccgggcgtcttccagcatctgcggccagcgcgcctctcgtcggggggcagcatcgggcccaaccgagctcccggcccacagccccgccggctcccacccttgctgtggggcctcaggcctgggaggaaggcgctgcccttccgagtgcagcatgcctgctgtgcccacggaccccagattgatcttcctggagaaaatcaatagctccaatatgccagctctcaagaggctctgcggctagtcacccgccattaggcacacgagggctgcagcctccgccgcccattagcgggacattaggcctcccacgaaatttctctgtgtgctttgagataatgaaggccgaggtgttggtttacgtccctgggggagggggaggatgacagcagctttctgggcagggccagtgccagctccacatggactcaccaaggagagcagggccccggggacacaggcgccccggcacatccggctgtggcttttcccacccggggtcaagcagacacacagcat

SEQ ID NO: 27521 - DNA, 1720 bp, Artificial sequence
  DNA replication origin
gtgacccacagccaggtgaccccatagcccagggagcccacagcccagggagcccatgccccaggtgaggtgcatctggccgtattcagccctgagtgtccaaaccatgtaggggcctctgtccctggcttcatgggggccgccctgagactccagggtctgaggatgcttggccaggccctggctgtggggggctttgccagcctcaccagctcccctctgatccagctgtggctgaggacctgcggctgcctggggttcagggccctaggcccccatctctgaccagatacagcccctggccctcccgacccggggagcttccggccgggggccctgggtgcgcccgccctcgtggctcagaaccccggggccggacctgcagagggtgggggttctgccgctcctggcagtggctgcggcgccctctgccgcatgctgtggaatggccggggcctgcggagggaagggcgggagccaacccggcctggggtctgggcactgcaggcctccatcttgcgggtctcagcagggatggggtcagccggggccccgagggaactccagtggaggacccagaagggcctctgggcccctgtgttctgtcctgaaaggcgcgggcggcaggaaatggccagcccaggcttcgggcgcaggtggacctcagctcggcctcgtcggtgctggtcactgtcctggacgccaagggtgaggaaatgagacccagcccctcgtgaaggaggcgtgtgcgggggctcggcgggcattgccctcgggaagcggaaggggttcccgcggagcggacagcctggaaacaccggccctgtgatggccccaggacgtccgcgcccgaacccccagcaccgacacagctgagggacggcgggcgtggctaagcgaaggacctggagacaggcggtcacctggtggatccttgttggagggaggcaggaggctgagaggatggaagaggccacgctgctggctttggagctggaggcagcggccaggagccgggacgcgggagcctctggatgctggaggggggtgagccgtggctgcctgaacctcggcgcttcccccgcccctggagagaaagcctcagaggggtgacctgcttccccagcaaggccgcacgcttctcccgccccagggccctgggttttcccgctgtcctctgactcgggtgctgggggcctgcctgtgaccccgcccgtgaccccacctgtcccggagctgtctggatgctcgtctctgcctgacaggagaccacagagaaaaccctagtctggaatggaaaattctagagtgggcgcaaaccggagcagacaggcatttgggaggaggtgctggggcagagcagtgtgggactgtcatggacacccggggagctggcctgaggctcaggggtgacagtgccactgcaccggtccaagcaggcagcgaaggggaacccaggggtggccggaggggcgagggtgggatatggggaccccctgggggacgggtggatgaattagctcctcgctaattagccccctacccctgagttctgagactcaggaggccttcaggaggaggtgactgcggtttctggtgaggctgggtggggcagcagcctctggggcatctgggatggtggagaaatgcacgtcccacaccactgcctgcctgtgtcctgcctggggtggggggggcggccggggccaggccgaggagc

SEQ ID NO: 27522 - DNA, 2197 bp, Artificial sequence
  DNA replication origin
cacacgcctccttcacgaggggctgggtctcatttcctcacccttggcgtccaggacagtgaccagcaccgacgaggccgagctgaggtccacctgcgcccgaagcctgggctggccatttcctgccgcccgcgcctttcaggacagaacacaggggcccagaggcccttctgggtcctccactggagttccctcggggccccggctgaccccatccctgctgagacccgcaagatggaggcctgcagtgcccagaccccaggccgggttggctcccgcccttccctccgcaggccccggccattccacagcatgcggcagagggcgccgcagccactgccaggagcggcagaacccccaccctctgcaggtccggccccggggttctgagccacgagggcgggcgcacccagggcccccggccggaagctccccgggtcgggagggccaggggctgtatctggtcagagatgggggcctagggccctgaaccccaggcagccgcaggtcctcagccacagctggatcagaggggagctggtgaggctggcaaagccccccacagccagggcctggccaagcatcctcagaccctggagtctcagggcggcccccatgaagccagggacagaggcccctacatggtttggacactcagggctgaatacggccagatgcacctcacctggggcatgggctccctgggctgtgggctccctgggctatggggtcacctggctgtgggtcactgggctatggggtcacctggctgtggggtcgctgggctgtgggctcactgggctatggggtcacctgggctgtgagctcaccggggcgtcggctcggcttctgcctgtgaaggagcagtaaggagaagccgtaactggtggctgtgccgatgctgtccctgtccccactcccagcagcctttcctgggacctgcaggtgaccccacccctcaccatgagacccatgtggaggccgccggcctgccctctgcagaatcttactcttaagtttgaacttttcgtttcctgtcccttccctggaagctgggggtcctgactgcagccccggacactgggtgattgcattgactgcctgaggccccctgggatctcctgccctccgggtgcccaagaaatcaaggcggggccagaggtccccaggtgcagacaagggctgggcctgtgtccaaatctctgtgtgttggatgtcactgggtgagaggagctggtctcccatctgactgggggacgcctggagcgtaggggtgaggaccggggtggggggtagcatccagaaccctcctggcccctggaaggtgaaggcccaggagctgggggctcgggacagggggtgctggggccaggccaggctgggggctgctgtcccgtcctcagagccagagtccctgggaaggacactgtggagtcctcccaacctgggccacttggggctgctctggggagtacagtgccaagcgggggcacacctggcgaatgccaaggtcagggacagtcacatgcgggtggcgcctgtgcgacctgagccatgtccccacaatgcgtgtctaccttgagtctccgaatgggacctcatttggaaacgggcaccctgcaagtgtaactggtgaagctgagggcacactgggtgggcgttggccctaaattcagggacggggtccccctaggagggcagaggacacacacagggaagaccccgtgaggacagaggcagagactggggagacgcaaccacgaggcaaggagccactcctggaggccctggaccaggacctctggcctcctgacctgtgttccaggctgcctgagttgtggtcattgtcacagcagtccaaggaagctaacatggcccccacagtggaccagctggggccacccaggaagagccagggagtcggtgggagcggcagaagcccttggggacgcttctgggggaggctttcctgggagcagtaggtgaagggagggttcccagccccccatttcccaccccaggggtggctgcagctgaggaaggaaggcccctgggaagaagcctggggaagaagggggttccgccattaaggatcaattgcaaacacctctgagctctgggcaggtgggcggcagcagcccagcaggcgtcctggtaaccactgggccagtggagatggtcatggctgtccgggagg

SEQ ID NO: 27523 - DNA, 2017 bp, Artificial sequence
  DNA replication origin
ggtgtcctcgtcctccagggacccgccacgggccaggcgcaccaggtccgcatagtagagctcccgggcagtgctgcggggtgggcggctgtcggcgtagacgtcgcaggcatctgggtcctgccccttatccttgcggccaaagtaccgccggatgtcgtcgctgatgagctctgaaaagcgtagcagctgcagcggggtctcggggctgccgggaccctcgggggctgcttcctccgtggcctctgcccggcctgagctcgggaggatccggccgcagccccccagcccctcgccctcgccctcctcctcctcctcctcctcctcctcctcctcttcctcctccgaagtctctgggggctccggatctgagggcaggaaggggtggtggcgcagcaggggcagctggaagtcgcacaggggccggatcacaccggcggccatctccgcgcgtcccacgcttctggggcctccggggcagcaggcgctggctggggagggagacagaggggcaggttccctgtcaggcctggccatgcccccgccgccctcgactgctgccctcggatctcacacatctgtggcctcccgcagagaccttcctccgctcctgggtgcccagttgtgcttgtcgagggcacggattgccacaggagtgaggcatggagagagatggggtgggcactgtggccgcatggccgtggcatgagggggatggccggccagggggtgctgtgagacctgctggacggctggcccaggatggtgactgggtgggagcagtggggtcctgtcgtggggggcagttggggacatggggacattgtggggacactagaattgtggtcacttgggaggggaggacgctgggcaggagagggcaggccctggggaagggacctcgagaagccaggcaggggaacagggatccctgcaggccagggcaggggtgctggcgctgctgagccggagctgggtcccgggctggggctgctgtgggtcagaaccaggggctccatggctcttgatcaaagtggaggcgtcactgtaactgagcccagagcccgtgcagcccccgtggggttcttccggccatcacagtcccaagggagcgggaggcagcaccccagtggtcctaactaggaagtctccacgatggtgaaggcggctggggtgggaggtccctgcaggggtgggctccaggggccactgcacctggccaggacgactcaagtgaggtatctgggtcaggggcctggcaggagggtatctggatggggactgtggggtgggtgcagctctcctctgggccagctgccaggtagtgcccaccacacagacaagggctgcccagcccctcctcgaggggacacgtgggtgcccctggggtcaggtagcctgaacccatcttgtccggagcctgtggcaggagggcggagggagggaggagggctttggggatgggggagggcttcagggagggaggggtgttgcggggagtaggaagggctgtggggagcgggcaggactgtggggagcatccacggctctgggacaggctttcctcggggtcaggatgtttccccgctggctgtcggggaggtgaactgcgaggcctcccgaccctggcctgcccagctgtggtcctgatctcactgaagtactggggtccccctcgcaggaggcatccagtgtcctgagcgctggactttggggctgactgctcacggacagcccagatgcaggtgccctcccatggcggcctgtctgccccaatgccggcccagtcctgggcctgcccagtggtctgggggtctctcccaggggtgggtgctccccacagagccctgggcaggactcacagactccagatccccagtgctgtggtgtccccagcagcgtctgcctcccccaggccctggctcctacctggccggggccgacagctcttgctccacaggcagaccttcacccggacacaagcatttatagccgcgctctgcagccgccaggggct

SEQ ID NO: 27524 - DNA, 963 bp, Artificial sequence
  DNA replication origin
tggtgaggaggccttgcccggccggcaccgcccagctcccacccgctccctcagccctgccgcctccccgcctgccctgctgcaggcgccagtgtctgtctgtccaagtgtctggccatgggcagggtttccctgaagataaatggcttccaggctcccggtgggagataagcccccgtttgccatcccctgcccggaggtctggctcctgggtgacaccagcatccccgtcccacagcgcacgcaggagatggccaccctgtgggagagtgtgctccggctgtggagtgaggagggcccgcggacgccgctgggcagctggaaggcgctcccatccctggtgaggccgcgggtcttcatcaaggacatggcgcctggcaaggtggtgcccatgaactgctggggcgtgtaccaggctgtgaggtgggcagcagggatcccggcgcggcctcctgggcctttgggccggggttcagggctgggggcccacaggcagcaggtgggccatggggggtggggcgggggtgcaggggccatgtgccgcatctctggacaggtggctgcgctggaaggcgtccctcataaagctcagggccctgcggaggccaggaggggtcctggagaagccccacagccaggagcaggtgcagcagctcacaccctcactgtttatccagaaataaacgtgctggctttgtactcattagagctgaggttccctgatgtgtgctgggagacagcctacccagggcctgtggggctgagcggggtggcgaggtccctggcagcgggggtgcccaagcttggagggacccagtctcttgacccccatgactcttcctgtcctgcccaaacccagcccggcttcaggctgttgctttccatggcactttagcagcctctctccttccctgccaggccccctagggctgccagagccccccggggtggaaggggcttggc

SEQ ID NO: 27525 - DNA, 1170 bp, Artificial sequence
  DNA replication origin
cctctcccctcctccctctccctgtgtgggtcgaggccaaggctggtcctagatggcgccctggggctgcccgccgctcccggctctgtgttcagatagagagtgtctccgacaagtgcctgcttcataagagcgactcagacctcaggatttccgccgaaggcaaggccaggtacagcctccaggccctgggagaggggcaggggctctgctgaccgttactgggctgggccggtccccacgctactctccacaatcccctggtatcgtgacagacctgttccccctgagcccgggcctggcccagcaccgggctcaccctgccaccctggtgcagcctctgaggcgcctccagcccctccctctaccccccgttggggacccccaccttccccactggaggggtgacagggctgagccccctcgagcctccttaaccctgtggtggctgtgggagtggcctttgtccccggtcctggccctacccccgagcacacccgacagccagcctcggcctctggtgcccatagggagttcaaggttggggccctgcggcaggagctggccacgctactatcatccgtgcagctgctaaaggaagacaaccctgggcggaagatcgcggagatgcagggcaagctggccacggtagtcctggggctgcccgcacccagctgggagagagggggagccatcaggttcagacggggcagccgtgcggagaggcaggacccccagcctacggggcattttccagccagcaggagacgctcagaaaaccacctgtcggaggccaggcggggtggcttacacccataattccagcactttgggaggccgaggcgggtggatcacctgaggtcaggagtttgagacccgcctgaccaacatggagaaaccctgtctctactaaaaatacaaaaattagccaggcatggtggcgcatgcctgtagtcccagttactcgggaggctgaggcaggagaatcactcgaacctggaaggtggaggttgcggtgagccaagatcgcgccattgcattctaacctgggcaacaagagtgaaactccatctcaaacaaaacaaaacaaaacaaaaacaaaaacaaaaacagctgtccctgggccaccccagcttgtctcagcctctggcagttctaagtggaggcacc

SEQ ID NO: 27526 - DNA, 1144 bp, Artificial sequence
  DNA replication origin
cgacaggtggttttctgagcgtctcctgctggctggaaaatgccccgtaggctgggggtcctgcctctccgcacggctgccccgtctgaacctgatggctccccctctctcccagctgggtgcgggcagccccaggactaccgtggccagcttgccctgcatctccgcgatcttccgcccagggttgtcttcctttagcagctgcacggatgatagtagcgtggccagctcctgccgcagggccccaaccttgaactccctatgggcaccagaggccgaggctggctgtcgggtgtgctcgggggtagggccaggaccggggacaaaggccactcccacagccaccacagggttaaggaggctcgagggggctcagccctgtcacccctccagtggggaaggtgggggtccccaacggggggtagagggaggggctggaggcgcctcagaggctgcaccagggtggcagggtgagcccggtgctgggccaggcccgggctcagggggaacaggtctgtcacgataccaggggattgtggagagtagcgtggggaccggcccagcccagtaacggtcagcagagcccctgcccctctcccagggcctggaggctgtacctggccttgccttcggcggaaatcctgaggtctgagtcgctcttatgaagcaggcacttgtcggagacactctctatctgaacacagagccgggagcggcgggcagccccagggcgccatctaggaccagccttggcctcgacccacacagggagagggaggaggggagaggacaaggtgcagggagaagggtcccacgccacctccaaggcccaagtacaccaaggctggctgtgccttcgcccacctgctgggggaggccatccaccttctcccgcacccctcgcaggtgttcggtcacctccttccgccacctggccaggtcctccagggacttcctctctgcaccttcccattcggtctttgcctggggtacagatgcccagtgagggacaaagccaagagaggggggacagacagatggaaagacggacacggggagctctggggagcaggcggcccccacccccacttccagctctgagacatttgtgcacaggcctgcaggcggctgggatggcctggcc

SEQ ID NO: 27527 - DNA, 2097 bp, Artificial sequence
  DNA replication origin
ctttcttccggctgagggtgtggcaggcccagctcagccgggctcagggcttggggacagcaggggactccaactctgatggagaccatgggcaggagggggaccggctgcgtgtccagcagaggctgcacacgggacaatgtgcctccgccccaggcccaggtgaccaagctcggcgaagaggtgagcctgcgcttcctgaagagggaggccaagctgtgcggcttcctgcagaagagcttcctggccctggagaaggtgggagcctgcccgcggctggcctgccctgccccccttcccagacgcagacctgcagctgacagtggggtctccccacagagaatgaaggcctcggagagctcacggctgaagctggagggcagcctgcggggcgagctggagagccggtgggagaagcttcgggggctgatggaggagcgcctgcgggccctgcaggggcagcatgaggtggggccgggcgggcggcgggcaggtggggccggggccggggtgcaggtctcagggcggcctccaccccctggcaggagagccacctcctggagcagtgccagggcctggatgctgccgtggcccagctgaccaagtttgtgcagcagaaccaggcgtcgctgaaccgtgtcctactggccgaggagaaagcctggtgggtgtcctggggcctcaggtgctgtcaggcggggggacccctgatgtcccactcaggagggggccgcagtggccgactcagcagggaatgaccttgcctcccccgagcagagtgctcgaccccgagggctgcagctggatggtgcgaaccctcctccctcctgtggggcctcctgtccctcacccagcctgccctccctggggcactcagctgtggccatggggagggaacccctgtcttggtggccgtggggagtgaacgcccatcttggtggccatggggagtgaacccgtgttggtggcactgtgaccgcaccccatcttccgatcccagggtctcctgggaggttctggagccagcagccaagctcccctccctggcccagggctgagaggtgggcaggctccactgagggtgtctatgtgtccccaacccctagggacgccaaggggcgcttggaggaaagccgggctggggagctggccgcctatgtgcaggagaacctggaggccgcacagctggctggcgagctggcccggcaggagatgcatggagagctggtgctggtgagggggtagcgcaacatgtccccaacggggtctcccacgcacacgggatgggcgctcagccaggcctccccgtgcccacctgtcccctgcagctccgagagaagagccgggctctggaggcatccgtggcgcagctggccgggcagttaaaggagctgagtggccatctcccggctctgagcagccggctcgatctgcaggagcagatgctgggcctcaggctgtccgaggtgcgccaggcagcgggcgggggcaggcggggctatggggagtccccacccctccagctctcagcccaccactgcccccagggtagaggcctgacaggccggtcccaagcctcccgtcccacccagcgactgtccccagggcctgggagaccccgagccccagagactcctgtgtggggcaggacagccgctgagcagcctcggcccagcatctgcagcccgtgaggcccgagctggagcctcggcccacggcccggccatgcgggcagctcacggcggggcagacaagcggcctccacccctcgtgctcttgttcactgtgtaacagctctgttgagatggattcactccccacacggttcacccgtgaacgtgcacagttccgtgtgtctattcacagtttcagagcattcatccttcaggaagaacctcagccccatccgcactcattcccatccccacttcccctggcgaccgctgggcccctccctgtctcgggggctgcctgttctggacgtttccaggaaacagagccacgcacggtgcggccgctgtggcggtgacacccacgggcatcccgtttcccgctcctcggggcctcgtgcgcagagcttcaccccttccaccgcgg

SEQ ID NO: 27528 - DNA, 1472 bp, Artificial sequence
  DNA replication origin
gcacgcatcaccatgcccagctaaattttttgtatttttagcagagacaggatttcaccgtgttagccaggatagtcttgatctcctgacctcatgatccgcccacctcggcctcccaaagtgttgggatttcaggcgtgagccacctcgcccggccatttttttttttttttttttttctgacagtctcgctctgtcgcccaggctggagttacagtggcatgatctcagctcactgcaacctccatctcctgggttcaagcgattctcctgcctcagcctccagagtagctgggattacagacagctgtccatgtctggctactttctgtagttttagtagagacagggtttcaccatgttggccaggctggtcttgaacctctgacctcaggtgatccaccagcctcggcctcccaaagtgggagtgagtcattgcgccagtcactgcttgtttttgtaaataaagttttattggcacacaggaacattttttacatgttgtcaatgtctactgtgggggctgtaaccgccatgctgagagggttacaacagagatcccatgaggtgggaacatgtaccatctggctttttacagaaaaatatctactctaaggtgacctcctggggggcaggaggccagcaggggcttgggtggaggggaagtttcccgggaggcgcctctccgtggctgatgaagggcctgtgccgcctgcctaccctttgcgtgtatgagatgcagggatggggccggctgcgcctcccccctcccctccccttcagggcggcaggaaagcagctgttggtgtggagacaaggccccaaggctctgcccagcccacctggctccccgtgcatggggacacctgcacgacactcctgcttccctgccgggcctggtggcggctggggggccttccctgggcagcctcggtggtgggtgccaagtgtgtctggaccccacctgagcgtggccttctcatgcttcacaaacccatgcctggttggtcgtctgggtacagagtggtcctgcccgccgtggctttcttccggctgagggtgtggcaggcccagctcagccgggctcagggcttggggacagcaggggactccaactctgatggagaccatgggcaggagggggaccggctgcgtgtccagcagaggctgcacacgggacaatgtgcctccgccccaggcccaggtgaccaagctcggcgaagaggtgagcctgcgcttcctgaagagggaggccaagctgtgcggcttcctgcagaagagcttcctggccctggagaaggtgggagcctgcccgcggctggcctgccctgccccccttcccagacgcagacctgcagctgacagtggggtctccccacagagaatgaaggcctcggagagctcacggctgaagctggagggcagcctgcggggcgagctggagagccggtgggagaagcttcgggggctga

SEQ ID NO: 27529 - DNA, 1459 bp, Artificial sequence
  DNA replication origin
gaggatcacttgagcctggggggttgaggctgcagtgagctgtgatggcaccaccacgctccagcctgaacaaccaggcaataccctgtctcaaaacaaaaaacgagtgtcggcctggctttgctgcctctggccctagagagcactcagacacccggactcagggaaaggcagacgccctcatgagcggcagctcccccacacctggcaccttgggaatcctcagcccagcacccctgcctgctccacacggccactcagtaacttcctgaagggcagtgagagggaggctgccggctccgggcagtggagctatgtgggtggcagctgggtgccccggcagtcctggcccctcacccagcgtactgcctgatgcgcacgggagctggctgcagtccccggtctctatttgtggagctcagacccgggctgctgaaatgtgcagctgcccgttccctccccacccacagcggaggcccctgctgaggccacagcaggagggggagccactccagccccgtgggtgggaccctggcttctaggaactcgtgtcctcgaggaaggtgaactccgctttgtgtgcagggaaaggtggagcccgagagtggccgtggaaggggcttcggggctgcgatctgtggacccgggcaggcgctggctgtgtggggaggggtggaggcggcaggacacaggcagcttcctgggacgaagagcgcccagatctgcagctgccggccccacgtggcaactgagcttttttttgagatgaggtctcgctgtgttgcccaggctggtcttgacttcccaggctcaagcgatcctcccgcctcggcctcccaaaagtgctgggatttacaggcgtgtgccactgcacgtggcctgagcttttgtttttttgttttgttttgttttttgaaatggagtctcactctgtcaccaggctggagtggcgcgatctcagctcactgtgacctcctcctgctggattcaagcaatcctcctgcctcagcctcctcagtagctgaggctacaggtgcccgccaccacacctggctagttttttgtatttttagtagagatggggtttcaccatgttggccaggctggtcttgaactcctgaccttgtgatctgcccgcctcagcctcccaaagtgctgggattacaggcgtgagccaccgtgcccaaacaacctgaacttttgaaatggggcatgtgcggctgaggaattgagttttacattgtctacaactatagctgatttcagtggacacagatacatggtgaacggccgctgtatcggatggcacaggccgagagggttagggtctcctcctcggccctctgggcggcccccctgaagcctgggcctggtggtacctgcattctggccacctccaggtccaccctccggctgctgtcctcttggttcttctgcagggcgccgcaggccacctccc

SEQ ID NO: 27530 - DNA, 1552 bp, Artificial sequence
  DNA replication origin
cgtccaacagcctgggactttcgggaccctggggtcggggcaccgtgtggagtgagaaaggcgtgaaagacagcggctgcggccacccagggcaccagccacatcctcttcctcgtccccgcccctcagcctccctcctctggctcctggctggtgggtctgggggcaaggcagaggcgctccaggtggaggggggcgggccggggtgcccacgctggggtgacgcaagaagaaaactcccgggcctcagagtcggcgccggaaacctaggtctgggtttccctcgtggtggttgtgtactgaggacctggaagtgatcatattttggatatattcggttaaataaaatcagcggttaggattcacatcgctgcttcttgccttttaatggggctgctgagcaagatgggttcccgtggagcccggctgtgcccctcaccccgatggcgctgcccaggcctcgggctccgctcggacgtgggcctggctgtgtccggggtgtcctggggctctcggcctccctgctcccagcgtccctcccggcgtgcccaggcctcgtcagggcctccttcccctccctcggcagctgaagaagtcccctttgccagaggacacgtgtctgcgccctctcgggagtggggcccctcagatccatccagaagcaggcagttggggggccctgcgggagtgggagagctgagggctagagttccattggcagttgggctgtgaagccgtgaggttctggggagagaaggaaggttctggaacggccccgctgccccacacctgcctccctggggaccctgagaaggcagccagacgagggcagcagctcgtccctcaaggcccagagctctcacgggacttcctctggctcctgacccccctggcctgtgcccagctctgggcaacctcagaggccccaaggcccaagctacagccgagggcagggtggccggtgcagcccagcagccatgtcaggtgaccagagcggaggagcggggcccagggaggggcttgccacaggtgtgagggtggggaccgctctgcttctgaccccgggctccctccagctcgcttgttcctgccgcccagtgctgtgtgtcttcaggcagggccctggacttgtctgagccaagcccgtctggatcctgtgtgacccaaggagacgcgttgagctctgggtggtgggcgagggtcctgcgggggtttggggccttgttcccgtaagctccagtgggggccgggccccaaggggcaagctcccaagatgcctccttgtagagttggctgacagtggaccctcaggggcatcggccccttcccagctgagagccgtcaccctggaagacctggggctcctcctggcaggaggcctggccagccccgagcccttgagcctggaggagctctcggagaggtatgagtccagccatccgacatccacggcctctgtccccgagcaggacaccgccaagcactggaaccagctggagcagtggtgagccctgcagggggtgctggcgggggaggaccacgtcgccgccgc

SEQ ID NO: 27531 - DNA, 1138 bp, Artificial sequence
  DNA replication origin
gtacacaggcccagaggactggggtgactcacgggccctgtgctgtgatgttgagagctgagaaaaacctccaaggccctgagccccatgcccagccctgccttggtcccccaacccccagagcttggagtctgggccccacacccagccctgccttggtccctgagcctcagagcgtggaattgctgccctgtggacactggctgggaaggcaggtcttcccctagcacatggggaccccggcctcgagggtgacctccctaccccgcccctgccagccaccaagcgcaggtgcagcgggggccagactcctgccggcctcagaggacacctggcccagcacaggcagctagaagggccggtgggcaccggggccgggaagcccccacctcaccacctgagggcccctgggaggctcctctggcctggctgggctgggtctggggccgccacaggcccctcacggggcggcagaggcaacttcagtgtccctgttagagcaacacgggtccctccgtggggggctgggtgcggccccctgccgtgtatttcctccccagggagtggggcctccccgggagctgacgccaccaccctgcttagccctcacagggccccaaggtgtccgagtgtgttgggtctgaacgcgaaataaagaaatcctctcagcccgcctttgccagcgtcgtccctcccaccccacccagaccacgtccaacagcctgggactttcgggaccctggggtcggggcaccgtgtggagtgagaaaggcgtgaaagacagcggctgcggccacccagggcaccagccacatcctcttcctcgtccccgcccctcagcctccctcctctggctcctggctggtgggtctgggggcaaggcagaggcgctccaggtggaggggggcgggccggggtgcccacgctggggtgacgcaagaagaaaactcccgggcctcagagtcggcgccggaaacctaggtctgggtttccctcgtggtggttgtgtactgaggacctggaagtgatcatattttggatatattcggttaaataaaatcagcggttaggattcacatcgctgcttcttgccttttaatggggctgctgagcaagatgggttcccgtggagcccggc

SEQ ID NO: 27532 - DNA, 958 bp, Artificial sequence
  DNA replication origin
ccgctgtctttcacgcctttctcactccacacggtgccccgaccccagggtcccgaaagtcccaggctgttggacgtggtctgggtggggtgggagggacgacgctggcaaaggcgggctgagaggatttctttatttcgcgttcagacccaacacactcggacaccttggggccctgtgagggctaagcagggtggtggcgtcagctcccggggaggccccactccctggggaggaaatacacggcagggggccgcacccagccccccacggagggacccgtgttgctctaacagggacactgaagttgcctctgccgccccgtgaggggcctgtggcggccccagacccagcccagccaggccagaggagcctcccaggggccctcaggtggtgaggtgggggcttcccggccccggtgcccaccggcccttctagctgcctgtgctgggccaggtgtcctctgaggccggcaggagtctggcccccgctgcacctgcgcttggtggctggcaggggcggggtagggaggtcaccctcgaggccggggtccccatgtgctaggggaagacctgccttcccagccagtgtccacagggcagcaattccacgctctgaggctcagggaccaaggcagggctgggtgtggggcccagactccaagctctgggggttgggggaccaaggcagggctgggcatggggctcagggccttggaggtttttctcagctctcaacatcacagcacagggcccgtgagtcaccccagtcctctgggcctgtgtacccaagccggatgcaggccggggagtgcacgtggggctcctctgtggcgccagtgtgaagctgctctccggggcggtcgcagcctccaaaccctggtgctacgagtccgtgcctcaggcccagggaccacaggccgtctgctcatggctgaaaatgaggccaagcagctccc

SEQ ID NO: 27533 - DNA, 981 bp, Artificial sequence
  DNA replication origin
ggccggggtccccatgtgctaggggaagacctgccttcccagccagtgtccacagggcagcaattccacgctctgaggctcagggaccaaggcagggctgggtgtggggcccagactccaagctctgggggttgggggaccaaggcagggctgggcatggggctcagggccttggaggtttttctcagctctcaacatcacagcacagggcccgtgagtcaccccagtcctctgggcctgtgtacccaagccggatgcaggccggggagtgcacgtggggctcctctgtggcgccagtgtgaagctgctctccggggcggtcgcagcctccaaaccctggtgctacgagtccgtgcctcaggcccagggaccacaggccgtctgctcatggctgaaaatgaggccaagcagctcccaagtctcgaagactccactggtgtggaggcagaggggcccttccagggcagggcagccctcggggcagcagcaggggcaagggctctgtctcacgcacacgggcacaggcacgcaggtgccggccctgccgctggctcccaagaggccgatagcccggtagggaggtcacacacacacagctgatccctggaggtaaagaaacctagacgaggagagtggaggctgggcctgcgcaaggaggcgccaaggggggagaccactgcccacaacagggtcagtcccgcgagagggtcagttccgcgcctgccgcctgcccgcccagctgcagggtgctcgccattgccactgctggggagcatggtttgggccgagaaaccagtgactccgggaggaaatgcagaagggccggggtgccagcgccagtgcccattatgggcagggctgggcctcacgtctgggccagcgagagctcctccaagcctctctttcccaggcggtacctggcgaggtccttcctggtcaccaacccgacaacctgcaggacaagtccaggccacagtgaca

SEQ ID NO: 27534 - DNA, 1257 bp, Artificial sequence
  DNA replication origin
ggggccgtgactttgtcaggaggccctgacaggacacacagctcggccactgctgtgtgtcttttagacgtggacactgggtgtttggaggttggtttttattgggacccagtggggctgcatctgccctgcagcaaagccaccatccctgggcccttggctctctgctgtgcgcggtcaggccccgctaccctgtcgccgatccttgggtcccgtggcattgtgcgtgtgggatgccatggcgaggctggtgtgagcaggtagccaccgacacggggcccatgcccagatgggaaatctggccggaacagggtcagagcggggcccgacacagcattccagcgcagcctcccaccctcgggcccgtggccctgaccgcgggcctgtcttgcagcctgcccggctccagggcctgatcctgcgctcccagctcatcgttctcctaaagcacaaggtgcgtgccaggctccgggccattgggcgggtgggggccccgggggtgctgcctgggtgcctgacacagggctctgccgcccgcaggtgtttgtggagcggtccaacctgggcctggtacagcggcgcctgaggctgaaggacttccgagacgcctacccgcgcttcccacccatccagtccatccacgtgtcccaggacgagcgggagtgcaccatggacctctccgagttcatgaacccctccccctacacggtgccccaggcatgtgcagggcatgggcatgggcgtggggcctgggactgaacagcagggggtggggtccagagcctcggggaggggcagccggggggggccacagcggagaggactcggtgactctgtctcctgtgaagggcctggcaggctttagagctgaagtcaaggggctgagggggctggccagacgggcgtgggggctcaggacgtgcctggacgccgtggtggggggtgcagggagccagcttgggtgagggtcccgcctgcctctgctgtgtgggcgggcactgacagctgtgcccctgctgcaggaggcgtcgctcccacgggtgttcaagctgttccgggccctgggcctgcggcacctggtggtggtggacaaccgcaatcaggtgagcgggggcggtgggggtgcaggcatgccgtgcagggctcccctctgcctcctgcccgtgcttactctcagctcccggcaggggacacggaagcacaggacccagcaccgagtcggcccatgccccatggctgcacccctccccagccccg

SEQ ID NO: 27535 - DNA, 1290 bp, Artificial sequence
  DNA replication origin
gctggtgctcatgaccgccaagatcgtgggcgacgtcttcattgaggtgcgccagggcctcgaagcctcaccctgagagcgtgggtgctgccataggggaggggcccctgtgagcctccaaacagccggtcccggggggtaggctcagggtttctgggggcggcctctgggctcccaggggtaggctcggggctccaggggtgggtgtggactcctcaagccctgtgttcccgccccgcccgcagggcctgtacgacatgcacattcagctgcagagtgtgcccttcctgcactgggaggccccggtcacctcacactcactcactgccaggtacagcgcccaggacacctgtgggtggggagggtgtccagcggcctcttgttgcacaggggcagggtgcacggcttgcgggctccaggcagccccgcgtttcctgtccagcggcttcacacctcaccagcccgcagaggtaactgtgggagttggtggcgtgtgacgggcatgtgtggccgggctcctccggcagggaggtgatgagcacaccagtgacctgcctgaggcggcgtgagaaggtcggcgtcattgtggacgtgctgagcgacacggcgtccaatcacaacggcttccccgtggtggagcatgccgatgacacccaggtaccgggcaccccatagacagggtcctgcctatgtgacctctgtcgagtccattggtgggaagcacacggcaaggtttgcaggatggggaagctgcacgtttgggtgcactggcagttccaggagtgccggaagctgagtgtgcagccatggagggctgtgtggacgctgaggctggtggggggggctgcggcctggcagggtcttggggttggcacccaggctgggctgagagccgtggcactgggggccgtgactttgtcaggaggccctgacaggacacacagctcggccactgctgtgtgtcttttagacgtggacactgggtgtttggaggttggtttttattgggacccagtggggctgcatctgccctgcagcaaagccaccatccctgggcccttggctctctgctgtgcgcggtcaggccccgctaccctgtcgccgatccttgggtcccgtggcattgtgcgtgtgggatgccatggcgaggctggtgtgagcaggtagccaccgacacggggcccatgcccagatgggaaatctggccggaacagggtcagagcggggcccgacacagcattccagcgcagcctcccaccctcgggcccgtggccctgaccgcgggcctgt

SEQ ID NO: 27536 - DNA, 1120 bp, Artificial sequence
  DNA replication origin
ccatgggcgtggtgggtaagggcttctcccagcaccgcagggacggcctgcgggcctggctcagctgtgacgtggccatagagacgaggactggaggctgtggctccctggagcctgccctcatcccagggccacccgggggcctccagattcttccatgggcagtacacgtggggagtggggagcccaaagcttcgcttctgtggcttcccgttgtttatctctgttggcaaaaaccacagggctgcagggatggatgggatttcctgtaagagatagaattgctcccaccagtatttattgctctgctggacacctttgccctggaaggaaggcagagcctttgagaaacagctcccccagccctcagggtgtgatgatgtggaggaagcatcttaccaggaccccctagccccctgccgtccccttccctctgcaaaccctccagcttctcctgccatctgggagccggcgggcggaggcccgcacttttcctccggtgtcgctgactggcctttcccctgttcgcaggcggtgtgcttggagcagtgttcaatgccttgaactactggctgaccatgtttcgaatcaggtgaggagaaaccgcattgcatatcgcgttggcaggcgtggccacacaggccctttgaaagcggacgtggtggaatggggtttacactcctaggccacagccgaaagaaaggctgtgtatgcagcgtccttcctgatggtttccccggtggagctggtcagagatgtgtcccggggcctggagggtgacggactagcccaaggctaggagtgcgagggctcctggaggacggcccctgggtaggaagtgaggccctgcgtgggatcgggcctgggcgaggcatgcccaaccttcaccgcctggctctgcctggtagcaaccgcagctgtcctgggacaccggggccccccggcttcttccttcttggtctgtgctgatttcaatactgtcgggtacagccggggcacgggtagcgccacttcccacacatctggagaagttgctgccgaggagtctttaccccagggaagaggacgaccccaggacatttgggtgcctgattgatgattaaacacaggcctggccggg

SEQ ID NO: 27537 - DNA, 1322 bp, Artificial sequence
  DNA replication origin
cagcacacacgtcagggccccagggaaggggagagcagcgcacacgtcggggccccagggaaggggagctcagcacacacgtcggggcatcagggaaggggagagcagcacacgcgtcggggcctcagggaaggggagagcagcacacatgtcggggcctcagggaaggggagctcagcacacacttcggggccccagggaaggggagagcagcacacatgtcggggcctcagggaaggggagctcagcacacacttcggggccccagggaaggggagctcagcacacacttcggggccccagggaaggggagagcggcacacacgtcggggcctcagggaaggggagctcagcacacatgtcggggcctcagggaaggggagctcagcacacacttcggggccccagggaaggggagctcagcacacacttcggggccccagggaaggggagagcggcacacacgtcggggcctcagggaaggggagctcagcacacacgtcggggccccagggaaggggagctcagcacacatgtcggggcctcagggaaggggagagcagcacacacgtcggggcctcagggaaggggagagcagcacacacttcggggccccagggaaggggagctcagcacacacgtcggggcctcagggaagggaagagcagcacacacgttggggccccagggaagggtctcatgtcgttggggtagctgctctcactcttcccagcccagacacagatcaaggacgtggtggaggcggaggtggagatggaaggaggggagggcagagtgaggagatggaaggaggggcggagtggggtgagggtgcccaggcctgtgctggtaggtcaggagcagcaccccagggctctgggggtgaagaggccctggtgtgtctgctcctcctgaggttgtgagtctggaccacgtgattctaaaagtgcccgggttgtcagccaatgtgatggtgggggtgggtgagctgcaggggttcccgcccattcaccaagacccccaatccttcatggggtccgccatagctgcggcatcctgccacccacctctatgaaagccacaatcacagagcccacgagcacgaaggcggcgttcagcgtggcccacagcaacagggagaaggacagtccgcccttctctgtgaacttgtcgatatctggggctcatcaaggagggctggctgcttccccgtcatgaccacccagcccagacctcagccctgccccacagaccagcctggcagatgccaccctgctgggtggagccatgatgttcactggacatcccagagacgtctcacg

SEQ ID NO: 27538 - DNA, 908 bp, Artificial sequence
  DNA replication origin
ggattatgaagggcccagtgtgcacggtgcgctgagtcccacaaaggacagtttctggccaacatctgaggcgcacccggggcccgagggtgactcggggaggtgggtgaattcccaacaacttcacagccagcggttgttatgctgggcaccgcatctggcggccgtaagagcagccttcttggttacggtgaccgtgaccctcccactgtctctagaaaccagacgaaccacaggcctcagaggcggagtcagaggaggagggaggaggtgcgtcacctcaccccggcagaagagcagccccaggcccggccggcaccaggccccgcaccgtggggccctgcagggagcggcgtccagctcaccgtgtgattgatccgccgctcctcctccaggaacagctggttctcactgttgtcatagtccaagctctgcaggccgggacagcaagggcagcactcagcaccgaacccacgctctgggtgcgggcacaggggaccgggagtgggctggcagggggcagaggccgggtctcagggtcagggggacagaaggacgcccacctcatacttgagggacaggagcttctcgttgtgtgggatctccttggggaagggatgtggagggtccatatcctgtggcagaaaaaggcaaagagagaagcacagttgacaaggccacaaggagagaggcccctctcagctcacacacgaggccattatcatcccgacaccaaggacaaggacacagcaagagaactgcacatggggcgcggtggctgacacctacaatcccagcactttgggaggccgaggcaagtggaccagctgcggtcaggagttcgagaccagcctggacaacaagatgaaaccctgtcgctactaaaaatacaaaaattagctgggcgt

SEQ ID NO: 27539 - DNA, 1249 bp, Artificial sequence
  DNA replication origin
cccgctgccctgcccctgccctgagctggggcggccgcaaagccttaggtggctgagaccccacccagctctgcctgacagctgggcgtcctgtggggagggcagcgtgaacactgtggagccgtttgtgtctcaagacccagagaggctgcagtggaggtgactctgtggaggtggcaggtggctgagcagggcctcgggagcagggttgggcaggatggcccagggtgctgtggcgggcactgcattgggggcggcgtgttgtccagcccttctttcctggtgggtggcaggtgcctcgctttcagtctagagcagggagcttgcgccctggactcgggctggacgtgtcgctgacaggccgaggggcagccggatcagttctgcttccagggcccagggaggcccgtcccagccctgctgcccccacccagcaggcaggcctggcctagcccattcctgagctcccgggcagggtcaggcgaggccagggtgcggcggcgggagtgagaatccacggagcagagcgtgcgacgcctgagcgccctcatgatttctcttctgcttttagtcaccacgttctgcgcttttccgagtcggacatatgagcagcgtggagctggatgatgaacttttggacccggtgagttgggggtgttccccgtcctcccgcagagctagctgcatcttagcagagggtgacagggatgggcacgggccgagcggcagggagatagtggggccccagggccggggttcagggaagatttccttggggggacatggtccctgacgccaagtgagcagaggcagctgggcagaagtgctctcagacggaggagtgcagggcgcaggaagccggtcaggacagcagtgacagcatgggcagcgagggggctggacctggctttgggacagggcaaggacagggatcttgggggggcagtgaggagccccaggagagtgagagggggccggatgcctctgacttcagagggcaggggtttagatgttcccgtgccagtggctgccctgggagtcctgagctcagcggcagcgtgctcgtcttccttcccctcgggggcatctcccgccggcctcggtttttcccccagccgctggtgaggccgggagtcctctgctgccgctggccgttcactcatcgtctctgggtagatgtctgtgcgggactcctgttgagatgatcctgatgttggcaacaccccgggcgtcctccttctccccatca

SEQ ID NO: 27540 - DNA, 1391 bp, Artificial sequence
  DNA replication origin
ggcgcgggtcacgagaacaaacacgggggcagccggcgcttcccggccggtgtcgctccgcggcgggccatggccaacgtctctaagaaggtgtcctggtccggccgggaccgggacgacgaggaggcggcgccgctgctgcggaggacggcgcggcccggcggggggacgccgctgctgaacggggctgggcctggggctgcgcgccaggtgaggccgggcagggcgcaggcggggaaactgagccctcgtgcgccccgcagcccgcgccctcgtgagccttctggcggcgccgcgtgtctcggtcctggaggcgaccgaggcgcggtggactcgggaacgcgccccggggctcctcggcggggccgggctggcgggggcgcctggggtctggagtcttcggaggccgcgccgggctcggtggccgggagggctgcgtgggcgaggcggagctcgccagaccccgcggaatgtggggcgctgaggggcgccggggcagccgtggcgcacgttcattccctccggtgtcccccagactggccctaaaggggtgcaagtggctttctgttcaggtgacttttaaaaattgtcatcctacacgagcaactaattttgtttgcgtttttgaccccctgggagatggaaacagttaagattgcagccgggtcactgtctttcagtgagaatgactgagcgcctttatctgccatctttctgtgtggggatcagtcccgactttcaggtgatcttgggagtgacgagtatttgtactcagtctcccttcgcaccgagttgaatttgcaatgtgcaggcaaacacaataagcagcaagtcagaggttggaatgcgttccgcatgtcaccctgcagcgtgcgtctgagcagtgttaaggtctggagaaccgttgcgggtacatttgtttccctgtctgtgtattgtcttaatatttttttttttttgagacggagtttcactgtagttgcccaggctggagtgcaatggcgcgatctcggctcactgcaacccccacctcccgagtttaagtgactctcctgcctcagcctcctgagtagctggaattacaggcgtgcgccaccgcgcccggctaattttgtatttttagtagagacggggttcctccgtgttggtcaggctggcctcgaactcccgacctcacgtgatcccccgcacctcagcctcccaaagtgctgggattacaggcgtgagccactgcgcctggccgtattgtgttacttttgagttaatggaccgttttgttgatgggtcttaatctgctttgcagttattctttacattttctcttgtctagtcctttaaacacttgtcttgtgcttaaagattaggaaggacggcagggcacggtggctcac

SEQ ID NO: 27541 - DNA, 1357 bp, Artificial sequence
  DNA replication origin
tgcctgtaatctcagctactcgggaggctgaggcagaagaatcatttgaacccaggaggcggaggttgcagtgatccaagatagcgccattgcactacagcttgggtgacaagagtgaaactccgtctcaaaaaaaaaaaaaaaaaagaaggaaaaagaaaaaagaaatgccaaccatggccgggcatggtggctcatacgaagagtcctagcaactcaggaggctgaggaaggaggatcccttgaacccaagaggtcaaggctgcagtgagctatgatcttgtcattgtacttcagcctgggtgacaaagtgagactgtgtctcaaaaataaaaaaataataataataatttaaaaaaaggccgggcaccgtgactcacgcctgtaatctcagcactttgggaggccgaggcgggtggatcacgaggtcaggagatcgagaccatcctggctaacacagtgaaaccccatctgtactaaaaatacaaaaaattagccggccatggtgacgggcgcctgtagtcccggctactcgggaggctgaggcatgaacccgggaggcagtgagccgagattgggccactgcactccaacctgggcgacagagtgagactccgtctcaataataaaaatatcgaccttttaaaaggaagaggatgaggcacaaaatataaagagtttactctagaggctaacgtggaaggatcacttgaggtcagaagtttgagaacagcctgggcaacacactgtgagctccacagcaaaaattagccgggtgtggtggtgcaggcctgtggtccctgttactccagaggctgaggcgggaggatggcttgagtccaggaggtcaaggctgcactgagctgtgaccgcaccaccgcactccagcctgggcgacagaaggagaccctgtctcaaaataaataaataaatgacccagaaggtggggacagggtgggggctgatgtaaagctgtcaagaattctctttggtttatggaaataccattgattagtgatgggctgtgccctggtgcgggtacagggtccgggcggctatttggctaattcacagctatctgcgtagtagccggcagtttccagaggcgaccctcctgtactgtctctggggcctgatcgttgaagaggactcgccttctgttcttttctcattaggcgggaggaccctctggggctgcctggaggaagcctccactccgaccctcgcccgagtgcctactgcgagggcggatgcatgcttcgggacttctaatttcatccttcacgtctttagccgccgcctatggcaaggaaaggcctgccctcgcccctgcctccctcctcccttccccaccgcg

SEQ ID NO: 27542 - DNA, 1466 bp, Artificial sequence
  DNA replication origin
ttacagttccggagattccaggaggtgacctggacacacctgcagaacatcgccagcaactacaacgtgtcctacaacgttgacgtccggttccggagcctggcggaagagagccaggctgtggctcaggcagtcaaccggtcacaggcctcggtgcagggggagctggcgcagctcaaggcctgggtgaggaagctgcagcgccgaggccggaaagtagacacgcggctgcgggccttggacctcaccctgggcgagaggagccagcagcgggcccgggaaaggaaggcacacaaggcccagagggacgccctgcaggactcactggcacgcctggagggcctcgtccacagccagggcgccaggctggctgctctggaggggcggctgcccgtggcccaccctggcactgcagccctcgggccggccctggtcccaaccccaacccagcctgaggagctgggcccgacctccctgaagcttcagagggacaggcaggagctccgagctgcctctgagcacaggggccccccacaggactcctcggcccctctccaagggaggcgggagcctccagcctcaggcagccatcgggtactcagtgggactgccccaaaagaccctcggcagcaggcatggtccccccaggtgccaggagagagtaagtaccacaggctcccagctcacggccaggcttccctccagctcctccttagaccaggccccctggaaaaggcttctcaaaagaggttcagttaggggccgggagatggggagagggtctcggatcatcggggggggtggcccaccgtcatcacagaggctttctaaggggaggcaggaggaacacagtcagaggagggcgtgagggcagaagcagaggtggcgggatgcacagacgaggaggccccacgccgaagggtgcaggcgcctctggaagctggaaagggcgggagatggtttctcctggagcctccagaggaaccagccctgtccacacctgatttgagccctgggagaccgtgttggccttgtgaccgccagaaatgtgaaacactaaacctgcgctgttgtgagtcatgaaatttgcagagactccctggcagtgaggggcgctggctcagctgggtgggccgacagctagggctcctagcaggaccccgccactcccgagtacggccctcatgttcagtcttcccgcctgtggaactggggtgatcccatcaagagagtgaaggagacgctgcaggggagccatcggcagggccagcgcagagtcagtgctccgtgaagggtggcagccgggagtgggaggccaggcacccacagcacgtgtgcttctggatgcttctgctcggcctcctgcaaggggttgaccctccctcctctgtttctagtttgcggcgtgggccccaccctcgttttcccaaacgcctccaccaggaacgtggtcttcctcagccctg

SEQ ID NO: 27543 - DNA, 1260 bp, Artificial sequence
  DNA replication origin
aacacgggttcggggctagaggagccgcacgcggacccgcccccgatccaggcccggaccccgacctgtacccggaccccgaccggactcctacccgacctggacccgacccaaccagacctggagcccaacccgacccaaccggacccccgatccccgatccccgacccccaacccgacctggacccggctcccgggtgactgcagcgcgctcaggcgccgcgcgccaccgattcgctgcagccgattccccacggccgccgcggccccggacgaaacgcgatcgcggcccagccggttggccccgagcacgagttcctgggtccgggcgaggctcccgcgggttttcttgagcctctggggcgggtctccgcgggcctctcagcgcgaatctgcggaggacgccaggcgggagggcgcatctgcgcctgcgctgcgcggggacggggcggagcctggacgcgggagcggggggcggtggggtgggcggggcctgacgcgtgagtggggcggggcctgagggcagggccgcgcttccccacgtggctgcgagctgggttcgctgcgcccgggtggtgggttctcgccttagtttctcccatctcggtcgtccctaccctggagtgatgtcagccgtctcttccctccgcctcgggtcccacattctctccagaacgccgagcgttcgctctaaggcagatgtttaccaagacaggcctggctcgtcttccccggatgtaaggctctgctttcaagggtcagaggccagtaagggaaacgcacggtacacaaggaagtaaaagagcagttgagatcatgtcagatctgaacaattgcagctccgtaaatgaggccgggtcgtggaataaaaactgcgaccagtagggtaagcgctagacgcatgtggctctgtaaattaactgaagttaaataagtccagttcccttgcagcactagccccatctcaagggctcggtactacctttggctgtggccgccaggctggacagccggacactgaacatttacaacatgcagtgccttctgtacaccgcagcggagtgtggggggcttcatctttgtggagggggcaatccaggaagacacctaaagaggcgccatttcagcagtgatggatgtgggaaaagctggggaacagttatccattcaacaaacattgattaaatgcctgcttggtgcaccaagccttctgagcaacaaatgatgcaaagttcctgctcacctatcgggggaacagat

SEQ ID NO: 27544 - DNA, 1325 bp, Artificial sequence
  DNA replication origin
cccgaggcggagggaagagacggctgacatcactccagggtagggacgaccgagatgggagaaactaaggcgagaacccaccacccgggcgcagcgaacccagctcgcagccacgtggggaagcgcggccctgccctcaggccccgccccactcacgcgtcaggccccgcccaccccaccgccccccgctcccgcgtccaggctccgccccgtccccgcgcagcgcaggcgcagatgcgccctcccgcctggcgtcctccgcagattcgcgctgagaggcccgcggagacccgccccagaggctcaagaaaacccgcgggagcctcgcccggacccaggaactcgtgctcggggccaaccggctgggccgcgatcgcgtttcgtccggggccgcggcggccgtggggaatcggctgcagcgaatcggtggcgcgcggcgcctgagcgcgctgcagtcacccgggagccgggtccaggtcgggttgggggtcggggatcggggatcgggggtccggttgggtcgggttgggctccaggtctggttgggtcgggtccaggtcgggtaggagtccggtcggggtccgggtacaggtcggggtccgggcctggatcgggggcgggtccgcgtgcggctcctctagccccgaacccgtgttccccgtaagctgttggtttctaaggggcggaggaatggcgactggagccacctctcaccgctcagggagccgggagggccggcagctcccgcgggccgagtttcccgccttgggtgcgaggacgcgtggggccgcgctgtgcccggggaacactcaccagcatctctagcctccacctccctctcgcgccagtggcactcccggttgagacaactgagaatgttccctgggcacagtggcccgggttgagaagccctgcagtggctggtagcgttggggtccgagcggaggagcgaactctgggtggaaaccggcaggcactggaggggaaggaggcgggacagggttgggtgggaccagggttgaggggtgtggggtctcggggcgctcaccgaggggcttcctgagcttgtgtggattatttccgtgccccaagctgagccctgtgtccatgtcacaggtcgtcttcccgtgacgcccagatctgtcctgcaggatggagccagcaccctcagaggttcgactcgccgtccgggaagccattcatgccctctcgtcttcggaggatggcggccacatcttctgcaccctggagtccctgaagcggtatctcggtgagatggagcctccagcgctcccgagggagaaggaggagtttgcctcggccca

SEQ ID NO: 27545 - DNA, 1296 bp, Artificial sequence
  DNA replication origin
cgttggggtccgagcggaggagcgaactctgggtggaaaccggcaggcactggaggggaaggaggcgggacagggttgggtgggaccagggttgaggggtgtggggtctcggggcgctcaccgaggggcttcctgagcttgtgtggattatttccgtgccccaagctgagccctgtgtccatgtcacaggtcgtcttcccgtgacgcccagatctgtcctgcaggatggagccagcaccctcagaggttcgactcgccgtccgggaagccattcatgccctctcgtcttcggaggatggcggccacatcttctgcaccctggagtccctgaagcggtatctcggtgagatggagcctccagcgctcccgagggagaaggaggagtttgcctcggcccacttctcgcctgtcctcagatgtcttgccagcaggctgagcccagcctggctggagctgctgccccatggccgcctggaggagctgtgggccagcttcttcctggagggcccggcggaccaagccttcctggtgttgatggagaccatcgagggtgctgcggggtgagtgggctgggcccatcctggggttgccggtagcctcagaagtgatgagagtggcttgaaggactggaccaagagcctctctagtccctgtgaggggctagagagagagcctgctcctggctgaacccctgaacagaagaagcggtctgtgtctgtctcctttgcgacgggaggcacctgctgtgtctcacaaagtcccccacttgctccccgtccggctgtgtcagagagggatggggtgggagtgttcacatcccaggcggcagaggcagcccgtcagctggggacgttccaggttttccagggaagcacagctgtcatcactgacacgtgtcccatgtggactcccagccccagccggctcccaggctcagcctcagatcacactgcagtccttgccgggacactgcatcttgagaagctgggttttcagaggttgctgtgatcaaagcaagcactgagttatccgcgtcagcagcaggggaggggtgtccagtgagactccaggttggggaagccgctcagggccccgagagctctcacacagtaatcgcagttatttaggaatggattaacagattttcccatccggcttgtggttttggacttcacgctggttatgttgttggggctgcccgtgtaatccgggctgctggttccttgtggcaggaagggggccccgaggatgggggttggcggctctgcccaacacgcccgtatcttcagccccagc

SEQ ID NO: 27546 - DNA, 1392 bp, Artificial sequence
  DNA replication origin
tggacggcccaaggtacaggcgcctttacggtgtgggctgttcacagcatcgatgctatttcataagagaaagggaccctctgatacagaggtcaccatcagcacgtgcgggaactgagagggcaccacccacaccctgtggcacctacatgggggtgccagctgcagcacggcgcccaggagaagtagcgtgaaggaatggcagcctctgggggtccagaccccagaagccagtgcagctggaggacagcctggctgcttaccccagtgcggcctccaccagcccggtcagcacagcctccatggcccggtccggcacttgctccaccaggcgccagcagacgcgctggtgcaggtagctgccctgggtgagcgctgccagccggggtaccagcacgcccaggatctcctctgaggggacagacggaggacctgagcctggggagctgcacccacctggtgtctggggctgtgtgggtccagcaaggacagtcccacagctccccagtaagcacagctgagccccagatcccacgggcccaggacaggaccgggcaaggggaccctgcagagggccagggtcaggagggattctcggccttctgcagaaggctgatgggctgtgagggtcggggcaggatgggcaggaaggcactgctctactcacgctgcctcccgtggacacaggctttcccaaggacctgagacacgaaggacacggaggaatccaggccacctgggacagaaagggaggcctgatgaggaagccggcgggaaggcacaaaagaacatctaggtgtggggagagctgctctcggtcaggcggactccaaccgacagcaaaactcactcaaaacaacggctggtgcccatcagcctacccagcaaatctgaacaggagtgcgtggaacctgacaagcaaatcacaatcctttcaaaccttcacccatcttagcccacttaatcgtcacgatggtgtaggaggtcgggaccggtatgatgttgccgaggaaggagagaaagcatcgatagggcccggccaagttgggtcagccacgcagggtaggcctgggccctgagccgggcatgagaccctggagcagcaccaccaccacggccgcccacagggaaggagcgcactccagggaacgtggggaaccgggaggggccgggctgtaccagccccacagaagagctgggacgcggggcagcggaaagcacagagccgcgtggggaccaggacggccccagccaaccccgaacacgtgaaaaagccgcattccacatgtgtccgagatgttcccaaagcctccttaatacatgggcccatgcacagcagcagctgcaagcctagggctacgttcggaaaagacaggaggggctcaggaggtt

SEQ ID NO: 27547 - DNA, 1503 bp, Artificial sequence
  DNA replication origin
ctcactgcagcctcgacctcctgggctccagcgatcttcccacctcagcctcctgagtagcgggaacacaggtgcgcgctatcatacccagctaatttttaaattttttgtagcgacggggctcactttgttgcccggctggtctcaaactcctggccttaagtgatcctcctgccttggcctcccaaatgtttttttaaccgttatttctttgtgtggaattttaagtgataagtgagggagaaatccagccatatctgtttccacactggctggatagacttgtggggctctttctggagacccataacctctcaccgggaggactctttcagtctggaccaggggcctacaggctacttggacaaaatttggcccgctgcatgtttttgtaaataaaatttttttggcactgtcaaaggaggccttcgagggtggacccgcctccgcccgggctgaggtgcagggaaggaggctgtcgggggtggacccgcctccgcccgggctgcggtgcacgcgctctctgggttgtggcatttatgccccagagaagggaggatgaaggcccagctcaggcagtcggaggatggaaccagaggctcgtggctaggaattggcaggccgggagtcaggccgccgtctgtgggcatcggagttcacgctctcgctcctccctgtctccaggccggcttgcagctctggcccctgactctgtcttgcaggcctgaggtcctttcgagactgctggggaacctggtggtgaagaacaagaaggcccagtttgtgatgacccagaagcttctgttcttacagtcccggctcacggtgaggacgccacggagggtgcaggctgctggctgccccatcacagcaagaatggctgcaaaacatggggtcggagcggtgtctgctgcctgggagaccctgcctgtgatttggcagtggctggcaggagttggcgaggcggtgggtgcctccctgccctgatgacaggccctgctgtgacggctctgagtgagggcttctcatgtgtcaatcttctagactcccgagaagccacccgccctagctgcgttctgtgccaggggcctgagggggtggggtggggtgggtgggggataggtgaggacacagaggaggtcgtgcatttccgggacttatgactcccgtccccatggcctggagcccggagggggtgagccaggtcccctgagcccagagtgggtgagccgggtcccctgactcccggccacatcttgcttcaccctcctcctttgctcacacgagaacttaagatggcgaggccctgccccagcacggcagcagctgcatcctacgtttttatatggaaccgttttatcacgttcagttcaaaggaatagaggcgggtgggtcgcttgagcccagggggcagcttctgcgggaggggaggggtcccgcattccaggaggcagtggccgcccccatgcttgtccgtctgctgccctcagtctggtcccagtc

SEQ ID NO: 27548 - DNA, 1006 bp, Artificial sequence
  DNA replication origin
tggctgtgggcctggcggggacagactggccccgagccccacacagtcgtgggccatgccacctgcaggtgctgaaggagctgttggagacgtggggcagcagcagtgccatccgccacactcccctgccgcagcagcgccacgtcagcaaggctgtcctcatctgcctggcgcaactcggggagccggaactgcgggacagccgggatggtgagcgggtggtttgggctccccccggcctcgggcgccccgaggtgctcagggggcctgtccggtgcttgcagaactgctggccagcatgatggcgggcgtgaagtgccgcctggacagtagcctgccccccgtgcgacgcctgggcatgatcgtggcagaggtcgttagtgcccggatccaccccgaggggcctcccctgaaattccaggtgagcgggccgtcccctccgcgtccccgtgtggctggcccgggtctcccgagcggctgcctctccagccccagggtcaccgcctcttcccggggtccagacttgcggagcgtccgtgtggacttctcgcagggctgaggctggaagctgtggcaggttctcagccctgagctcctggggccacacagggtcgggtgagcacagggcccccagaaggattgcctggacacgttcacagactctctctagacgggggcccgagggaggctggggttaagggggccaccccctgcagtttgtccggccggggctgcagggcagccaggtcgctctgggtcggtggccgtgggtgtcagcctctctgctgccggctgcctggccatggaggagccctgtctgccttcaggctgtggaggtgacggcctgtcctcttatctgctgagaacctgggatctctctggggcattggccttgggggaggcccagctccttcgagaggggccacggcccctcagctttgagcactcccagtgctacccttggcctgaggtggaatcttagaaagtcgcttttaaaaagacacct

SEQ ID NO: 27549 - DNA, 1163 bp, Artificial sequence
  DNA replication origin
ccccctgcagtttgtccggccggggctgcagggcagccaggtcgctctgggtcggtggccgtgggtgtcagcctctctgctgccggctgcctggccatggaggagccctgtctgccttcaggctgtggaggtgacggcctgtcctcttatctgctgagaacctgggatctctctggggcattggccttgggggaggcccagctccttcgagaggggccacggcccctcagctttgagcactcccagtgctacccttggcctgaggtggaatcttagaaagtcgcttttaaaaagacacctggctatccagggcccagccactgagtgagaccgggctgcgagggaggccacagtggggagtggctcccgtggctccgtctcggggaggggcgctgcagcctggcggatgccgctgagcctgctcccctgctgtagtacgaagaggatgaactgagcctcgagctgctggccttggcctccccccagcctgcgggtgacggcgcctcggaggcggggtgagggtctctgccccccgggaccccaccgcgtgcacatcttactgctctggattccgctgccgggatgggaggggggaaaccctttctttctgtcctgtgagtcctgagaccagaggctcgaggggcccctaaaggatttttgttccttgtttccttaaagcacgtccctcgttccagccacggcagagccccctgcagagacccccgcagagatcgtggatggcggcgtcccccaagcacagctggcgggctctgactcggacctggacaggtaggggctctgccaccccagtgggcagcgtgcaggaggccgggaggcgaacccctcacactccaagctgcggccccgtggggggctccctgcctgctccgtgcttcttctctttcgtcctcatgtgagggcccgcagctcccagctccaccgtaggcgcaggggccgaggcgtgagctccgcatcttggggaggagagaggggctggctctgccgttgggcacttcctgtcacaggccatgggctgctcatgtctgctttgctctcccacagcgatgatgagtttgtcccctacgacatgtcgggggacagagagctgaagagcagcaaggctcctgcctacgtccgggactgcgtggaaggtgggcacgggc

SEQ ID NO: 27550 - DNA, 1146 bp, Artificial sequence
  DNA replication origin
aactacagcctccggcagcgcatggacatcctggatgtaagtgcctcctgggcctcagtccccctggtctggcccaagctgccctaaggtggggctgccaaaacctgggtctccttgttgctgggccccaagggctcgtgcaggcctgtccactgccttcgtgagtgtgtgacccggcaggactcagcagtgggggagtcagggctcccggggcagagagttttgtttgtttaaaataacagctttactgatataattcacacgccataaaattcaccgctttagggtaaaatgtgtgctgcgcaggtgagggaatattatttagcaatgaaaaagaaaaatttgaatcccagcactggaaggctgaggcgggaggatcgctggagcccaggagttcgagacccgcttgggcaccacaatgagactccatctttattagccaagtgtggtggtgggcgactgtggtcccagttactcgggaggctggggtgggaggatccctcgaacccaggaggtggaggccgcagtggagctgtttgcaccaccgcactcccgtgtgggtgagagagggagacactgtctcaaagataattcgactctgatacgcactgccacacgatgagccttgagaacatttagttaaagcagccccagggcctgtatatcgttcgatttcacttaagcgagccgtccggaggagctagttcacggagagcggacggggctgccggggcttggggaggggatgtggagtgagggtttcacggggacagtttcagcttgggaaggcaaaagagttctggcgagggcggaggtgatggttgcccatcatgaacgtacttattaatgccacggaactgtacacttaaagatggggaaaacgggctgggcgcggcggctcatgcctgtcatcccagtgctgtgggagaccaaagtgggaggattgctcaagcccaggagtttgagatcaacctggtcaacatagcaagaccctgtcatctccaccagaagaaaattagctgggagtggggcgcctgtggtccctgctactcttgaggctgaggcaggaggatggcttgagcccagaggttgaggctgtcgtgagccgtgatggcaccactgccctgcagcctgggcaatagagca

SEQ ID NO: 27551 - DNA, 1184 bp, Artificial sequence
  DNA replication origin
ccaaaaacatctccagacgcccctaaacatcctcaggtggagcaacaccacccctggcctagatgggctctgaggacagagcaccaccaggacacctgtcacttatcatgtccccaagcccagtctgggtctcctacagccaaaatccagttcctcggtgcaaaccatggaccctgcctttcaggaatcccggcaaaggcaccatccccagcgaatgtggccgcccctcgctgcagacagcgcctggaggtgtctgaccgcccttcccacccacccacggtccccatgcccgtgaggagctgaccaggcgccactaaccttggagagccgctgggtcttgcttctgatccgctcctccaccaccacccgccagtcagacgccacggcactgccaggctgagagacggctgcctctggcaggcacggggtgttgggacttggggagccaggttggggagtcctcccgaggcacccaggcctagacagctcctgggcagccagagtcagcacctggagggagacaggcccagggccgtcgccactgctccagggaagaacatttcccaagagtcaagtcagccaaagccccagaaacgggcccgggggcccgcccagcctgggagaaggtgtgttctgggaacaaggagaaaagtcacttccccgtagctcacagcaaccgcgccttggtaggcgggaaggtggggaaggtgggcaccgtgctccaggagatgagaacacgcccagggccgagcgcagcctcatcctaaagccacgcagtcccgccacgccagagccacatgcccttatcccaggaagtcggcctcacagcaaaagcaacgctgcagcggcacgtgccacgggcggggggacctcagaacattgcagagaaggcaccaaggacccatgtgcgcctccatctctaggacaccttctcaacaggccagcgccagaccggaggctcccaggctgggagggtcggggcgactgctgacagggatggggtttccctctggggtgataaggacgctctgggactagacagaggcggctgcgtgacactgtggatgttccgaacgccacccaagtgtgcaccttagaaccagttacggctgaggcgggcggatcacgaggtcaggagattgagaccatcctggctaacacagtgaaaccccgtctctactaaa

SEQ ID NO: 27552 - DNA, 1577 bp, Artificial sequence
  DNA replication origin
ccccccgcccgtggcacgtgccgctgcagcgttgcttttgctgtgaggccgacttcctgggataagggcatgtggctctggcgtggcgggactgcgtggctttaggatgaggctgcgctcggccctgggcgtgttctcatctcctggagcacggtgcccaccttccccaccttcccgcctaccaaggcgcggttgctgtgagctacggggaagtgacttttctccttgttcccagaacacaccttctcccaggctgggcgggcccccgggcccgtttctggggctttggctgacttgactcttgggaaatgttcttccctggagcagtggcgacggccctgggcctgtctccctccaggtgctgactctggctgcccaggagctgtctaggcctgggtgcctcgggaggactccccaacctggctccccaagtcccaacaccccgtgcctgccagaggcagccgtctctcagcctggcagtgccgtggcgtctgactggcgggtggtggtggaggagcggatcagaagcaagacccagcggctctccaaggttagtggcgcctggtcagctcctcacgggcatggggaccgtgggtgggtgggaagggcggtcagacacctccaggcgctgtctgcagcgaggggcggccacattcgctggggatggtgcctttgccgggattcctgaaaggcagggtccatggtttgcaccgaggaactggattttggctgtaggagacccagactgggcttggggacatgataagtgacaggtgtcctggtggtgctctgtcctcagagcccatctaggccaggggtggtgttgctccacctgaggatgtttaggggcgtctggagatgtttttggttgtcactaggggtgggttggaggccacggaggcatcctgcagtgcccagggcggcctccccaggacgctcctccagccttgaatgtcctgcctgcaagttcgggaacgcctggtctgctgtccaggcattggccgcggagcctgagtcccgtcaccaaccccatggggcctgggagctgggcggggccggaagagtagcccggggaggcaaggcgaggctgaggtccacgctgctttgtgggatcctctcgggctaggggtgccgtgcccgctgcccaagcctgcacctccgtgatcgctgtagttgtgtctggcagggtggcccgaggcagggcccggcaggcagccccagcagattcaactccgtggccggccacttcttcttccccctccttcagcgctttgacaggtgagtgggttttccgtgggcctgtggacttgggggacagggaccctggacgtaccactgtggccaagaagttcgggctgggatctgagtgggtttgggtgtgaacagggtcgtgctttgctgtggctttttgtaagcctgtgttaaatggcagggagcgtcccgcaagattcctctgtggttgagctttgccatgaggcaccaggcatctgctccgatgctgggcttgtggcatggccggcagtgccgcccgcacgtgcccgacgccatcacctgctgggccctgctcgcctcctcct

SEQ ID NO: 27553 - DNA, 1766 bp, Artificial sequence
  DNA replication origin
gcctgctcaccgtgcgtgtgcgggcagagcctcctggggaggcagaggccccgcgttctgcactcgagtcttgcgggtggacatgcatatgtcagagtggagggcaggcagcgatatctactggtttggcttgggtattttttttttttgagatggagtctcagctatgaagatataataagcttgttggatggcccctcccatcacctggcagtggacctgcgtttaaggaaggcctcagctggggtgggcgctggtggagtgcaagccttccacacagtctcaaacgagaggctgagggcaaacatccacacctgaaaagatgctgccttacatgctgacaaaccacctgccatgtgccaggcgctgtgctggggacacaggggacacaggacgtaagggcacagaacaagcttgggtaatgctgtagtggggagccaggtcaggccgaggtcctgcagtggcagaattcagagaagggctggcacagggagggagagagaggaaggagctgaccagggtcgaagagggaccctgtggtcagaaagggccggcgtcctgatgcaaccagggcctggtgcgtgtgactgctctgtgtgcagagctagcttcggagagggcaatcaagtggtttccagaaggcaggcagaaggtgcggagggcgggtgaggggtggtggggggcaggacaggcggcataggtgggtgaggggtggtggggggcaggatggggggcaggacaggcggcataggtgggtggggggcaggatggggggcaggacaggcggcgtaggtgggtgaggggcggtggagggcaggacgtggggacagaaatgttgccggtctccagcatcaggagggtgtgtgcgggctgtgctcagatgatggatgatggcgggaaagctgagcggatataggagctgtggcctgggtgaggtggtgcacgtgaccccgggtggcgctacagcagcagccagggagcgtgtgcctgggcattctcagtttagctgcgcttcccagtttcttttttcttttgtatctcgagttactaaattccacaggcttcaagcaaccatagagagaataaagaagttggcgaaatatttaaaatgtggatttcctgttaattttgaggatatagcagtctgggcatctctctactccaattttgcttttatacggaaaactatagttctcctagaaatagaaaccccgttggagcagggcgcggtgctgcacaccagccactcacgaggatcccttgaacccgggaggctgaggctgcagggagctgtgattgtgccaccgcactccagcctgggcgacagagcaagacctcgtctcaaaaccaaaccaagcaacaacaaaaaagaaaccttgttaggattagacttgagttgttttttccagcagcaaaaggggtcagtgaatggaagtggaacggcgcagaggggagtgagcaaccgggccaggaagtctgtgtctcacggagctgacctttcagccctgagggagagccactgccaaggagctttcctgtgaattctggaggctgcagcccagcgagcccgacacggtcgccagcatgtttcccaagctcatttctcgatactcagtttgtgagtcccgggaactatctaatagggcaacacaactggtgggtgcagaggccctgcaggcatcggcatagctgcagggtctgacggatgcaggcgcgtgcaattctctatgttggctacaacagaattatggttgaaaaagaggccg

SEQ ID NO: 27554 - DNA, 1653 bp, Artificial sequence
  DNA replication origin
gtgtatgatcagatgccagcgtgaaggatggcgagtctacacttgcggacctcctgggtgtgccgtatgtgaaacctagggcagggggcacccaccgcagccttcctggagaactcataaccaagcaagcagccattcccacagcctctggggacaggagacctgagccgtggtgcctgcgtggagccgagcccaggccccgctggccccgtaccttcctggcagccagcagcagctctaccgccctctcgtactgactgtgctcgatgaagaagtcggagcagcgggccaggagcgcagggtctgacgtctcatccaggtcctctgctatgagctgtagggccacaaactgctgggtggcaaaggccagctccagggccttggagaagtggccagcctgcggatacggtgggctctgagcagctgcccgaggcctgggggcccgagcacggaggcctcgcacaggcaagggccccctggcttgctgcccctcccccaggtccccaccggtggccagccctcaccttgtggtacagcatgaccgccctgtccatctgcacgcccttctcctcgtagtatcgggccgcctcgatcatgtcctcgggggagctcagcagggccaagttcatgagctggtcgtccaggccgttctcctgcagggagggaggcagggccctgaagcggctcccactggcttccccaggtccgctgagattctggaatgtggccgggtgcgaacccgccccttcactttgacacactgctcagcgatctctgcggtgatgggttttaaggagctgatgacttactgggtttgtctacaaggattttccgatgctctgggttctatttcacagagcactgcaagaaatacctgacacgggagatgcttctggaagcgagagcccaggttgggacatttgtgtggtgcagaacgcccaacagctatctaggaagggtctgccgtctgcaaggccataggccgtgagcagcctcaccacccactcaggagccctggagcctgggaaacatctggggacaattcagtgctttgcaaacaatgtcagatggaagcggccaggggtgggcagaggggtgggcgggtgaggcagacggggtgagcagtgagtggcagacactggccggaccacgtgtcactgacacgattctctctgtccacttttccacttgaagctctcctcaggggacctcgagaagcgccggctccccaccccgggcccgtggtaccttgcacaggcggatggcattcttgaaggcctgtgcccgggtgtagaagtgcaccgcctgcccgacctcctcctggctctcgtactggcgggcgaggtggtaggaggccgccaggtttcctgtctcgttggctatttgcgcagcctagaaagacaaagaacccaaagacgagacacggtggccttgtgtctgcctcgtgtccgcctggccggctcccctgcggggaccttaccttctggacattgccctggaagcagtggatgcggaccagggagaagtggtcccgggccagctcgtagtagtgcagcgcggcgtccatctcgccctggctctccaggtactgcgcccaccaccgccacagggtcctgcgggcagcccaagaccatggattctccacccgagccc

SEQ ID NO: 27555 - DNA, 1601 bp, Artificial sequence
  DNA replication origin
aggagcctggtgatctgcataagagatccttctgtcttttaatgggacccggcccctgcctcttggggttaggaaggccgtgggactcgtgacgggcacctctctgcatggcctgcagtcttgcccaggggcggagccgatgggtgaaggcccctcctcatgcccgtttggcagctgtgcctgatgactacttgccccaggagaaggggccgtagggccagggggccctgaggtgctgggcaggagcctcacagacccccgtctgcccacagtgaggccgtctgggagaacatggcgcgcatgtgcgtgaagacccagcggctggacgtggccaaggtgtgcctggggaacatgggccatgcccgcggggcccgagcgctgcgtgaggcggagcaggagccggagctagaggcccgcgtggccgtgctggccacgcagctgggcatgctggtgaggggcgcccgccatggggtgggtgggaaggcaccacgcctgccacagccacggccccctggggaaggaggaggcacgcccaccggcctgagcctgcactgatgtgggcagagccgagaggcatgacccaggagagctgggcagacagcggcggtggaggtgaggtgggtggaggctaggcgaccgccggctctccagggtgtgtgcctgtcaggtgtgtgggcctggaacagagcgcccgagagacccccaggtcagcagggctgagcacgggacttctggggaggctgtgggagggggggctgtgggaggggggctgtgggaggtggggtaccccttggtggtgcatctcactctccagccgtgggacggggatgccccgtgggtgtgtggcgtttgctgtgcccacagcggccccgtgtgtcagtgtgcttggcggtgtgggaaggtgcggtgaccggtggcctggcgtggaacagtgtgtttgagacgtgggtgtgtggaggctgcacgacacctgcccatcctcattcctcaggaggacgccgagcagctgtacaggaagtgcaagcgccacgacctcctgaacaagttctaccaggctgcgggccggtggcaggaggccctccaggtagccgagcaccacgatcgcgtgcacctgcgcagcacctaccaccgctatgccgggcacctggaggccagcgccgactgcagccgggccctcagttagtgagtgcggccctcgcggcctcttccctgcctctctggatggccctggcttgtgaggcctcttgtgtgtgctgtggtgaggtggccagggaggttcttagaggaggcgtctgtctcagggtggtggcagccttctcggcaggaagcttctgggagtctcggagatgtggggttgccccttccatcctgggccacccagcttcccaggcaggagacagaaagatgtctgtcccattggtggtgtcagttgccgagcacagatgggcctgatgtctcctgaggacagacaaaccccatgtcaccctctccagaggaggagctgctcttagacccgttcccggggtgtggatgggcgacccgcctcccgggcccccacagtgcaggaagcccccactgccccctggccacgtgtgctcagg

SEQ ID NO: 27556 - DNA, 930 bp, Artificial sequence
  DNA replication origin
cacctgtggtcccagctatttgggaggctgaggtgggaggatcacttgaactcaggaggtcgaggctggaatgagctgtgattgtgccactgcactccagcctaggcaacagagggagaccctgtcttacacaacaaaaaaaccctaagaggcagggtgacttccaccgtccctgcacctgtgccctgacgcagctctgcccacttggcaccctgttccttcacacacacaaaattcactgcccgagagtggggcacagggctggggtggaaggtgctgtcccccgtgacccactggtcagcccgtctgcaggcctgcctccagggccctctgctcggcagacctccagggctctgcagaaccctgcgtgggctgggtcaccgtctcctggggagacaggcctgtctccaggttccagggctgggtcagggtctgggccctgtaccccgtcccccaggctccaccctttggctgccagactgtcgggtgagggtccctgctgtgcagggctggtttaccaggggccctgcaatctcaggctcaggtgagagcaggaggctttgtctcagagcaggtcctgtgtgtgcaagcaacacaggaagcccacatttcctgatcagacagccgcttagagcagggaaaaaggaggaggagcctggtgatctgcataagagatccttctgtcttttaatgggacccggcccctgcctcttggggttaggaaggccgtgggactcgtgacgggcacctctctgcatggcctgcagtcttgcccaggggcggagccgatgggtgaaggcccctcctcatgcccgtttggcagctgtgcctgatgactacttgccccaggagaaggggccgtagggccagggggccctgaggtgctgggcaggagcctcacagacccccgtctgcccacagtgaggccgt

SEQ ID NO: 27557 - DNA, 1026 bp, Artificial sequence
  DNA replication origin
gcacaaagtacctgctggctttcgggagcgggcacctgggtatgccgcgttgcagccacagacaccaccgcagggcccatcccaggaacctgcgtccagcccctagactcagacacaagtgcaccgagcctgcccggggctaccatctcggagccattgccctgtgattctgtgggagccagggaagctgagatgtgggcagcccacacctcccggagatggaggtaccaccgtgggactgggctccctggctgtcctcccgagcccctccttctcacaggggcagggccgttaggaaaacgcccagctgcacgcagcacagctccgctcactcaccgggaccacgggctcggggctctgtgggcggctggtccctccagtcctcagagcggcctgtgaccgtgccagcggggaggctgcagggctgctgccctgctaagactgtgggctggactgaggcttatctgcagggagcagcctggaatgcgagggtggccctgggtggggatgctccgaggccacttgcagggtgtgctgcctgtgcttgtgggagtacgtgcgtgcatgtgtgtgcgtgtgtgtgcatgtgcgtgcatgtgcttgtgtgtgcctgtgtgtgtgcctgcatgtgtgtgtatgtgagtgcatgtgcttgtgtgtgcatccatgtgtgtgtgcatgcatgtgaatgtgtgtgtgcatctgtgtgtgcatgtgcgtccatgtgtgtgcatccgtgtgtgtgcacacgtgcgtgcatgcgtgtgtgtgcacacgtgcgtgcatgcgtgtgtgtgcacacgtgcgtgcatgcgtgcgtgtgtgtgtggctttggtggggcttgtaggggaggcgcgtgtggcagaggagagagattcaggaagtgaccagtgcgtcctctgcctgtccctgctcggtgaccacactgagctgtgtcttggaacagggcctttgtctgaagccctgagcccacgtcagggctgaagccgcaggccagcccggccccaaggcccttggggcgggat

SEQ ID NO: 27558 - DNA, 2044 bp, Artificial sequence
  DNA replication origin
ggccacgagtctctgcacggtcatcgctgacgccggtgccgccgcttatccggagaaagccaagtcccagtccgcggccgcacgtccagggagagccgacgctgctaggggtggctagaggacatcaccactcatcctcggggcggcgcgggcggaggcccatgggatggtccaggtgtgccgcctctcggcccggccttatcctccttcctgcacctggagcagggccaggcctgtgctgaagctgctcgcctcggggcccatcccagggagcagagggtgggcagcagcaagaacccagggccaggagtgcgccgtcttcccgggaagcggaggccggcctgtgccgcgcgtgcctcttctcgcctgcagcagtggaaaacagagtcactcgggaggccggcagcagtgggagtcgagcccgcgccacactccttagcaccggcctgctgtgagtgccaggctccgggcagggtggccggtgtggagcgggttcacagctcctctgtgctgcctgggcccctgtgtggatgcctccagggcagttggccggtcctggaaagcagagtggctgctgcagggacgcccgtgtgcgcagagctcgccttccctggctctcagcagagaggaaatggttgtttttgagactgtttttggtgagctggaaggcgtagccaaccgcaacaaatagcggccctgccgcggcagccagacaccaacaggatgtgcttcctgatgggaaaggccaggagacttctgaggccctgctccaggcccacctcctgccgcccctccccatcttcctgtcccagaggagaggccagggatgccgggtgcgggacagatccctcgtctcgcctgttgcttttaagcctggtggcccccggggcctggaggctggtactgagcgactattgcctgccctggggacttcacaccccccagccatccagttgcccccaggaccataggtacccccaggaccataggaaccacaagcctccccccgcccgtgtgttccaggcctgcccccgccacgggaatgctgccctcaaaaggggggcagatatcacaggattgctgggaaggggagagacccgtgtgcctggagggagcaagttcacccagacctgcagggccagggacctgtacttggaggacctcggggccagggacctgtacttggagggccttggggccagggacctgtacttggaggacctcggggccagggacctgtacttggaggacctcgaggccaggtcattcttaggtggcaagaagggtaagattctggatgtgctgggtggggctctcagcggggcctgggacagagcgaatgtcacgtggggcctgggccacctctgctattgatgggaacggtcaccccccacagctggggacaggactaggcaggtcaccttgtgagtggtcaggctctcgggcagagcttatgctgccagggagctcagaagcatcttcgtctattctgctcagaattattctgcccagctgggcagacaccacgagagggtctcctactctgtcccatctccagagacccgaaacccagcatgggattcccagcctacccaggctccaaagcttcgtgaatgcaggtgtcccacatccgtgcaaactgttcatgggcacacgcccaagacagtgctgggacagagagtcctgttcccagcctgtggtaacagcagagctttgaccgtttcctgtccttgcactgcccgtgcttgggccctggctcagggcggtcccgagagctgccacttcctgggaccagtctccattcacacgttggcatgtggctctgtatatccacaggtgaagcaaggttccccacacacgccctgtgtctgttccagaaaggcagcagctccgtcctcaccagcccgtggtgcgtgctgggtcctgagaagcgtttctccactggcttcctgagggacgtgcctgggggggattttccccggggatttgtcgcagacgtgtccgtcaggtttctcctttcccctcttccttggcttgtgcccag

SEQ ID NO: 27559 - DNA, 766 bp, Artificial sequence
  DNA replication origin
ggaagaagggcgcctggccggagtcacgcggagacccaagcctcgggcttcccataagacaccgagttctgagagccggtggaagctttgaagttattcataggctttgatctttttaaaagacggctgttggtccctgctggtgaaggatgcgagaggaagtgcgcagtccaggctgtgcggtgcagccgagggcctttgagtggacaagggggttgaattccctcgtgggaccttgtccaagccacatgccttctgcaaagcctcagtttctttgcctgtgaagtggggatgacattccccgctgagggttctgagcgcggcaggttggggatggagctgtgtggttgaggcacacgtgatgtgtgttaccccagtactccgggactccctcggaagcctggagcagaggcactgcctcagagaccagcattatcttcagagcagaaggagcgtccaaccccgagtctgtgaggctctgcagcagagacttggggtgtctgcgagtcaaaaccttgctgacagtttcagagagtcggcctttgggagaccttgtgtccctgtgccgtgactgttgagatgaccccatgggctgtaagcgccttcctatttatgcagcctcacacctgccactcaaaccccacggtgcggtggcatcattctgagccccttcctctcctctgcaaccactgagcatccctgtccccttccgagcgtcctggcctccctgtctcctttccagcgtcccatctgaagctcatccctg

SEQ ID NO: 27560 - DNA, 1349 bp, Artificial sequence
  DNA replication origin
tcacacctgtaatcccagcatttagggaggctgaagcaggtggatcacatgaggtcaggagtttgaaaccagcctggccaacatcgtggaatgttgtctctactaaaaatacaaaaattggccaggtgttgtggtgcatgcctgtaatcccacctacttgggaggctgaggcatgagaatcgcttgagcccaggagatggaggctgcagtgagccgccatcacaccactgcactccagcctgggtgacacagcaagactgtctcagaaagaatctagttagggagatgataatatacacaaaacaaaaaatatcccagcacctgctgtgttggttctactgggggaaataagaagttcacccttgctcctagggagtctacagaggagaggggaggggaggagcgggggaggggaggggagcggggggtggggaggggaggggagcggaggggaggggaggggagtggaggggatgggagtggaggggaggggaggagaggggatgtgaagtgtcggtacaatcctggacagagtgtgaaaaatgttatgagagaactttaagcaacaaagtgttagcagagaaaaaaaaatgtgggaaagatctgagggagaggcggaaactagtgatggatgtgcctgaagaggtgggggcgttcaaacacacgagggggcaaccgccctgggaagagcatgacacgcggcctcctgtgtgggcaggcggctgaggggcagggttggtgaaggtgataactgtggaatggggggagctgagctgcacatcctggtggcggggccactgcaatgggctgggaaaggttccctaaagatgccaggtcctgctccctggcatgtgtgaatattactttatatggcagaagatggtaaggtcttgggatggggagattatactgagttatccaggtaggccctaaatacactcacgagtgtccctgtaagagggagggaggcagatttcagaccaggggcaatgtgaccagagagacagagactggaggtttgtgaccacaagccaaagactgctggcagccaccagaagctgaaacgggttctcccctggggctgcagaggaagcgtggccctgctgacgcgatcacttctgtccagtgaaaagtgaaactgatttgggacctctggcctccagaactatgggagaatacatttcccacatctttgtctgaagccaccaagtttgtggtcctttgctacagctgcctcaggaaactcccatagatgtgctgaagagagcaggaagaaaacaatggccaaggccgggcgcggaggcgcacgcctgtaatcacaccactttgggaggccgaggcaggcaaat

SEQ ID NO: 27561 - DNA, 1086 bp, Artificial sequence
  DNA replication origin
acccaggaggtggaggttgctgtgagctgagatcgtgccactgcactccagcctggacgacagagtgagaccatgtctcaaaaaaaagaacataataataaaaaatatatacacctgccatgtacccttataaattaaaaaaaatgtcagttaaacaataaatttaaaaagtaaataaaggaaagagagggatactttctttgccattccccaaacctaaaaaaaaaagaaaaaaaaaaacagaaaagaatcataataaaacccatggatatcttatataacacggaaaacagcctcagcctgtccacagaggacccagtgatctcatagtcgtaggatgatggagcagcagtgttcagaagtgtttagaggaggctttcgaggtgtgcagtggggtgtacagttgcacctcacttttcccgccctttgcctcgaatgtccgtggttcttttcaggatgctgtcgcagtctggaacggaaggcaggtggcgatcttcgagctttctggagccgcgatacggagtgcaggtgggttcttttcacccggacagaggcactcccactacctggctttatttcctccctgcctaatgagagggccactgtggtgcagttgagggctggcacaggggctggggagacccttgtgctactgcctgcgcttccagagccagggctgcagctgtggccccgtgctgccagtgcatcctggggcctgctgtgtgggcgtaaacaaccaccgtgcttttgtggggttccttccagggaggaggtggctgcctcccatcttctgaaatgtttccagaccatgcacagcagtgagacctgtggtgtcttgacccaaggccagcctctgtctgaaacttcaaggtggctcctcagacatgctccgttaatctcaaacacccttctaggtccccaagatctctccagctctctgcggttagttttgccattgttgcccaggctggagtgcagtggtgcaatctcacctcactgcaccctccgcctcccgggctcaagcagttgtcctgcctcagtctccccagtagctgggattacaggtgcgtgccaccacacccggct

SEQ ID NO: 27562 - DNA, 1376 bp, Artificial sequence
  DNA replication origin
cggacggggcggctggccgggcagaggggctcctcacttcccagtaggggcggccgggcagaggcgcccctcacctcccggacggggcggctggccgggcgggggggctgaccccccccacctccctcccggacggggcggctggccgggcagaggggctcctcacttcccagtaggggcggccgggcagaggcgcccctcacctcccggacggggcggctggccgggcaggggggctgaccccccccccacctccctcccggacggggcggctggccgggcggggggccgacccccccacctccctcccggacggcacggctggccaggcggggggctgacccccccacctccctcccggacggcacggctggccaggcggggggctgacccccccacctccctcccggatggggcggctggcctggcgggggctgaccccccccacctccctcccggacggggtggctgccgggcggagatgctcctcacttcccagatggggtggctgctgggcggagaggctcctcacttctcagacggggcagctgccgggcggaggggctcctcacttctcagatggggtggttgccaggcagagggtctcctcacttctcagacggggcggccgggcagagacgctcctcacctcccagacggggtctcggccgggcagaggcgctcctcacatcccagatggggcggcggggcagaggcgctccccacatctcagacgatgggcggccgggcagagacgctcctcacttcctagatgtgatggcggctgggaagaggcgctcctcacttcctagatgggatggcggccgggcggagacgctcctcactttccagactgggcaaccaggcagaggggctcctcacatcccagacgatgggcggccaggcagagacactcctcacttcccagacggggtggcggccgggcagaggctgcaatctcggcactttgggaggccaaggcaggcggctgctccttgccctcacctgtgtacatttagaaagcaccaagaagggggtgcagatgggtcccggggcatgccctgtggcttagcggatgcccaaaccactgtccttggggcctgggccggctcatagtgcacaccagcctctctccctagagagttgcgtgtgagtagcagaactgctcaggaaagtagtatctcagagtgttttcatccagaacagctccctggtgggtctaagtgtttcttagaattttcatttatgtttctcttgctatcaaggatgaatatcatttataggagccatttgtgtttctgttttttttttgagacagagtctcactctgtcgctcaggctggagtgcagtggcgccatctcggctccctgcaagc

SEQ ID NO: 27563 - DNA, 1653 bp, Artificial sequence
  DNA replication origin
ggggtcggccccccgcccggccagccgccccgtccgggagggaggtggggggggggtcagcccccctgcccggccagccgccccgtccgggaggtgaggggcgcctctgcccggccgcccctactgggaagtgaggagcccctctgcccggccagccgccccgtccgggagggaggtggggggggtcagcccccccgcccggccagccgccccgtccgggaggtgaggggcgcctctgcccggccgcccctactgggaagtgaggagcccctctgcccggccagccgccccgtccgggagggaggtgggggtgtcagccccccgcccggccagccgccccgtccaggagggaggtgggggggtcagcccccctgcccggccagccgccccgtccgggaggtgaggggcgcctctgcccggccgcccctactgggaagtgaggagcccctctgcccggccaccaccccgtctgggaggtgtacccaacagctcattgagaacgggccaggatgacaatggcggctttgtggaatagaaaggcgggaaaggtggggaaaagattgagaaatcggatggttgccgtgtctgtgtagaaagtagaagacatgggagacttttcattttgttctgcactaagaaaaattcctctgccttgggatcctgttgatctgtgaccttacccccaaccctgtgctctctgaaacatgtgctgtgtccactcagggttgaatggattaagggcggtgcaagatgtgctttgttaaacagatgcttgaaggcagcatgctcgttaagagtcatcaccaatccctaatctcaagtaatcagggacacaaacactgcggaaggccgcagggtcctctgcctaggaaaaccagagacctttgttcacttgtttatctgctgaccttccctccactattgtcccatgaccctgccaaatccccctctgtgagaaacacccaagaattatcaataaaaaaataaatttaaaaaaaaaaaaaatgtacacaggtgcaaaatggcaaaagcataaggttactcactgcaccattgtctaattagcaaaagattgaaaaccaccaaaatgttaatcaacagggggctggttcagtaaattacaacattcatataaagaagagccggtttaaagaaaacaaggaagtttactgtttacccatatggaagaatcaccaggatacgctgtaaaatgaaaaagcaagagacatgacagtgtgtataggatgccaccactgatgtgaaaaagaatgaggaaatcaggagacaatgtcctctacgtgatatttctgccaaaaacgtttgaaatgaaagtattatgaggagacaaacacagccaacttgagtgagagtctataaaacaaccagtctacatcctcaaaatgtaaatttcatgaaagaccaaaaaaaaaaaagggaggaaaaaaggaaggaatgcaggcaactaaccaaccaactgaccagggaattgttcttgattaaaaaaaactagccagacgtggtagctcacacctgtaatcccagcactttgggaggccgaggcaggcagatctcttgacgtcagcagcttgaaaccagcctggcccacatggtgaaaccccgtctctactaaacataccaaaaattagctgggca

SEQ ID NO: 27564 - DNA, 945 bp, Artificial sequence
  DNA replication origin
tgtgtgtgtgtgtgtgtgtgtgtgtgtgtgtgtgtgtgtggaggggggagcagttcctaaggggccacttagccactttcacctgaaggattaatgcattaattacaaaaatggatgaaggagtgtcttctttgcaggtggcacagcatgtgcagggctggaaggccgaggaaggctgtgcaaggctgtgtcagcatcaaggaaggtgagcctgatgtgacaggtgacagagccagacctgggaggcgctaggggccacatcagggactccatgttcacccaaagagcagcacagggccggggaggtgggagcagggagtgattccatctgtgatgccaagacaggccaggcctggttgccgtgtaaagtagaggaggcctgtgagggcacagctgccacagtaggaagctgtactggtgtccaggagagggggatgggaacctggaggagggaagggcggttggaagggcaagcagcagcagactcgccagaggttccgggggagaaactgggaggatctagtgatggattacaaggtaggggagtgggaaatgtcaacagtcatgcccaggttcttgttctagaaaccaggataaagggggtgactttcattgagatgggaggtgcccatctcagtgagcaggagatatgaggcaggggaagggtgggggacaatttcagttcagttttgtacagtctgaggtctccttgaaacaccctagagatgtcaggaaggcagctgggtccctaagcttacagctcagagggaacttctaggcaggagatgtatgtctgcaagccactggggatgctcagatcacaggagaaggaagaaatggagaggagccctgaccaagctctgcagaaggccatggtgctcacaagctggaaatggaggaagagctggcaaagccatggaggccgggcagggaacgccctacccc

SEQ ID NO: 27565 - DNA, 1177 bp, Artificial sequence
  DNA replication origin
ctcccctcctgggcgtgttcccttcccgtgcatcccgaggcggagcctttccagcacgcggcggtctcggcccaggccttccctgggctccgcttttctagtttcggagcggagggcgtgggtcaagcgtttctgggaaagtcgatgcgctcggcagtgtcctgaggtgttgggtgactgagggcctgttccatcgccgggccccggactccacagagccaagcgaggcagggagcgcccccaagaaagcagctggcggccggacgcggggctcgcgcttgggcttccagctcttgggggctggggcgggcggatcgttggagcccaggagttcgagaccagccttggcaacaaggcgagatcctgtctctaaaaaattacaaaaattagccgggcgcggtggcgcctctagtctcggctacaggaggctgagggaggagaatcgcctgagccccgggaggcggagactgcagcgagccgagatcgggccactgcactccagcctgggcgacagagcgagtcaaaaaaaaaaaaaaagaaaagaaaaagaaacactggaatttgagccgggcgcggtggctcacgcctgcaaacccagtactttgggaggctgagacgagcggatcacttgaggtcaggagttcgagactagcttggccaacatggtgaaaccccgtatgtactaaaaacacacaaattagcgagtatggtggcgcgcgcctgtaattccaactactcgggaggctgaggcaggagaatcgcttgaacctgggaggcggagcttgcagtgagccaagattgcgccactgcactccagcctgggcgacagagcgaaactccgtctcaaaaaaaaaaaaaaagaaagaaagaaacactggaatttgaaaaacacccctctgctttcttgctatgaagaaaatgaccaagtgcccagcgccgctcggctacgctaacgtagcgcagaagcacatactccacccaggaaagggtgcgcttaactgcctcagacgtgcttccacacttctcagaactcaggttcgcgcccgattccacactccgagctaccacgccgttttcttctcacgtatccgtcaacactgctgcggccaatcacagcacgggccctggcctattggctgtctgtccaccaatccaaagagacgcacagtccgcaagg

SEQ ID NO: 27566 - DNA, 1628 bp, Artificial sequence
  DNA replication origin
gaaacattgggggtgctcgcccccgcgttcgtcgccccgccccgcgcgcccgcgcaccccggccccgcccccgcgcgccgtccgtgaggtccccaccggccgccgtagccggaactgctgctgagggcggcgggccggcttcgctagggtgagtggcggcagtatctgcgtccgcagcccccgcagccgcgcgccggcccgcggaggggacgtgccggggctagcgccgctcgaccagtcgcttccgaggcggacgaccagcccggcgttgcggcctccctgcagccggcgctcgggggccggggctgcccggcccggctggttctgcgggcacccggggaggccccgggaagccaggctgccgcccggcgttgatgaaaaaggtgaccaaggctgggcggcggggctgtcatggcgaggcccggccggggggtcctgtcgggcggcgcgggagagcgcggggggggcgtcgcttccacagcgcccggtacagccacaactggcctcagggcgaggaggcttctgcgtccccatcccgagacgcgagccggtgcggagcgggacggggctggaggagactgcgcctccgagaaaagtccggtctcgttggaggttctcgcgaaaaggaggccatccccctgcttgttggcccttagggtaaagtctggacggcgtcggtcctttcagtggcgaaaagcgcttccccgtgctcggtcggcgtcttgggtgtggagcccggcgagcgggcgagttcactctggtggccgagtttgttttgcttgggtcccgggtggcctgcgggcggacaggtccctgggcagcggggttctcagcccgagacgaggtctttgggggtttaggtttcttgagtggaaagaggtgggttgagggggaagagtgggaagtcttgccacgaaatcccttaagttggggtgtttgtcgtgggtggttttgttctttggcagagttttttttaaaactagcatgaactcgagattccctagaccaattccgacaggagaaaacggccacggatccttgtgtgatctgcacctcagggtgggggcatcattgcgactttgaagccatttcccgatctctcggaaagagaggtcctcgcccgcgtccctgtatttcgtggttggtgttggtgcctcgatcgtgtgttcctttgaagtggaaatgcccccgttctcaacagttgagttgaacgcagggtcagtatctgctgaggaatctaatcttcagcgtttttgcttcctcacacgtgcccgtcccggactgtttctgggctgcagctcttgctgtgtacctgattgtctgagtttatttttgagtggctctgctttctgggctgcagcatttttagtcactgcactttgttgttgacattttacagggcggtgggtagcaaagttgatgcaataattttattaattgttgccaagagttttaacaccattgtcttctaccgcttcttgcacctggacccggacataactgggctgtcactttcccgggtggttccaacctgttccatgcaacaggctcctttgttgcaaaagcatttttaactagtaaatccccgcagcagctcacatttcccaccctgggaagaagattcccag

SEQ ID NO: 27567 - DNA, 1230 bp, Artificial sequence
  DNA replication origin
ccctctcccggccgcaggatgacagtgaagttgggcgacggcggcagcggggaggacgggctcaagaagctgggcaagcgggcggccgatgaggagtccctggaaggagaaggggccggcggcgcagacgcggccgaggagagcagcggcacaaagagggacgagaagaccccccgggccggcgccgacggcccccccgcgccccccggcgcgccgcaggcgccgtccccgccgcagggcagcccccaggaccagcaccacttcctccggtccagcgtgcggccgcagagcaagaggcccaggaaggatcctccgagcgctgtggggagcggcaacgccggtggctcggggccccgcggaaaaggtagggcggcccgtccccttgggagaccccagcccctctccggggtgtgccgcgggggagaggaacccctcgccccagccgggctccaccctagctcacccatcccgcggcctacactgaggctctcaatttgggtggcacttatggggcatgtgtcccctctctccttcgaagaggctgcgactttctatatttaaactctttgaagaggcagtgagtatccttttttgggggggagtcgaagagatcccttaaagctgtttcctttccaaaggatcactgatggttttctatggttttgtgtttcaaacagcggacaatagttcggaaacgggaagagaaaaaaatacctgctgtatctctttcccagacatcaggcggtggaaatgcaccaagggagcaggcttttgaaactcattggggggaagatgggtaagaagcggagaaaggatccttggggtctgacttggacccattgtcctctccttcaagtgctcctgggttgagagtaggaagggcatagagatggggccctttgagttgcaactggggtttacttctgtgccaaagaaaggaaagagtggtgaaaacgattgacatgaacaagcagcagcttgtagtgttcgcccttgtattctgaggtgatggagaatgttgctacttagctggggtctcttaccaagatagtaagaaaacggcatgttagtttcgttctccatgtgccagtgcttcattgttgtctgctcttatttctatttcagtcttgtgcttttccttacgcaggtgaatgactctgattctttttgtttccgaccatgttcgcagcactttgtataaatagcaaatataacatcagcttccagtga

SEQ ID NO: 27568 - DNA, 1017 bp, Artificial sequence
  DNA replication origin
cacgcgagccacgcccggcagcggtgtcagtgtacagttctcgcctgggaacaagtgcagtgtcaccttctcctgcatcggtgcggagcatgagtcctgcagctgccgctcctcgagtgtcttccgctgagtgcccgtcaaggaaggcccacactggctagcactgaggtcgggatgctgaccaggcacatgggtacagacacgagccacgctccccactggcatcccccagggtataaatcatgccaccacccgtggctttcctcacaccactacccaacaatgctgacccgggcacttagtaccttcaggaaattcacacctgacacgcaccacgcctatgtggggagcaggcagggccgggagccagccatggatgtgaagaaggctgggctgacccttggtcgttttgctcaacctgctggtaggaatgctttggccacaccccgtgggccagacacaggccactgacatcgtggagggctggctgtgactgagttctagcactgcaaggccacagagggggctccacacccagggaataaggggctccaggttatggttccagatgtacaccatgtcacagcatggctgttctgcccacggggaccatgacgatgacaggcacagggaggcgtggtccatctctgggcagcagaggcagcgcagcctggatggtttgctttagctggaaaaggatacaactcgcacctcatggagcgcccacttctgcttcaagaattcgatgaggctggagacctttcgatgtagctccacgatcatcctacggagacgacagacaggaggaagtgaggttcgcagaacaggaaggaaaccatctgaagagtcccgaggctgcttacagcaggagggtgccaaaagagacaagggacctctggagaggcacccgggagcgggcgtctgcagggcccttggctcctgtggctaaaaaccagcctttccagctgcgatggccagagattcacacagagctaaagaaaacaacacagagatccc

SEQ ID NO: 27569 - DNA, 1257 bp, Artificial sequence
  DNA replication origin
cgataggatctctgggtgcaagagagcaaggtcccacggcaggtccatcctgaaatggcacgtttaggggctggcgagctgctggacatgggcgaggggctcaaaggatggactgggcaggagctgcaggtcactgtggaccccttagcgctgtttcatggtcagaatgtgtgtgaggctcacatgtccctgtgctggggggactcgggactcgggcgctcacgagcccccacacacccactgctccacacaggccgtcttacagcttctgagtgatgctcacttctgcctgcattccccacgcctcccgctttttttccgctcccacccccagccggtgcagggcttgccccggagagttggtccatcagcaggtggcaggaatgtgcagatttgcctggggagcatcaagggggctggaggaaagaaagttcttccaggggtggtggagactgagcccaaccctcaggcacctctgaggccaagcctgagggtgaaagtggctcgggggtcgcatagcagggacaccagggtgagtaagcggggaccagaaagacagtgtctttagaaggcttttcaggtttggcttttggtgggctcatgggaggggctgaggagagacatggcgcctgtgtttgggtgccccagggaaggggccagggtgggctcctgagagggcaggcagcagttctgggacacagagcaggtaggaatcccacatggaaaggcatccccatcccctgggagctagttagggaggctgacttggggtgggcctggcagactggacagacagacagacaggtgcctgatgcagctcaggtgtggggccaggtggccctgtgctgtctcttgcctggtggagctgtgacaagcaccccaaaaggcccgagccccagagatcaggagatgccggaggctgctgagccgctgtcgcaggtggaatgagtagcataggaagggtcatgaggtgggaggggtcctggggaaagcctgtagtatggggctagggcctgaaggctctgagtgagcagacgggcagggctgtgctgagagcacggggtggagggcttcttagtccatagggaggttgccccgggtgggatgtgtggggtgttcaggagagtgaggagaaggaagagagccgagaggctggggtgctggccgagtcttcccagcggtggtggcgtttctgtggtgagccagacagggaccccaggactcggcagcaggctctgcaggctgtggcgtgggcct

SEQ ID NO: 27570 - DNA, 1246 bp, Artificial sequence
  DNA replication origin
cgccgaccgttcaaagcctaagtcgtcgggggtgggcgtgaggggcggtggccgcgctgagataggctgcggagggatgattggcgtcttggcgcccaatgggcgctggcgggcggccttgagtacctgcgctgggcgggcgggaacggcgcgcggcgagctgagggtggcggcggtcgacatgttccaggtcccggatagcgagggcggccgcgccggctccaggtgcggcgcggggcacacgggaggcgggcggatagcgcgaccacgtggcgggagcgggccagcccagggcgtccaccagccgtgtggggttggggtggggttggggggcagggcgacctcacagaggccctcggggccgccgcccgcctttctgcgccgccgccagaccgaggcccgaagcccgaggggccgctcgctgaggcccgggctgtggagagctgcccgcgaccgaggccgagggcggggaggggcgcccgggctctgggaacaaagctgtgtggagggcgggctgcgctccctcgcgcctgggcgcccgcgttccgtgtggtgcgttccgtggggggtttcctgggggcggggtgtgcccgtgggtgcggcccattttgtctgtgggatgcgtgtccatgttcccgggggggtgtccctaaggggtgtgcggcgatgtgttcgtggggggtgtctggccatgcccccgctcctgtgcgtgtggccgtgtgcccgtgtccctggtgtgtgtgtggcctgtgccctgcccatggccgcgcttccactagttcatgtgagtccacttcctttggaaagtgccagggcgtctggggaagagtcagttctatctcctgggaaggtggatggcgctcctgggcttcgctgtaggaagaagtggattgggacgaagatatcctgactcagctttaatagccaggaacactgagcacacttttcttatgtttttgaacttttaaagcactctttgggtattgggactcgcatgaattagagggacagagcttacaaggtctttcgtgccacttgagcagtaaacttgcattgtgaagtttgggtcttcagatgcctgaggttttctgtatgatgagcccctctgtggcacagcctcgccagagaagtagaagagaatatgtgtgccatgactgttaagaccaatactatattgcttctcagccttttggctatgatcaagtgaagacaaatactatattgaataaatactaagtaaaagaat

SEQ ID NO: 27571 - DNA, 1574 bp, Artificial sequence
  DNA replication origin
gggaagagtcagttctatctcctgggaaggtggatggcgctcctgggcttcgctgtaggaagaagtggattgggacgaagatatcctgactcagctttaatagccaggaacactgagcacacttttcttatgtttttgaacttttaaagcactctttgggtattgggactcgcatgaattagagggacagagcttacaaggtctttcgtgccacttgagcagtaaacttgcattgtgaagtttgggtcttcagatgcctgaggttttctgtatgatgagcccctctgtggcacagcctcgccagagaagtagaagagaatatgtgtgccatgactgttaagaccaatactatattgcttctcagccttttggctatgatcaagtgaagacaaatactatattgaataaatactaagtaaaagaattgctccaacttgctaaaaataaaaaccctttagattggccgggcgtggtggctcacacctgtaatcacggcactttgggaggctgaggtgggcgagtcacgtgaggtcaagagttcgagaccagcctggccaacatggtgaaacccccgtctctactaaaaatgcaaaaattagccaggcgtggtggtgtgtgcctgtagtcccagctacttggagaggctgagacaggagaatcacttgaacccagaggcagaggtggcagcgagccaagataatgccactgcactccagcctgtacgacagagcaagactccgtctcaaaaaaaaaaaaaaccctttagatttgagggagttaggtcagtattcagtaatacttgtaaccaaataattacccgtggcagggtgcagtgactcaacggctgtaatcccggcacttggggaggccgaggcaggtggaccacgagatcaggagatcgagaccatcctggccaacacggtgaaaccccgtctctactaaaaatacgaaaaaattagccgggtgtggggtggcgggtgcctgtagtcccagttccttgagaggctgaggcaggagaatggtgtgaacccgggaggcggagcttgcagtgagccgagatcacaccactgcactccagcctggatgacagagcaagactccgtctcaaagaaacagcccttcatccatggaacagtgattattatgcctaggtctgcaccgatgtgggaccaggagtttaaactagtgctcagagcgaatccggtttctggttcctggtggccagagttttgcaccacccacatcagtggggggagggactgcatccccagccctgtcccagttgtgtgcatttagtacgtttcctttttgtttgtgctgcctggcactggctgcccggtaaatgatggtgtttattatcaccctgagcgacgccgatgtttttatattgactttcacgctccagaagttagctgcacagggccgcactaaagtcatactcacactaccctgggggactggtttctggacaaggtgttgagaaagggagaaaactcttccttttaggatggtgaggaaggaaagccggtctgaactggatgatgaggtatcactggaagcttctgcttggggtc

SEQ ID NO: 27572 - DNA, 1201 bp, Artificial sequence
  DNA replication origin
tcccagtaaaatgcctatagtcaccctgagctccaaaatccatgaacctttgcgttcccttaggttgagagctttaactcagctttgctggaaccggggcattccaatcaatgcataaccacctcgcgacagacacgaagcccaaacgcaatagaaaccacaggaaaggaggaatgatacaacatactgttatgatttttataaacacgctttaaaccaaactaggccataaatcaccttggtttcagaaaaagccaaaatactgacacaatcttttattttcctattaaagtcaagaatgtgttaagccgaattaattgaaaaggaattgaagctcatttcctaagacacttctattcataagtcaaacagcattacctaactcctagaatgagagaatttctgggcttggagatcgcctagtgcaattcactcctttgatggaaaatcgaaccccaggcaggcgacaggccaaggtcacagaggcaaagcagggatgggaaccagcctccctgaacctgtttctgacaaagggcgaggttctgggcccacacacaggcaggccgagctcagtatctgacggtgaatgaatgaagctaagtggtgctccccacagggcccggctcttgtaactgcttcacagacaagcgatttccaggttatggagacatcctagcacagaattaaacgcttcaaactcagactgttaactcctcagaagccagagtggagtttctcagccctggctacatcagctaacaatctcgccaagcaaggaaccaagggggcaaagacatcacctccagaaactcgagtgttccttctgctgacagaggagcagcccgcctgcggccttgttctgtgtttacatcaaccacccaattcacccgtgtcacagaccttcaaaatacgggattagggacaagggaaaggtctccaacatcatccacagacggctgcagccccctaagaacaccaaaagattccttttctagatgggtttagaatggcagccaacagaggtagcacttggggtcgggaaacggttttgactgaacacacgcacgaaagcaaaggcaattgtcatgcagaggtgggtggggaggggagagtgaggcctggctttgaagctgagctccccggggatgacgccaggcacatcgggtttggggctgaagattcagggctgggggcacggagg

SEQ ID NO: 27573 - DNA, 1287 bp, Artificial sequence
  DNA replication origin
ggcaaggctgggaacagtggctcacacccataacttccacactttgggaggctgagggggaaggatcccttgagctcaagagttcaagaccagcctgggcaacctggtgaaaccccatctctacaaaaaatacaaaaattagccaggcacggtggctcacagacttgtgggcccagctactcgggaggctgaggtagaggattgctcaaacccaggagggagaggctgcagtaagccttgatcacgccactgcaccccagcctgggtgacagagtgagaccctgtctcaaaaaaaatcaaattacaggctgaggctgttcactgggccagcaccaggagttggggccagatgagtgcagagagcaggccccgggctccctccaggtggtggctatactctgccccagcgggagctcacagagaggctgtggggctctgacctcacacagacaggtagcctctcccggggccacagccgttgccggggtcagcacaagcctgggatggctggttggctccctcctgcagcagccagttacatgtgtgcagcgtgcagtgtctataactcgtgtgctgtgtgcagtgtctgtgtgttgtgtgctgtgtgcagcgtctgtgtgtcatgtgctgtgtgcggcatctgtgtgagtcatgtgctgtgtgctgtgtatgagtgttgtgtgctgtgtgtggcgtctgagttgtgtgccgtgtggagcgtctgtgtgagtgtcatgtgctgtgtgcggcacctgagttgtgtgctgtgtggagggtctgtgagtgtcgtgtgctgtgtgcggcatctgagttgtgtgctgtgtgcggcgtctgagtgacgtgtgctatgtgcgggtctgtgtgactctgctgtgtgtagcgtctgtgagttgtgtgctgtgtgcagcgtctgtgtgagtgtcgtgtgctgtgtgcggcgtctgtgtgagtcgtgtgctgtgtgcagcgtctgtgagccgtgtgttatttaccatgtgtgttagtcacatttgctgcatgcagcgtctgtgagtcacatgtgtcacgtgtcatgtctgtaagtcttgtgttgtgtgcggtgtctgtacatcgtgtgtcaggtgcagcgtctgtaagttatgcatgtttggtgctgtgtctaagtcgtgcgtgtgaggtgctgtgtctaagtcgtgtgtgtgaggtgctgtgtctaagtcgtgcgtgtgaggtgctgtgtctaagtcgtgcatgtgaggtgctgtatctgagtcacgcgtgtcaggtgtgatgtctgtaagcacctca

SEQ ID NO: 27574 - DNA, 2249 bp, Artificial sequence
  DNA replication origin
ctcggggtgagatccccgcgccagcagtgcagcttccctgggtgcctggtagagatgcgagagcccagcgtaggccgccgcggcctccaaggatgtgccaggccagttaccccccagatcacagagcaggatggccaaagtgagatgttgagccacataatctgtggagtcatttctaaacagacaccagaaagctggggaggatgggagggcaccacgccgaggacagggcacaagctggtggagcaccttaccagctgagtcccggccacgcactccctggggctgtctctcacctcgtggcgtcagccctccccattggtgggctgcaggacagagctgaggtttgaacacagctgtggaggcggccatcaggccgggggcacgcatgcaccattggcgggacatagagtggggtcccctggctgcggctgcccgtcggcctgtcatgctgcttctgtgtctcttgggcagatcacgtctggggccagagaggcccgtgttggtgtcacggggggcctcccgtttaagggagacatgactgtcagcccagaaggcacatagtcatgattggcctccccagccctcggcgtgtgtgagggacctcgctgcttgttctgccagacacgaccctttgacgtgtccaggaggttactcactttgaatcccgcctcctcccgcaagcttcttgtgcacctgttgcctgtgcctggcgtgcctgggttttgcctgcatctcagaagcttgtggctgactttagcacagagagcgcctgtgggtttccccacccccatatttaactcccaacagagctgagtgttttcccatggcacagggcacacacagcagccccccagacggccttcacagagctgagtgttctcccatggcacagcacacacagcagccccccagacggccttcacagagctgagtgttctcccatggtacagggcacagcagccccccagacggccttcacagagctgagtgttctcccctcgcacaacgcacgcagcagccccccagacggccttcacagagctgagtgttctcccatggcacagcgcacacagcagccccccagacggctttaacagagctgagtgttctcccatggcacagcacacacagcagccccccagacggccttcacagagctgagtgttctcccatggtacagggcacagcagcccccaagacggccttcacagagctgagtgttctcccatcgcacaacgcacacagcagtctcccagacggccttgcacttgccgggctgctgctggttgcctcaggacccagagtcccagccttgtcctggaaccccctccctctgtggttacaacccaagagttcagggccatggagaagcgtcttgtgcggctcagacagtgattgtgttttccagtttcccggttggaggagcgggagtcggagatgaagaaggagtacaatgccctgcaccagcggcacacagaggtgggcgcccagaggcaagcgcggagacgagggttggagacagggccgcggcctgacgcctgcgactcttgcggaccgtggttttcttccctggcatgtcccttttctagcatttgctgccaggcttgaaggctgtcagccccaggctggttagattcccctccaggacgctgtcttgatttctgcctgcacagggcagccggaaaagcctcacaggttagaggggacggagacagccccccacggcagcgctaatgcaggcgtttccctcctcgcagatgatacagacctacgtggagcacattgagaggtccaagatgcagcaggtcggaggaaacagccagaccgagagcagcctgccggggcggaggtacgcggggcgcggcggggtggaggtacgcggggcgcggcggggcggaggtacgcaggacgcggcacatgccagggtcgtagtgcttgttatggcccgcgctctgggctcaggacgacagggaacactctggagacccaggaggagggagctggttggagcgtggctgagcagggatgtgggggggcggccctgggcgacggacatgtgtcgagcccgtgtgtcccttctgctcggtccacaattcagtcagggaggccccgggcagcttgcgcatatttaacccttactatccacagattctgtgtttgcaaatgtatctactcgctaaaatatatctgtgacctcagccgggcacagtgacttatgcctgtaatcctagaactttgggaggcca

SEQ ID NO: 27575 - DNA, 955 bp, Artificial sequence
  DNA replication origin
gtgacgggatagctcggggcatcccccgtccacccactccccccgtcacacagaggggagacagacaggagagtgagatactcacctgagaactcccctggcgagtccagcgacgcacagagaggcaggggaaggaagggacaaaggtcaattagggactggaactaacaatacattcttattacagaaaacccagcaatgattcggctgctcccatgttgcagggcaggagagagagggagcagcctccagcaggtcccggtgccccgtgtgcccaggcagaggcctgcagggaaccaggcccaggcgccgtggtccagcccagggctgtgttgccgagccctgacccggaagcctgctgccctctgctcccatcgcccatcaggagggcaggccccccgcagcccccatgatgcaggcctgtgaagaggagagtgtgtgtggcagggtgtggcaggtacccagtctccaaaagccccccagcgtgggcgagggagagagcggcgagggagacaccgcagacgcaggcctggagctggactcctaggcttctgggtcagcctgggtagggcaggacctcggtgaaggatgactgaagtcacaatgggagcaagggccccactgtggagggcagagagaacatgccagaaagcagaggagggctggggagcgtggggcgggcgaggcatcctcactgggtcctggcccctccctgcacaggaggctggcgagggaaacgctctgcgggaaaacaccacttcctccaacagaggtgaggacgcggttctcttctacttggttgtttcacacagaaaggaaaatggcattaaaaagtcacttgagcagggcgtggtggctcacgcctgtaatcccagcactttaggaggccgaggcgggcggatcacaaggtcaggagattgagaccatcctggctaatgcggtgaaaccccgtctc

SEQ ID NO: 27576 - DNA, 1930 bp, Artificial sequence
  DNA replication origin
gagccgcggggctccttctccgaccctccagacccctgcccaggaggctcactaggaacctgccaggccccgccccacccgccgtcctctcccaccccctagcactgccccgccctctccccgccccacagcgccccgccccttacccccgccccgcctctgcggggccccgcccggtccccgcagcgcccgcccgcacctgcttgtacttggcgggcaggctccagccgcaggcctgcagacggccgtcgtcgttacgcacgtgctcacgcacctggcggtactgctcgcgcttctgctctcgacgggcggaggacgtgcagtcgctgagtggaagaatgatgggtgatgtctctgtccagggtgagcggcccccacagtgccccaggcttgtcctgggggaggtcacggcagggaggcccgcctgggcccatcctcgccttttcccggccaccgggtgcccagctgggaagggtggctttcccggcactgggtgcccagctgggaagggtggctttcctggcaccggctatgcccctgggcttggaggccacagctggcccctgctcgacccagaggctgctctgctgccacagtcactgagggttccacagaccgggacctggagtgccgccggggcacaggcatgaccagcgactccctgctggacagacgcctgaaacggctccttgctgcagaggccaccgtggagcccagcacagccccctgactgttggtgggcacagcctctgccaagggacatcctgaaccaaataccgtggagccaaagcagcccagctccccgctgcagggaggggcaggcagtgtgcagggagaggtcacggcccctggcatgtggccagcaaggtggaggctgccctcaaagtcccgcttcagggcctggaggggaggagcctcaggacagggcctccccaaccccattgcaggccacaagtgggggctgcgggacactcactcgtcagggaagaattccaggggccggctgcctgccgagatcgggcacatggcatggttgcggcgctggctgaagccggcagtggtgggtgacttgtagtggatgttcaccgagggataggggcgcttggccggaggggggctggaggaagagctgaagaggcggctgaagctgccagaggcacagggaggtgaggggtgggcagaggaccagggaacctccctgccccttcccctgcagctgctgcccacatcccccaggggcccccagcttacaactgccagatggtcgacttcttcttctcctggacggatgggtgctctcgggacgctctgcaggggagggcacagggagcaacctgctagtgccctcacgcctcccttacctgcgactctctggctcccgccaggaagcacccagcgcacttcagtccccccagaagacagggaggtgcagaggagggagccgcagtcctgccgtcagggatgatcccgcagcccctcctggggtggccgcaactcccacctgatcatctcagtccaccgcacagcctcctgcagctccatcagccgctccttgtactggttccgctccatgagcacacgggccatctccacccgcgtgaagcggcggcgctgggccatggggattttgtcctgcggagggaggggcacagaggctcagccagccctcggaggccgggtgacacctgcttcctcctggggtgcctacacgtataggtggatctcagtgccaatttccttcagatcctcaggcaagaagcggtgtggaggggtgtcggcaagcggggaggggaaccatacaaaaggcatgcaccaggacttgggtgctgacaggggacccggcatcctgccagggctgtggtcctgcccaagggcctgattctgactccatgtggtctcaggagtggggtggcagatgatgccgctgggg

SEQ ID NO: 27577 - DNA, 5020 bp, Artificial sequence
  DNA replication origin
ctgggtcgagcaggggccagctgtggcctccaagcccaggggcatagccggtgccaggaaagccacccttcccagctgggcacccagtgccgggaaagccacccttcccagctgggcacccggtggccgggaaaaggcgaggatgggcccaggcgggcctccctgccgtgacctcccccaggacaagcctggggcactgtgggggccgctcaccctggacagagacatcacccatcattcttccactcagcgactgcacgtcctccgcccgtcgagagcagaagcgcgagcagtaccgccaggtgcgtgagcacgtgcgtaacgacgacggccgtctgcaggcctgcggctggagcctgcccgccaagtacaagcaggtgcgggcgggcgctgcggggaccgggcggggccccgcagaggcggggcgggggtaaggggcggggcgctgtggggcggggagagggcggggcagtgctagggggtgggagaggacggcgggtggggcggggcctggcaggttcctagtgagcctcctgggcaggggtctggagggtcggagaaggagccccgcggctcccacgcccccacctgcctccagtcttgaagtggctgtgccgccagaagctggcagccctacctgtctcagatttctggagggatgggtaggagccagggttcgtgcccacggcgcctccctgctccctgcagctgagtcccaacgggggccaggaggacacgcggatgaagaacgtgccggtgccggtgtactgccgccctctggtggagaaggaccccaccatgaaggtgagcccgcgaggaccccgctcaggctggctgggcgagcgggaggctggggagtgccggtgacacccgacctcggccctgcccttgcagctgtggtgtgccgcgggcgtcaacctgagcgggtggaggcccaatgaggacgacgctgggaatggagtcaagccagcgccaggccgcgatcccctgacctgcgaccgcgaaggagacggcgagcccaagagcgcccacacgtctcccgagaagaagaaggtgagcatggccgaggccaccgggcaccctccctggcttagtctcaggacagctcagctgcagagcatgctgggagtgagacacaggacagctggggacagcacccggaagcagggcagcgcaggggctcctagactgcgggaagcagtgtcttccctcaccaggactgagccgccttctgggttttcagttttcaccccccaggtggcctggagtgggcctgcactgggctgcaggggtcaggcaggcagcaggcacagaggagcccaggagcggcagagcttgcctcccagtggtgggaggcttagttttatgcccagcttgggcctcttggagctcaggggcctcttctgtggaggcgaaaccgtgtctgtgagtgctttagagtgcagtcctgagtccgcattgttctggtcctgggggaggacagccatgtcccctcaagctgtagtcaaggctggatcctgacagattctgggagccccatggccctgtgctgccaccgggtagcctcaagctcgggctctgaccttgatcccgtgccctgaaacaggccaaggagctccctgaaatggacgccacctccagccgggtgtggatcctgaccagcaccctgaccaccagcaaggtggtgatcatcgacgccaaccagccgggcacggtggtggaccagttcaccgtctgcaacgcgcacgtgctgtgcatctccagcatccccggtgagcagctggagtgggcgtttccactcgggcgccactcccttttactagcaagctaagtaaaagccctgccacacagcagctgccttctcggggtgtcctgtggacacgggaatgtggcagtggacggtgggaggggcagcacccagtcaagtgaggccctgggccctgtttctgggaggaagctcgcggcagcctcggcctcttctccctacctactcaggaccccacgcttacctggttagagggtgacgggtgggcacggcctgcagcttgaagcatcactcggagaccacaggaaaacatttcctcatgctgaatgtgaaacctccagttgggccgaaggggctatgggggtgtgggtgaggagcttcgtgtcacccctgtgggcagtagccttggtgatgttctgggccagccccaacactgggaggacgaaggggtgccgagggctctgccaggtctctggtgtgaaaccacagggccgtctggggtcctgagggtctgccacaggatcacaggttgtttgctcccagaaccagagtcttactactcagctccccttggcccaggggcctacccaacagagcaggcttgctggagtcccagacctccaggcagagggtcgtgggtgggctgtgggtggagcatgtgtggaagctgggtctgctgggaaagtggaaggccagccccggcttcctctgcccctgtgtaagtgctgggcacgcccttgcagtagtgggttcccccgcacaggctgacgggccgtccctctccccagcggccagcgacagcgactaccctcccggggagatgttcctggacagcgacgtgaacccagaggacccgggcgcagatggcgtgctggccggtatcaccctggtgggctgtgccacccgctgcaacgtgccgcggagcaactgctcctcccgaggggacaccccagtgctagacaaggggcagggtgagtcctgggcgagtttcccccatcccctcattcccacgtttctgcccagcccaagctcacctctcctaacacaggggaggtggccaccatcgccaacgggaaggtcaacccgtcccagtccacagaggaggccacagaggccacggaggtgccagaccctgggcccagcgagccagagacagccacattgcggcccgggcctctcacagagcacgtcttcactgacccagccccgaccccgtcctctggcccccagcctggcaggtgagctcttgggctggggcaggagcagagggaaggcttgcagaggtgggaagggcctcggggtcttggggcaggtgcgtgctccgtggccccccctggagccaccgttcttcctgcagcgagaacgggccagagcctgacagcagcagcacacggccagagccagagcccagcggggaccccacgggagcaggcagcagtgctgcacccaccatgtggctgggagcccagaacggctggtaggaagggcccggggcaaggtggagggagggtcctgggtgagcccctcgcccatcgccgcttccttccctaggctctatgtgcactcggctgtggccaactggaagaagtgcctgcactccatcaagctgaaggattctgtgctgagcctggtgtgggtgaccccagaccgagggccgggcggcgcgggggaacggggcggagggggctggcacagcctggcccaaaccaggctcaccgcattcctgtttcaggcatgtcaaaggccgtgtgctggtggctctggcggacgggaccctggccatcttccaccgtggtgaaggtggggcctggcagcacggggtgtgtgggtggcagctgatggccctggcattgtttagccaaggggctcccggggttccaggcctctccttagtctggcagtgggtgtctcaacccgatgccctgagcagaggtggggcctggccaggcctgagcaggtgtccggggctccctccagatggccagtgggatctgagcaactatcacctaatggacctgggccacccgcaccactccatccgctgcatggctgttgtgtacgaccgcgtgtggtgtggctacaagaacaaggtgcacgtcatccagcccaagaccatgcagatagaggcgagtgccggccagggccccggggaggggaagaggctcctgctggccagcagctctcccgcatcttccatacggaagtccacgaggccctacgtgggtcccatctcccctgtaccacctatgactcaggctcgaacaggcgcaaagcaggcgctggctgggaggtctgaggggactgcaggtggccctggagctgtggcaggtttggggctccccacttcctctcctctccccagccctgttgatgggcagccatgactccacagaagtcatttgacgcccacccgcggcgggagagccaggtgcggcagctggcgtggatcggcgatggcgtatgggtgtccatccgcctggactccaccctgaggctctaccatgcacacacgcaccagcatctacaggacgtggacattgagccctacgtcagcaagatgctaggtgaggggccacgccagatggggtggtggggtgctcaaggccagccaccctgaccgctctcccccacaggcactggcaagctgggtttctccttcgtacgcatcacggccctgcttgtcgcgggcagccggctctgggtgggcaccggcaacggagtggtcatctccatccccctgacagagagtgagtggcctgcacacctgcaggggcagtggtgctgccagaggtgtacgtgggttcacggggtggctctgcagggccaccttggagggtgccttgctgcccctacgctgaccgctctcctcttctcccatgctcctcccatgtccccagctgtggtcctgcaccgaggccagctcctggggctccgaggtaagcccagccacctcgtgtcccctcacgggagcctctcccactctccacctgtatgcgggctcagcgcctctgggttctctccctgcagccaataagacatcccccacctctggggagggcgcccgtcccgggggcatcatccacgtgtatggcgatgacagcagtgacagggcggccagcagcttcatcccctactgctccatggcccaggcccagctatgcttccatgggcaccgcgatgccgtgaagttctttgtctcggtgccaggtgaggctgggcccctcctgccatccacatcccctgcatgccagtggc

SEQ ID NO: 27578 - DNA, 1125 bp, Artificial sequence
  DNA replication origin
aacctgaggctgagcctgtgtcctaggactgatcccggagaggccaggggcctccccttcttcctgaggcctgggcctgccctggcagcctgagaaatcccaccctgggggcttctgggagggacaggactccagggcccactcctccaaggtgagtcttctgcccaggcagagcctggggggacacgggtcagaacggggctggcaagagcctgcctgcatgggcaggatggggtagcagtctctgttctcaagcagctgccccagggagccgggcctcgtgcttttatgccagctccctgggcaggggacagctggggtggggacagacaggatagaggcttgacgacggggaggccccagagaaggccggctggggtgcaggcacctgggcagcctgaggcccacctccctgggcaaaggctagtgcctggcccagctcccctaggcagagtgagggcccaggaggcagggtggccccatgagcagcatgcagaggtgggcccagggcaggcagcctcggcggcggggagcccctgcctcctccaggggtgctggggagtaggaggcccagggtagagccaggaccacctcggattctgcctgcgctgggcccaaggtgccctggacttgaggactctgggctggaagctggccaggagctgcccgggaaactgtcccgagagcatcttcccctcgggtggaagttcccctcccctcctcctcccagctgatccgcatccccgcactccctgcccgctggaggggccagactcaggtgaaagctgcaggttgagaggttagaagaggggcggcggcgcctggctggctaccccgcgggccgggcgggggtcaggtggtcgggggtcctatgtacaggtcgggccaggcagggcagcagcttcactcgggggtgtaggacacctgccacacgatgatgtgactgcgctctgccttggacagcacgggcttcacctggctcatgtcccctgcgccctcctccgtctcgtcgtcctctccgtctcctgcgggcaaagcagcagagtgacggccaggctccccccgcgcccaacctcagccctgtccctgggccccgctcaccaatgcggaagtcgatgtagccct

SEQ ID NO: 27579 - DNA, 1515 bp, Artificial sequence
  DNA replication origin
cagcctgcaccggcgcacacgaacgcaccttcctggccgtgaagccggacggcgtgcagcggcggctggtgggcgagattgtgcggcgcttcgagaggaagggcttcaagttggtggcgctgaagctggtgcaggtgggggcgcggtgagcgagcgggggcgcggtgtggggggaaggggagcggggacctggggacgcctaggtgccgggtgcgggcgcaggcggcctgacccttccgcaggcctccgaggagctgctgcgtgagcactacgccgagctgcgtgaacgcccgttctacggccgccttgtcaagtatatggcctccgggccggtggtggccatggtgagtatccgggaagcgggcgggcggctccgggacccccacccccgcgtgataccgcgcccgttcctccgcacaggtatggcaggggctggacgtggtgcgcacctcgcgggcgctcatcggagccacgaacccggccgacgccccgcccggcaccatccgcggggatttctgcatcgaggttggcaagtaaggcccgccccggggacggtcccagccccgtccggcctccccctgttcagcctgcgtggtacccgtgccggaggtctctttcccacgctcacacgcgcctcttccgcgcaggaacctgattcacggcagcgactcggtggagagtgcccgccgcgagatcgctctctggttccgcgcagacgagctcctctgctgggaggacagcgctgggcactggctgtatgagtagcccggcagatgcgcgtcacagaggctctcacactccagcctcctccagggcccaggtgggcgggcttctggccccaccccacagcgcttggagcatccctttggacgggctgctgaacatccacctgtctggacgttgcatggagggtggcgcaggcctctccaatccctggcgtacagggtttcctgcccgaggagctgctccaggagcctgcgcggctcgcctggaaacgtgccaggacactgtcctggtgcccagcccaacgtggtccaacgtttttttataataaagtcctcgttttcgtttcgatttgggcccaggaacaggcagctacgacgttaagacatttattacatacagagcagatatgtgggtttgcttgcagggccaaagcctgaggagaatcgtcacccctcccccagccgccccactgctcagcccggagtcacttcgagatcctgggggaacagacgagggagcggacatacatcacagtggaggtggcagggtggtggggagaagccggcagcgcagcggctgcagccctcggtggccagcggggcttgtggggcagctccccaagatctgtgcttctctggttgggggtgggtgcgggggctgggctgccctcataagggcctcccagacaggagtgcagtgggcctggaaggtaggaataggccagagaggcccagctgggcagggagagcagtccagggtggcgtctgccctctgcgggcttggagtcgg

SEQ ID NO: 27580 - DNA, 1382 bp, Artificial sequence
  DNA replication origin
ctcgcccaccagccgccgctgcacgccgtccggcttcacggccaggaaggtgcgttcgtgtgcgccggtgcaggctgcggggcaggcggggacgggccgtcaggccggcccagcaccggccacccgcccccggcccgcgccgcgcggctcacccgcggggaagaggttagcgaagatggtcagcaccaggcagatcatgatggcggtgcgggagcgggatccgcggggcggggcggtggcgcccggggcggggcctgcgcttaaagaggcctggtcggggcgctgcggcctccgcggggaggctgcttcacttgcaccccggaacccggcagccgtggggggccggagggcagctgcggaggccaagtctcctccagcagctcggacactaactgtatcccccacaacccgcccaggtggttccacccacgcggcgccctgctccgcaccgcccgaaccccgccccccccgcgcccccccggccagggccacgaccacagcgtcagcccttctctccccggtcctaaagacagagcgcaaagacaccacgaccctgggtacttcttttctctttattccctttcatagcttctgccgggatccaggcagagagagcactaatgggggaaagggagcgagcgcttcccgctttccccagcgtgggccctcggagttgggtgtgggggcagcagggccagaggaaaggcacaggtggcgatttgccccagccctcccccctaagatgcagaccctcagaacacgtcgcggaaggtgagctccctgctccgagaggcagactcgggtgtaacgcaaagacggtttctttcatcaataaggtccccactgcctcacagcccctaaggccacccgctggttctggcattctagacgggggtgcccttggcccttcctttgtcttcctgttttgcagggtaatcccagggttccatgcgtatcctctgcacattcagcatgggctcctcggtgcttgtgtctccatttttctgtcgttctgcgataatcatggcccggaggagaggcgggtacggcacggaggccaggctgtcttccggcgccggcgtgaacgcggtgaaggcctcctcctcgtgcttgggcaccagccgccagtcatggtacatgacgtgttcgatctcccgcgcctcgctctcagtcttccctgatgaagaaaaagaggcgtctgcacacacttgctgtgccgtcggcggtcggcatcgaactgccgggcacccgctctcccgagccttacctttgaaggtcaggatgccccaggccttcccgtggtccaagttctgcaaagccagaaggaagcggggtcagctcgcaaagctctcggcccccgaggtcaggaggtgggagcctca

SEQ ID NO: 27581 - DNA, 1755 bp, Artificial sequence
  DNA replication origin
gccggctcggaggccgccgcgagagcccgggacccagcgggtgagcgcagggcggctgccgaggcgttgcggctgctgcggccggagcaggtcctgaagcgcctcgcggtgtgcgtggacacaggtgcggcggagggcacgggcgatactcggggtaggaaaggcctttctccgccaggcggcgccctctgtccgactgggcggggcgcgcgtgccgaggggcctggggccgggcccgcctcccagtcgggggtttgtgccgaatggagactccccggtccggccacccgcccaggtagggcgctcgcgagggtggaaggaagcagtgaccgcgctcctctcccccggtcccagccatcctggaagacgccggtgccgacgtcctgatggaggccctggaggccctgggctgcgagtgccgcatcgagccccagcgcccggcccgcagcctgcggtggacccgagcgagtcccgacccctgcccccgcagcgtgagtggtcgcgggttcccgagggccagccgcgagttggctgttttgcttccatgatttcagccctggagctgtccctgaggcagctgccctgggccgtgcgcgtctcgcggatgggtaaagcaaggatggagaacgggaagtggaggtgcccaagccgttctgctggtatagagccgagctggctggagaaggttccgtctcgattcaggctgtggtctggattcctgccagccacagagacctggcctgagcttggccttggcaggaaagggaacactgggcttctgtagagcaggcctgtcagggcctgggcttggctggggccacgaaccgctttgctgctggactgcccaggcagggcccctggggcacccggggttgagacaggcagcagcgcgtccccatgtccccacagctgcctcctgaagtgtgggctgcaggtgaacaggaattgctgctgctgctggagcccgaggagtttctgcagggcgtcgccacactgacccaggtgctcgggtggtggcagtagtccctctctaatcaggaggggtgggttcccagccgggaggcgcctgctccgccggtccctgcccctgtagacggggctggagggggcatggggcaggccaggactcctctctgatccaaagccgtagaggtttctagggtgagatggagaaagctcctgggcacctgcggaggctacagctgctcctagaggatcctgagaagtgtcaggaggccggggtccgggcagtaggctgcaggcttcgtcctctgacagcagacagcctggcccctgcctgcggggagcagtgctcaggtgctgtggtgccaggtagcgtggggttaggctagaccccctgccaggtccctgtgtcccaggatcagtgtctctcaagctgctgctttgtgctaggtcaaagctaggctggagtacagaggtggaccaggatgaggggctcaatggaactgacatgtgcccgagcagccactccagggtctccttagcctctttggcctcgtgggaggcacagagctggttttctcagaaggggtaacggaacagaggctcctctcggcaccactggctctttttcaggcttgctgttctgcaaaccagctgtggcctggtggcccatggccataggccgcagcctcctgtgaacaactgtgccacacgttctcatcttcagatctctggcccaacccactgggtgccctggatctcccccgagaccaccgcccggccccacctggc

SEQ ID NO: 27582 - DNA, 1373 bp, Artificial sequence
  DNA replication origin
tgctgtggtgccaggtagcgtggggttaggctagaccccctgccaggtccctgtgtcccaggatcagtgtctctcaagctgctgctttgtgctaggtcaaagctaggctggagtacagaggtggaccaggatgaggggctcaatggaactgacatgtgcccgagcagccactccagggtctccttagcctctttggcctcgtgggaggcacagagctggttttctcagaaggggtaacggaacagaggctcctctcggcaccactggctctttttcaggcttgctgttctgcaaaccagctgtggcctggtggcccatggccataggccgcagcctcctgtgaacaactgtgccacacgttctcatcttcagatctctggcccaacccactgggtgccctggatctcccccgagaccaccgcccggccccacctggctgtcatcgggctggatgcctacctgtggtaccgctcactctcatgcccacagcagggctggctgggacgggggttcaggggaggtgggcacacttctggggttgctgtggcacagctgatcccacttctccaggtgggctctggcagaggccaagctcgggcagggcaggccccatggggagcggggaggaatggtcacctctgctcaggtctcgccagcacgtttcccgggggacacagcagccagagagcccgaaggtggccggtgccgaggtggccgtcagctggccggaggtggaagaggtgagggcctgtctgagctgggtgagtcaggtggcctgggtcccagtgattgggctgctggctgggtttggttcccagcgtggtacatggggcagctatcagctgtgtgtcccgggtagccttcctctggctcgtgcccatcagcttgcctcctccccaggccctggtactcctgcagctctgggcaaacctggacgtgctactggtggcctcttggcaggagctgagtcggcacgtgtgcgccgttaccaaggctctcgcccagtatcccctcaagtgcgtgatgccaaggctgaaggggggcaggatcacctcaaggtagtggtgcctccccggccttttgggagctgctcacatgaggttctaaaaggcttctctctgtccccaggcagtaccgggaatcccaggccttctccttctgcacagcagggcgctgggcagccggcgagccagtggcaagagacggcgcagggctgcaggcggcctggcggaggcagatcaggcagttcagtcgggtcagcccagccgtggctgatgcagttgtcacagccttcccctccccccgccttctgcagcaggtgggcccctgcctcctccaagccctccaggtgcagaagccccgtccccaggcgc

SEQ ID NO: 27583 - DNA, 1643 bp, Artificial sequence
  DNA replication origin
tgcgccgttaccaaggctctcgcccagtatcccctcaagtgcgtgatgccaaggctgaaggggggcaggatcacctcaaggtagtggtgcctccccggccttttgggagctgctcacatgaggttctaaaaggcttctctctgtccccaggcagtaccgggaatcccaggccttctccttctgcacagcagggcgctgggcagccggcgagccagtggcaagagacggcgcagggctgcaggcggcctggcggaggcagatcaggcagttcagtcgggtcagcccagccgtggctgatgcagttgtcacagccttcccctccccccgccttctgcagcaggtgggcccctgcctcctccaagccctccaggtgcagaagccccgtccccaggcgccctctcatgcctttgcctgctcctaggcgctggaggcctgcagcacggagcgggagcgcatgggcctcctggccgaccttcctgtgccgcccagtgaaggcgggcgtccccgcagggtggggcctgacctctcccgccgcatctgcctcttcctgaccacagccaaccctgatctcctgctggacctgggctcctgaccacacgtgggaccaccaggacagcatgcagccttggggacagaccagacaccctgggcggtgggggaggacccccagccacatgtggaccctcagcctgggtgggttctctggctgagcaggtctgacctcaggggaagggtgggtggttgcaggggaagttttaggtagctgggagaagaggggcttctggctggcagatggctggcggttcctgtgctgagtcctgaacacgtaggccccaggggaggcctcagcagcagggctgtgcccccccaacacacacacacactcggcagggaccagaaggcagctccagggccccactgccacctggaggcttggggtgtggcaccctcagccagaagcagtaggggactcccaaggatgtggaggggcagtgaggcctgggagaaggcccaggctgctcgcaagcccggcctctgcacggatacgtttcagctcacgccatgtgggtgttagacatcaactctacatttattgcagtcctttaagtctatgacggcggggcagccgctgacagcatgcagagcaagttaggaaaaaccgaggccctgtgggaacagcaacgcgggctccagccaggctctcgtcctcgcagcctcccacaagacctggggctcagggcagccgcttccccacccagcacagcagcagaggggccctagagcccccacagaaaggactgtcccagcctcgggagcaagagatggctccctccggacgggcctcatccaactccgccctggagtgtggctggaaggaagggacagagaaagaagggacagaggaaaggggctgtcccagcccaagaaggcagttccactgggaagtcagtcaggtccggcggcagcgcttcctctggcagggccgaggctcgcgactgctggggtgggcggaggtcgctgcctggggatcggacactggagccttgcggcggctgcaactcatgctcaggacccagcccagcttgttgtgtagcacctgcttgaggcccggcggcagcggcagaccctccagcgtgtctccc

SEQ ID NO: 27584 - DNA, 1282 bp, Artificial sequence
  DNA replication origin
tctccctcggaccagagcaggagtgtggctgcgcctccctgccccacttccagctaccacaggtcatgtgccctggagcagtctctcctggcctcgcagggtcatggctgtgggacgcgggcgtgtccacaggccaggccagtgtctgacacacgcatgctgcttgtcctctgtcaccatgggccgtgtccttccggggcggctgcttgtgtgacctggtgctgctctctgctgtcacagctcccctgcgctgctgttccggctcagccaggtgtcctgggaggggtgggctcctctcctctgagtgaggactccctaagcccggtgggtccattaggccttgggggcaaattgggaaacagggtccttacccaccgggtgggggccgtcctgaggtctcctggagctccctgctccagccagggagaggcccccacctgccttcccgcccgcctccagctcctgcaggtcacatgcctgagcctcacaggctcgtggctgtgggatgcaggcgtgcctgcgggctcggcagtgttcgacacatgtgctgcttgtcctgtgtcaccaaatgggcctgcagtctgttgtgggcaggaggtaggcagtggcttcagtctttctccttctccagggaacccggccctgggcctgcagtgcaggtgctcagttctgtgcccgggctcctgactcagggggtctaccctggctctggggacccgcacttctaggcagtggggtagagttgtctgggcctgccttgtctgtggggtggggccatcccctccagaaaggacagtgtcctgccctgaagctggctttcgataggtccacgttcacctggaagctggtggcgcccatgtcatggtcccctgtggcttctcctggggatcacatcatctctctggaccagccctcaaccctcactgtcacaaggcctctgccacaggccccccgccaccacttagcactctccctgctgaccccctggtccattcagcccctgggtggcccccacacagtctgtgacagggaggaggctgggaggggcactgcctcccacaaggagctcacgttctggtgggaggaggccaagaatcaggaccaaggagaacttcagtgaagcaaaagaagaaaaatggaacaggggtgaaggggctggagaagcctcagggaggtgacagctgaaacctgcaccaggaggggcggggcctgtagtgggcactgggcagtaggaccctgtggtgagccaggtctgctcaggtaacaggaaggtcgttgggcc

SEQ ID NO: 27585 - DNA, 1747 bp, Artificial sequence
  DNA replication origin
agctccgagacaggtgtgcccgcccctcgccgccggagccaatgggcgcagggggcggggattgtttacgtctcgctccggggcggaaagtgggtcagggccgggccggcggagcgcgcagcgggggctgcaggtgagtggcggggcacgggccgacgtctcgggctctgggcgggcgcgctgaccttgcgggcgcggcggtagcagcgcggccagggcgccgcctttgttcctctccggagggccgcgcccgagagaggcttccccggtgccgccgactccggaacccgcgcgcccgcgggagggaacagccaggccgggctgccgccggggagggcggctcccgctgcacacgcgctcgcctggggctgggcagggttcggcggtccgggcgccgcgatccgccccggcctccctggaaccccacccggggcccagcgggcgttgccagccgcgagcccggcgcaggggtcggccctggaaggctaggcgggaaccccggagctggcgagggaggtgccaggcaggtggcctgggaagcgcagacctggccctcgcagccttttgcattttataccataacagcggccagcgctgagcaggttttaagatttgtgtttcacgaggagccctggcggtagcgagcggaggggaaggcgagctgcgcggcccaggagacggtggcgggaggaggatgcaggcgggtgcggcggtcgggccgggcgtgaggggaaggtgtcggggagcggtcacggtgcttctggcatgaggaactgggaggccggagatgccatttgtcaaaccggacgacagaggaggagcgagtggaggttttagatgcctgcgggacaggcgggcggggcagccaggttcgtgaggtggaaccggagagaggggctgggattcgcattccggagtcatgggtgtctgggtggcgtttcacaggatctacctgggttttattgagctgctcagatcctggagtgaggtacgggctcctgaagcgttctggagccctggctgggcaccggtgcggcccctgcagtccccactttgagtgggtccgtggcccagcctggaagctcagggctgggagtgctgtgagtcttcctttgcccagagcctgtgttttcttctagattctttccaccatggccagacgcccccggaacagcagggcctggcacttcgtcctgagtgcagcccgccgagacgcagatgcccgggccgtggctctagcaggctccactaactggggctacgactctgatgggcaggtaggttccagcgggcgaggcggacgtggctggcctaaggtgtggagatgccctaggcaggcaggcagacattacctgaacacggaatcagtcggagaaaaagatgcttctgaggctagaggaccagtccaaacctgggcctgtctcctggatgcaccgcattcagtaagactctttaatttggcaaaggacacacacagcctcaggggtgacaggacctcagaacacactgcattcttcactgtgctttctcctctgaaacacatggtgcatggagaggttggcagttgcttttggttcattcaacagaaattctccactacggggctgggcactgtggctcacacctataatcctagcactttgggaggctgaagctggaggaccacttgagcccaggagtttgagacctgcctgggcaacatggtgaaacactgtctctacaaaaatttaaaaaatgtgtcaggcgt

SEQ ID NO: 27586 - DNA, 892 bp, Artificial sequence
  DNA replication origin
gcttcccaggccacctgcctggcacctccctcgccagctccggggttcccgcctagccttccagggccgacccctgcgccgggctcgcggctggcaacgcccgctgggccccgggtggggttccagggaggccggggcggatcgcggcgcccggaccgccgaaccctgcccagccccaggcgagcgcgtgtgcagcgggagccgccctccccggcggcagcccggcctggctgttccctcccgcgggcgcgcgggttccggagtcggcggcaccggggaagcctctctcgggcgcggccctccggagaggaacaaaggcggcgccctggccgcgctgctaccgccgcgcccgcaaggtcagcgcgcccgcccagagcccgagacgtcggcccgtgccccgccactcacctgcagcccccgctgcgcgctccgccggcccggccctgacccactttccgccccggagcgagacgtaaacaatccccgccccctgcgcccattggctccggcggcgaggggcgggcacacctgtctcggagcttcgggagagggggcgggagtcgggtgacaaagctattgccgagaggtttcaggaactgtcagtcctaatccaacgttcctattggtcagttcccaagcggttggagacaaagctcgcgcgcacattggacccgggtgggaggtggtaccgcaggccgcgttgaccggaaagtaggtccgtgtcatcgtctgcgccggaacctgcgggaccggatcgagagctcctccggcaagctgattggctgggacagcaggattaggcctgtcaagaagagccacgggcgggcacgcactgcccattggttggaaggcccttcgctctagctgggaggctgacggcccgcgggcgtaa

SEQ ID NO: 27587 - DNA, 1032 bp, Artificial sequence
  DNA replication origin
agttcccaagcggttggagacaaagctcgcgcgcacattggacccgggtgggaggtggtaccgcaggccgcgttgaccggaaagtaggtccgtgtcatcgtctgcgccggaacctgcgggaccggatcgagagctcctccggcaagctgattggctgggacagcaggattaggcctgtcaagaagagccacgggcgggcacgcactgcccattggttggaaggcccttcgctctagctgggaggctgacggcccgcgggcgtaagcggactgcagccgcgagctcctggaggcggcgggatggaggcggcggccggtgagtggcgggccagggtgcggagccgctccagggcctcgcttggggccccgccgcgtcccttcccggggcggcctcgctgcgtcgcgcgcctccggtgcgaccatcaccggccggcgtggctgggccgggccagaggccgcggcgcgggcattttctaaacagggtcgtttcccgcgtgctcctgcttcgatgtggaagctccgtgatctcggagggcctgagtcgtggagttgggggagcttttaaagttaactttgttgagcaccgcgttgtaggcgggcgcggtggcgcctgtgggccccgctatcctggaggtcgcggttgcaactgcaccgcagcccgggcaagagcgagaccctgtctctaaataaatcacacgcgcgcagtcatgaaagtaagacggacgccagaatctcacatgcttttaagttctttgtggaagtggcgctctcagtgttcagaaaagtgtaagttgcgcgggacagaattcacaccagtggggacgatccgttcgccagatcagcgccgtgggccctcctgagtagtgggagccgcatttatcttctaagagacctcgagtccgataccaaaaggaaaacattcctcggacagcaaggtcttgcagcacaactctgacagattagaaaccgagtgctggagtcttttgtttttgagacggagtctcgttctgtcgcccaggctggagtgcagtgg

SEQ ID NO: 27588 - DNA, 1569 bp, Artificial sequence
  DNA replication origin
tctggatttgctaacccataaagctgaccgggactcattgtccatggagagcgcactcgccttcctcggggagatggtgcttcgcctccttcctgcacttccagccccactgccccacccggcaggctcatgctgactgtgctttgctgacaatctgcttaggagctgcctcagtttgctgagaagtgaaatgttcttgggggaaccctcagggttgttgtcccggttcctgacactaaggcctgcatttaccatggtgctcagcccaacacaccagacaggcaccattcccccacctctgccaacgaggagagcccctgggggttaacactgccgctggtgccagcactgatggcagcatggcagtcaggacccaggcctgacagagtccccggcagctacagaagtgcatgctccctctctgcacgggccacttctggtacctcttggtgttgaagtaatttaagtcagaaccccttttattgccccaggggtgaccgggaggccgtggtctcggggctttgtgtttgcaggagtgtggggctggggctgccttttccgcgtcccctggaggagacctcaggcagcctctgtaggtctgaggacccgcctgcatgccaggttctccgggaggctttggacttgggagcctttgaacgtgcccttgagaggcggatcagaagggggcaggttttacgcatcatgtgttgagcccctcacatgcaccctccaaggacctgtcggggatggagcagcttgctggagacaaggggcatggcctcagcggtggcgccggggtgagaatgcaggggttttgccaaggtatctgcacacagcagcccctgccgtgtggcagggacaggatgggaccctggaaggaagaggagctggagctgtgctggaagcagccggctcccctcacttaccgcacattgcagggaccgagagccggggacgctggtgtgtgacaacgcgtggttgttgccacccaccctgggccctctgctgcctctgccgagcccaggtgcactggctggggaaagagtggagtctggttcccgttagaaatagcagggggctggcagtttcatgatcatgtgacccacgtgtgtgtttgcacacgcgcacgaaggaacgcatgcacccttccacacagcgagaggagttgggcagtttccactctcagcagcgccgcctcaggcaggtgcagggagtgccgtggtcttagagggtccccccgggtctggggctgcaggggacctgcctggaggtctttacatcggggcgaagtggggcacgggctgcctctgggtctggcgattcaccactgccccgctcagaacgtgggtgcaagaggcagtgggtgaccccgcgtgtgtgggcacagtgggcaccaggagccctgaccttctctgtcgtgtttccgcccagagcctggaaacctggccggcgtcaggcacatcatcctggtcctctcaggaaaggggggcgttgggaaaagcaccatctccacggagctggccctggcactgcgccatgcaggcaagaaggtgagcgccctacccctca

SEQ ID NO: 27589 - DNA, 1532 bp, Artificial sequence
  DNA replication origin
tgccgtggtcttagagggtccccccgggtctggggctgcaggggacctgcctggaggtctttacatcggggcgaagtggggcacgggctgcctctgggtctggcgattcaccactgccccgctcagaacgtgggtgcaagaggcagtgggtgaccccgcgtgtgtgggcacagtgggcaccaggagccctgaccttctctgtcgtgtttccgcccagagcctggaaacctggccggcgtcaggcacatcatcctggtcctctcaggaaaggggggcgttgggaaaagcaccatctccacggagctggccctggcactgcgccatgcaggcaagaaggtgagcgccctacccctcactgggcggagccccgggcagctgcccgcatcccggtggaggcctggcggtgcccccggcctaggctgtgccgctccttgcaggtgggaatcctggatgtggacctgtgtggccccagtatcccccgcatgctcggggcgcagggcagggctgtgcaccagtgcgaccgcggctgggcacccgtcttcctggaccgggagcagagcatctcgctcatgtctgtgggcttcctgctggagaagccggacgaggccgtggtgtggagaggccccaagaaaaacggtaacggccgggcggcgcgtccgccgtcctggtgaagggggttagcgtccgtgccggcctctcctgtggaaatgttcctcttcagcagccaggcctgttcctggggacctgcacatgacacccacgaccaggcacagggctcaggctggcggtgtgtctccagttgggtccgtgctgccacacagctgtccccaactcccggtcagagggagtggggtctgctgagaccctggccatggcatgcagggacctgaggccccagtgtggcaggtcataggggcagagctgagggggttctggtgcctctggagcaggtggcattagacgcccccaaaggcagggagaggctggtgggagtgaggcgcaggctgtgggtgcaccagtggggcatccaccacggagaatgtgggtgctcccatgtgtgggtacagacgcctggagggtcctggctccgtgttctgatttggggcctcggggagtcagcgggggctctgtgggcaggggccagacactgcagaaagggacgctgtaatggccccggccccatctttgcactcctgcagcgggccagggcctcccgagagcctgtgatggaggctggtggcaagtgacacctgatggactgcagcccctcggcctgacctggctggttcttagtggcgcagggccacgtgtgcagacctgccctgccctgaccgccccgtctgccccgtctttgcagcgctgataaagcagtttgtgtccgacgtggcctggggggagctggactacctggtggtggacacgcccccggggacctccgatgagcacatggccaccatagaagccctgcgtccctaccagcccctgggggccctcgtggtcaccacgccccaggtagcgctgcggcaccttcc

SEQ ID NO: 27590 - DNA, 1287 bp, Artificial sequence
  DNA replication origin
gctgtctgaccccgaaggacagaagactctagaaacatcagatctgtcgccacagcagcggacacgtttaatggcaggcgcctctacagttacaaaacatgcctgaggtcagttcgcccccttagggggcactccccgagctaaacacagatgacagcgacccagggtgctggaggcccggggtcacctgaggactgcagaagtcccgcgctccgctaactgtgtggacacgcggctgccaggggcacaggtaggcaacatggatgggaagagagcccaggccgcccccgtctcacagctgcagagcacgcagaccacggcactgcaggccaaccaggcagagctgctggtgcgacacatcctggggctgggctggtcggggagaagctctccggctgacgctgcctgggcctgcccctgcagggcccgggaaccgagcccaggcctctgtttctctgagaggctggagcagagcccttggtggccctggaaagcggctgcaaggtggccttagtcaggggaggcacgcgggcgtcgcgtccagaatcttctgggctatggaggtgagtgcagcgaaggcggggctcccagggaactcctggatgaagtcgtggccctcctccagggtcctcatgagcgcagggtccaggggcacggagcctgcagggcacagtggaggcggtggcgccatgtccgcaccttccactcccaccattggctcagctggacgcacccgaaccacccgtggccttagaggggattgaggcgctgccagacgatttccacctccagacccgcggccctcccagcaggctgggtcctgccacccgagagggccctgagaagggcgcgggcgaatgacctgcaggtctcagcggcatggcgtgtggcccgagaagagaggaggaaaccgctcccgtcccctcctctcccttgggcactgggggcatggaggtcaaacccgcccagggcagagatggaatgggaggccgcgaccccagcaccagcttgggacactcacctaagaagggcaccccggcgagctgggccagctcctctccgccgcccctggagaagacgctggtgcactcctaggagacggtggtgagcccagcactgcccaaagcccccaccggccaggtgctgcctcgccccctctgcaacccccgggactcaccgtgcagtgtgggcaggtgaagccgctcatattctccacgattcccatcacccgcaagcccgtcttcctacagaaggtcagctcgcgcctcacgtcccccacggacaccg

SEQ ID NO: 27591 - DNA, 1276 bp, Artificial sequence
  DNA replication origin
tgcactccagcctgggcggcagagcaacaccctgtctcaaaaaaacccacctggctcaggggaggggaggatggtgttgcctgggtacgccttggtctcctcacctctctcctccccggcttggccacgcccagggcccccgcctggatcctgccccgccaccgccctggccaactgccccacacccatgtgtcttcctggtccccgtggctgcccctcgggctccccagaacatcctccaggaatgatggcaccaactcgaatccccaggggctctgcgtctcacccctcctctttgagggatcgccctgaggaccaggcagtgtccccgaggggtgtggtccaggcagccagggcgcggctgaggtggggtgaggagggagcgcggggcgggccgtccgccttgcgtgggaagccgcaccccctgcagatgccgtgggcgtttgtctctgccccccccaggcaccggcatcgtcagcccaggtgctcctggtgccctctcacccacccagaggccgcccgggttggttccgggcccccacctccagggtcctcccctgctgaaggctgagctcttcctttgggaaaaatggcgcgttctgctttctggaagggctttcctttcgggtctcactgggaagaggtgcaggggacccctgggattggagctcccttctcaacctgacttctggtctctgtcccgggaggggcccctttagtgtcccagggaggccattcttccacggcgaaggggccagctgtcaggtttatcacaaaatctccccgaattcccaccaaataagatgcaaacacatcagcacctgggcccaggggcttgttgacaacggaacgaacgaacctgccggcctggcccagtccagcccagaaacttacagaagcaggtgctgtctgaccccgaaggacagaagactctagaaacatcagatctgtcgccacagcagcggacacgtttaatggcaggcgcctctacagttacaaaacatgcctgaggtcagttcgcccccttagggggcactccccgagctaaacacagatgacagcgacccagggtgctggaggcccggggtcacctgaggactgcagaagtcccgcgctccgctaactgtgtggacacgcggctgccaggggcacaggtaggcaacatggatgggaagagagcccaggccgcccccgtctcacagctgcagagcacgcagaccacggcactgcaggccaaccaggcagagctgctggtgcgacacatcctggggctggg

SEQ ID NO: 27592 - DNA, 1282 bp, Artificial sequence
  DNA replication origin
ccaggccggcaggttcgttcgttccgttgtcaacaagcccctgggcccaggtgctgatgtgtttgcatcttatttggtgggaattcggggagattttgtgataaacctgacagctggccccttcgccgtggaagaatggcctccctgggacactaaaggggcccctcccgggacagagaccagaagtcaggttgagaagggagctccaatcccaggggtcccctgcacctcttcccagtgagacccgaaaggaaagcccttccagaaagcagaacgcgccatttttcccaaaggaagagctcagccttcagcaggggaggaccctggaggtgggggcccggaaccaacccgggcggcctctgggtgggtgagagggcaccaggagcacctgggctgacgatgccggtgcctggggggggcagagacaaacgcccacggcatctgcagggggtgcggcttcccacgcaaggcggacggcccgccccgcgctccctcctcaccccacctcagccgcgccctggctgcctggaccacacccctcggggacactgcctggtcctcagggcgatccctcaaagaggaggggtgagacgcagagcccctggggattcgagttggtgccatcattcctggaggatgttctggggagcccgaggggcagccacggggaccaggaagacacatgggtgtggggcagttggccagggcggtggcggggcaggatccaggcgggggccctgggcgtggccaagccggggaggagagaggtgaggagaccaaggcgtacccaggcaacaccatcctcccctcccctgagccaggtgggtttttttgagacagggtgttgctctgccgcccaggctggagtgcagtggtgcagtcttggctcacggcagcctctacctcccaggctccagtagtcctcctgcctcggcctccctaggaccacaggcatgggccaccatgctatgctaattttttttattttttgtagagacggggtctctcttgtgttgcccaggacggtctctcaaactcctgggctcaagcgatccgcccgcctcggcctcccaaagctctgagaccacagctgcgcgccgagcccccagccccctccctggtttcacgttcgcagtcacccactgtgcctgttagattcgattgcctttgcctttaattgatgacagctgggggggccgccatgccttccaccccatcaggcccttgcgtcttccagcaagtgcactgggcaggcccctgaggacactgaggacctgtcccc

SEQ ID NO: 27593 - DNA, 1078 bp, Artificial sequence
  DNA replication origin
cacgagggggttaacagagccagggccagctgggttgggccagccaggtgacaggcgcgggctgccccgcagtggggaaatccagagggcaggggtggccggcacagcagacgtaccctccctcgctgcctgcctgcagcctgccctgcatgcaggatggccctgaggaaaggtgaggcccccgagtgccccgccacccactctaggggtggccagtctgtgaccctgagcccgctggggagaggccggggtagcccccaaggaagctctggggggctcagctctgggggtctgcgggggactctggggagcccacagtcggaaatgcggctgctggggttggcagggggacacagctgtgcctggcaccaggggtctctgtcccgtcctccaccctaagggcgctggcggcggcacaggggaggagggccaggtgcaggccggacccttcagctcccagcacagcggcgggaagtgccccgcacggcccgcgttgtgggcccggcccaggcaggagacgttggctcacaccccattgtctctgtggggtgaccccttgcagcttcggccacccccaagcctgagctgagctccagagctggctcaggccactcccaacccatcgtgacagaagggcagtcgggggggccccacctcgcccctgccaccatcccagcaattccacactctctgaggatgggggggccatacagtagaggttttgggtcatcgctgcttgggagcctgctggctgggtctgtggggcctgtggccccttgtcctgaaaggcaatgtgagctttggtggccgacggtccagggttcctacctgtcccccgacggcggtgccccggtcccctcccgcagcacccgaccaaggcctggatgcaggcaggtgagaccccgctggggggcctaactggggcaggaggtgcccagctccctgtccagcctctgagggcagtgagcgagtgcccaccaagacctgctgcagaatattctgaaaatggccggaccttggccaatggctcagttccctccccttcctctaggccaacgtggcagactggcctggctca

SEQ ID NO: 27594 - DNA, 1558 bp, Artificial sequence
  DNA replication origin
acagggacagatgtattccaggacgtgacctagacatggcctcacctccctcgggtcctgtcctacagaaagccaggccctgtgcggcctgaagacaggcagaatgcggctcatggaggagcctgggaggccaccggccttgagctgggagaggccacggggagtggggccattgggggtggcggcagtgatgggggcctctggaactcaatgggctgaatgtgtgtgtaggcctctgcgttaccacaggaatcaaagaggcctggagcccccttacgcggctgccgcaaccctggtgaggctctgcccgcccgcgacacccggcccctcccaaaggaagagaacagggacagattctcccttcccacctggaatgtgtggggctcccaggtggggtgcgcggcctgacggaggccggggcccccacggggacctctcctgagaggaggccgcccgggtctgctggcctcaggccccaggcccctgctgagtctgcgttttctgctgagtaaacggatcgtgggtctttctgggtgtggactttctccccgtggatctataatttctcagaagaggagccgagacgccacctggaaaatgatcaattctcgataaagggaagacgatgacagtgggccggcggcttcccacagctctgcacggggcctgccaggtgaggccggagctgaggatggggtagggccctggaaaactgtggtctccccgagccctggctgtgcccccgcctgcaccccttccggctgcttccctgcacactttcccactgccgagggactggtgggcaggccccactgacagccaggggaggggcctgcagggacctggaggggaggggctgcacctgctcaggccctgggggagagagcgactggttgggaagtggtttgagcaggtggaggggaaccaggggcctctggaggcaggtggagacggagcccaggggtggccttggacatggctgggcacacattcctgtggcctctctgcacacaagcggtgactgtggggcggccaggccctcaccagagccttgggggacagcaaggggcaggtgaggcttgtctgaggcacaagacctggctcccatggccaggccacccccacacactccccgaggatggcgcagggcaaaagcaaacaggcgcctgcagccctgccaggcattcctagaagaggctgggggcggggcagtggccagacaccagcgcccctggggtcacgggagaggcagggtgagcttgggccctggacagcaccgtgggcctgaagcccaaacggcagctcccacccaggctgtagggaacccccgggagggcgggtggatggctgggtggggcacggggaaggggcggcagccccttagccccacacggctggctactcaggccaggggtgggctcaagaccccaggagctgcccgaggagccccctgcccgcaacaggacctggtaaaaccctgggctccccaaaccggcctcaagccccagcccctcccaggctgctgcaaggggtccccaccccaacctggctgcccagc

SEQ ID NO: 27595 - DNA, 1913 bp, Artificial sequence
  DNA replication origin
tgctgggattacaggtgtgagcaaccgcgcccggcctgttgttctttctttgggagacagtgtcttgctctgctgcccaggctggagtgcagtggcatggtcttggctcgctgcagcctccacctcctgggttcaagtgattctcctgcctcagcttctccagtagctgggattacaggcacccgccaccacacccggctgattttttctattttagtagagatggggtttcaccgtgttgcccaggctggtctcgaactcctgagttcaggcaatccacccacctcggcctcccaaagtgttaggattacaggcgtgagccactgcgctcggctgactgaccttatttttgtctttaaatgcttcgtactttgtaggaaaaatagctagaacattaaaactcgttttaataggtaacctaaaagcttatgacaatttgtacttcctctgttttaaaggtctccttagaagtgttaactttgcttccctcgtaggaggcagagggagatttcttaggattgagaatgttggtgggaacacagggaatattttaaaacattctcagattcttttcgccagaagggaagaacagattagtgagaaaccatcttggcatctaccagacccccgcttggtgcagctctaccagctgaagagtcactcaccgacaccactgcccatagcgggtggggaacctcgggggtgaggcgcggtggtcttgagcctgtgcgtgggcaccagcagcttctgtcagagctctgccctgaggccctcctggtgcggctgcggtagaagggccggggctgtgtggagaccccgctgttgccgccctgtgttttcctgctaactgttggccccgtggctgggtttgcattctcctccccccgcccccaccccatctgccctggtcagtgctggtcggaagggagaccatctccatctcgagaggaggtgaccagctgcctgcctgcaggggcttgggtggcctcccctgctgctggtccctgtgcccctcctccccgtgcttgctgtgaggctgcagctgtggcggtttcttttctgtgtctcctgcattgctgttacctccataatgtgaaatgtaaaccatgtgaatgaaaaggaagctccgtccctgtcgtcctctccaggccggtgcgggaaggcggatgtgtggctcatcccggacgctggcttctcttccctcttccacacgcgcacacccgccgggctctgctcaccttgccttctcagccttgtcagtcgggcagtgtcctaaggttaccaggaggtgttctgaagcattttttgagacgtgatgtcgctgtcacccaggctggagggcagtagcacagtcttggctcactgtagcctcgacctgtgctcaagcgatcctcccacctcagccccctgagtagctgggaccacaggtgcctgccaccatgcctggctagttttttgtatttttagtagacacagggtctcgccatgttgtccaggctggtctcaaactccagggctcaagtgatccatctgccttagcctcccaaagtgctggtatcacagacgtgagcctccgtgcctggtctgccatcctgtgaagttcccgtgataaagtggtgcgtttctcttgcaggagaagtacagcatcggggagcccacagtgccatccaccctggcagaggagtttacctacaaccccttcatgagagtgaggtgaggcccagggcaggtggtgggcgcgggcccctcccctctggcagtcccactgctgcacacacagccggtacgtccgagaccccagatggctgaggctgccttggggagctgtcacaggtgcagccgcagagcccgagcactcttcttgaggggggtccggcctttcctggcaccttggccggggtgtgagtccttct

SEQ ID NO: 27596 - DNA, 775 bp, Artificial sequence
  DNA replication origin
cctgtggagcagaagccccaggccccaagttcgcctctgtctgcccttccctatctctggggactccatggcctcctgctggtcctcagactcgaggtctagggcccttcaggggaacaggctccccaccgtccattcccatctctcgtgcccagaaggactcctggccttggcctgtgcccagcaccgctgcatgcttctctgccccaggtggtgagaagtggggcggcctccactgtgctgggtgctgggcaccctcctctcaggggactgccctgtttctggggcagacggccacgtgaggtcagcgaggccaggacagccgcgaagcagcaagaggagggcaagcggggacagaggcctgggcagtgatggggtggggatgccgtcctgaggccgaggccggaaggagcctgggtgcgcctgaggtgcccagcggtgtgggccgcatcttccgccatgggtgagaggtggtcccgctcagctcagccagggtggtgagaccttggtcacagggtggcgctggctgctggggccaagggaagatgggagccaggcatgggcctgagaggggctgctgcgtgtttggggagagggctggatttgtgagggtctcagagccacagttggtgggattgggggcagtgagggaggagtgacttgggtttcgggtctgctcggccagttgggtggttggactgtcagctgagacttggaaggagatgtgggagccggaatgcaggggggctgagtctgggcagccgtggccggaggg

SEQ ID NO: 27597 - DNA, 1141 bp, Artificial sequence
  DNA replication origin
ggcgggcagcgggcggcgccgggccgtcgtttggcgaccgctgacgcggtgtctgttgcgcaggtgcctaaggccgcgctgccgggctcgagcggaggcggcgcaggcgctgaggctggcgcggagcgggcgcggggccgcgggtgcggaaagcgctaggtaagcagggccaggcctgcgtccgccgcggcctccacgctcgggctgggccggccgcgcccctgacgcctccagggcatcgcgtcctgcccgggccggcgccgaggagagcctggggcgcggctctgaggcgcagcgggcagggccccgggacgcctggcccaccccgcacctgctgccccgctgcaaggaccgcggtctcgcggcgccgcctgcggtggtggagctgcccgcccggcgccggagcccccgtctggggacccggcgtgtcattcgcccgaggtggtcgcgcggccgggccaggccagcgccccgggcgggtgcgcagcgcagggcactgggcgggcggaggcgcagacagggaggcgtccctggcggtttccagatctcgccgaaagctgtcaaggctctgcagggggtagaatgtcgccattgctaaggaaaggacatggattttgaggtcctcagaattacagttttagggacattcataagggtccaggcagagagttccagcgggactgtgtgcatcggcagggcgtgcgtaccccattctaagggaggccccagcccccgtatttggtgccgcccagttcaagggaagcaagatgctgtgaaacttcctgatttaaaaaagaagtgcagtgacgcacgcctgtcatcccagcactttgggaggccgaggcgggaggatcgcttgagtccaggagttccagaccagcctggcaacatgttgagacctcatcgctacaaaaactaaacaaaatcagccgggcgtggtggcacacaactgtagtctcagtcactttggaggctgaggtgggaggatcgcttgagtccaggaggtcgaggctgcagtgacccttgatcgcaccactgcactgtagcctaggggacagagtgagaccatatctcaatttttttttgtttttggggccaaaccgaacatgtttctggacttggtccaggccccaggctgcag

SEQ ID NO: 27598 - DNA, 1474 bp, Artificial sequence
  DNA replication origin
gcacctgcgcaacagacaccgcgtcagcggtcgccaaacgacggcccggcgccgcccgctgcccgccccgccaggcccgcgtcccccggcccgcaccgccccgccgcacccaccgaggcctcggcgggcgcaggcggctcccagcgcggcgaggctgcggcggccgagcagccctcggcccaccaccatgacccgggccgggctggactgccgagctgcccaggactgcaaaacaccggcgtcggcgcgtcgcagccaatcagcgcccgcctcgcgctgccctcagccaatcagcgtccacctcgcaccgtccgccaaccaatcaacgcgctcgcgctcaacttgttttgtccgcgagccccgactgccacgggccgggagacgggcctgggagcggcggcggcggcccgagagctgcgccgggagagctgtgccgcgagcctccgcctcttttttggcaccgcacagtggatccctggaggccgagcgccacgccgcccgggtacccggcagatcgcgaggtggaacgggccgtcgctgcgggggacagcgttccgaggcagttggtcctctccgggatgccgtaggcatcagctgaccggcccagcccacgtgactacaggggcacttgatgggaatcatggcagcatccaggccattgtcccgcttctgggagtggggaaagaacatcgtctgcgtggggaggaactacgcggaccacgtcagggagatgcgcagcgcggtgttgagcgagcccgtgctgttcctgaagccgtccacggcctacgcgcccgagggctcgcccatcctcatgcccgcgtacactcgcaacctgcaccacgagctggagctgggcgtggtgatgggcaagcgctgccgcgcagtccccgaggctgcggccatggactacgtgggcggctatgccctgtgcctggatatgaccgcccgggacgtgcaggacgagtgcaagaagaaggggctgccctggactctggcgaagagcttcacggcgtcctgcccggtcagcgcgttcgtgcccaaggagaagatccctgaccctcacaagctgaagctctggctcaaggtcaacggcgaactcagacaggagggtgagacatcctccatgattttttccatcccctacatcatcagctatgtttctaagatcataaccttggaagaaggagatattatcttgactgggacgccaaagggagttggaccggttaaagaaaacgatgagatcgaggctggcatacacgggctggtcagtatgacatttaaagtggaaaagccagaatattgagttatttcttaacaagtttcgagagagaagggagcaagacaagagcaagcaacggctattaaatgtcacaatcctttaattagaaaccatttattggccggacgcggtggctcacgcctgtaatcgcagcactttgggaggccgaggcgggcggctcacgacgtcagg

SEQ ID NO: 27599 - DNA, 1051 bp, Artificial sequence
  DNA replication origin
aggtggagtctgttccctcttcccaaagctgctgtcagtcgggggggccctttcccctccacccacatcagagcttcgaggtaggacggaggctgtgcctgtgacttgtccacatctgggcccacatctgcccaccatgttgccactgcagtctctgggtgggtgctcggaggggagctcagaaccggcctccagccctgcctctgtcctggcctgggatggagaggcctgtgggaagtgcctgcccctcagggcagctgcagagcagagtgtccactgggcccagaaactagcaggaggcggggtgggtgtccagacgcagcccctcctgcaaatccttcctcactgcctgcattcccaaaacagggagtggctccaagtagctgagaggcagaaagaccatatcagggcctgtgggactcagcggggctgtggagaccacagctaggccttgcgacagacctggggctaagcccaagcagccccggaggtcatcgtcagggcagctggtgggcacctggcagacagcacgtggccacaagcaggtgagggtcattactgaggagtccctcctactcccaggacacaggggcggacagggcaccccagcctgcctgagtctggcctcagttatgagcgggcagctggactgcagatggccactgatcccagccctatccccaggggagggcacagaacaaataccacggaactggggcagcaggggcctgggggagtgggtggggccagagagtgggtggtgcctgaatgggtgggcctctacagggaaggctaagaggctattaatccgtctccctgtgcacacacccaacactcgctgacctcaccaacactcaggcaattccacaaggctccagaaggaagcgtccactgcgcacctggattccggatgagccaaggtggtgggtgcggacccgactttaatcctgccccaccactccacagcgaggcctgcagcctcactttcctcatcctgaacatgaggacagccctgcccagcctcccagggctgagaagagagcctgagcat

SEQ ID NO: 27600 - DNA, 988 bp, Artificial sequence
  DNA replication origin
atgggctctctgcccaggtgggacagtcctgggctgtggtcggctgattcccccgggaccttgggactgggtcagtgccctcctctcctgtgtcagaatgaggagaatctcagaaaggccccctccctggcctggcaccctggcaacctgcaagatctagggggccacagcggcccagggtcttgggaaggatcctccggccggcgccgccacgtctccgactttcctcacatgtgctgggctctgctggtaactttttggcctgctgagtccaggcccaggctgatgagaattcacagggctacagttaaagacggggagagaggccagccgcagtggctcacgtctgtaatcccagcactttgggaggctgaggcaggcggatcacctgaggtcaggagttcgagaccagcctggccaacatggcgaaaccccgtctctactaaaaatacaaaaattagctgggtgtggtggcgggcacctgtaatcccagctactccgggggctgaggcaggaaaatcgcttgaacccgggaggcagaggttgcagtgagccgagattgcaccactacactccagcctgggtgacagagcaagactccgtctcaaaaaataaataaagatgggaagagatgtaattacatcaggggagggagggagcagggaggactacttttggttgaggacacactgtcaataattggtgaagggctgatttaggggatgctgtcagccactgagtgaacgggtgacctcaagtgatctaggcgggcgggcctcggggtacttggtctgggatgagaaaggagctgggggcagcctagttccaggaaagtgtgggtccggtgggagggagctggctctggaagcgaggacggcagggattgcacagggaagatatgtgggtggtgaggagcatttgggcctcccgaccagcgaccgtcaccctaatcctcagtgcagcagcaggcggggcaggccggcggaac

SEQ ID NO: 27601 - DNA, 898 bp, Artificial sequence
  DNA replication origin
cagactccccaaggtctcgatctgggaagggtgccctgtctgggggcaaatgggggctgtactttgaccatcatcttttagaaaagcaagaggagggtggggcacagtggctcacgcctgtaatcccagccctttgggaggctgaggtgggcagattacctgaggtcaggagtttgagaccagcctgactaacatggtgaaaccccatctctactaaaaatacaaaaattagccaggcgtggtgatgggtgcctgtattcccagctacttgggaggctgaggcaggagaatcgcttgaacccgggaggcagaggttgtagtgagctgagattgtgccactgcactccagcctgggcgacaagagtcagctggagtgcagctctgtctcaaaaacaaacaaaacaaaagaaaagcaagaggaggcaaggagcggggtgggtaggggaaccccttagttcctggtttgcaagagcagtgggtgcagggagtggggtctgagtatgtagtggggaagaacccggtctcctgtgggggatgcagtccccctgcactttctggctttggcatctgccaggcccttttggcatctgcgagtcccaggcctgaggtgtggggcaggaggagggaggctgagatggaggagggagggtcgcccagggctggatgaaagccgcagggaaatgcacaccagatgaggtgggctccacaaggaggggggcagtcctcagagcaacttgtcagatgtttgtcacacgggggtccagtcctgctcctctccctcctcccccgtctctcccaccctcatccacacctgggctaggataggcttcggatgcctggggagggaaagtaattgatcccaaagatctccgatctctgagctggtttgtgcaagagg

SEQ ID NO: 27602 - DNA, 1525 bp, Artificial sequence
  DNA replication origin
ccaagcttggacccagcgcctgcagagaggaccctgcccaaggccagttggggagtcagtgggggtggcaggacccagacgcttctccaggtgctccagtttctccgttcccgatcctctgatcctcttccttccctgacgcctacccctatttgttaactttgccttttgtactaaaactactcttgggtttggagggcaggcaggaaggggctccgtgagaatagggtggctcgcttctgagatctgaagggctggtgccagtgtggggtgctggggaagtcaggtggtggctaggggacatggagtccatcccggggctcacctggctgaattgggcatcctcagctcaggctccagggagagacctcactcccctgacggcaggcaggggtcagaatgcatccctaatccctgctgcagggaggagggtaggaggggctaccaagctagaagctggggaggaggggagtggcgagacgggggaggaggggagaggcgggagggggaaggggagaaagggctttgggttaaggatgcacagttaactggagtaaacacttcagagccacccctgagccccatgagctttgacagcaagagactgggggtgggatctgagctgggccgtgaggagccacaggggaagctagggttgggtttagccctaaagggttctggaagagcccaggctcctgaggccagtccaggcccgccctgggcatgtgtccagcgctgggggatcagtttggggaggatgagaggcagccaaggccaggcccaacttgggagtcagctccttagcctgggggtggggttccggggacactgacgtgcccagggttggaggggggtacaggagagtgactgctctggtagattcttgacgtcctcattttttagaagggggaggggtgggtgtggagaattccaaggggtcagtcccgtggcttctgcctcattaatctggtattgtcccttggaccaactgtgctgacccctcactgggcggtgcagagccagtagagctgggcctgctgagcttccgcattgcaagtgtcctcatgctctccgaggggccgtggccacgtggggctggtgtgctcctaggtgcctgtgcctccgtcctttcagcctgctaggagcctgcaatgagcctctgaaagttctcaccctgtctcagtttccccaactgcaaggcagcattgtctgctcttgagaccctggactgggcccccagtgcctgcaagctctgttctgggtgccgacgcggggaggcgagcagagtaaccagggcccccagttgagtctccgggccacggctcccactgggctgtgaccgacctagttccaggcggtgacccggccttcctgtggcctcggcagttgggtcctggattgactttggccataggccctccttccctcctctccaccgtcagtcagctcatccaggctcttgaggggcctcccacttggggactgtagcccactagtgcccccgagctcagcacatgctcagccg

SEQ ID NO: 27603 - DNA, 1386 bp, Artificial sequence
  DNA replication origin
ggcgtcccgcgcgccgatgctgctcgtggccctggtgctcggcgcctactgcctctgcgccctccccggccgctgcccgccggccgcccgcgcccccgcgccggcccccgcgccctccgagccgtccagctccgtccaccgcccgggagcacccggcctgcctttggccagcggtcccggccgccggcgcttcccgcaagcgctcatcgttggcgtgaagaagggcggcacgcgcgccctgctggagtttctgcggctgcaccccgacgtccgcgcgctgggctctgagccccacttcttcgacaggtgctacgagcgcggcctcgcctggtaccggtgagcaccctggcccgtccgccctgaccggcgccttcctggggagggtatcgtgcgccccagggagcagcggcacgatatcctgcctcccagggagcaggggtgcgctccgggcagtggggttgggaccgccctgtgggggccccaggcttgacctggggtcccggctccggaagaaggaatgatacttggctaggattccctgaaactttgaaaactgtggggaaagccccggttccgttctctctgctgagggacccagcaggactgggggaggcggtggcttcccagcccagaggtcgtttccagcccgtgggattacctggcagcgtcagaaatgcctctgccgcccgctcactctgggcactcaggtgtgaccgaccgctggccaggtactgtagaaaggggcctccaggttccaggcagccacctagaaagcgtccttcctccccaagacccccgagtctgcgcacaggaacccttgttggtggtcctgggagtccggagaaagtctgggctttggaaaggaggagactgcctttaggtgagtgcccagggtgagtccagccccgtgcatggggctctgtggctgtcctgcctctacccaggatggacgtgggggtgcggcagcctcagctgaagcagcccgcgctggtggctgctcatccccaagcttggacccagcgcctgcagagaggaccctgcccaaggccagttggggagtcagtgggggtggcaggacccagacgcttctccaggtgctccagtttctccgttcccgatcctctgatcctcttccttccctgacgcctacccctatttgttaactttgccttttgtactaaaactactcttgggtttggagggcaggcaggaaggggctccgtgagaatagggtggctcgcttctgagatctgaagggctggtgccagtgtggggtgctggggaagtcaggtggtggctaggggacatggagtccatcccggggctcacctggctgaattgggcatcctcagctcaggctccagggagagacctcactcccctgac

SEQ ID NO: 27604 - DNA, 1063 bp, Artificial sequence
  DNA replication origin
gccctggccgcccccggccccgccgcccaggccgccgctacctgccatggggtcgcgccgctccaggcccgggagcgggggcagcaggcgggcgcgcatctcggcccgcgcgccgctcagtccgtgggtgcccggcttgtgctctgcgcccggcggtcccgcagcctgggagcgggcgcggggcgggaccgggggcggggtctggacgccctcccccctccccctcccccgcccactccgcctccgaggccactgcctgggctggacccgccggcagccgccaccacccgggcgcgactcgagctgccgggaccaccaggacgctcctgctccgagatcccaggccctggctcgcttgactccggcatcttcacctctgcgcggggaggatgcggcggcggtggccgttcgggacgcagggcagggacagggcggcgcgcgggcctcgggaccctctgtttgaagaccgatccccttccccccccaccccactccgggacgtgcgcggcaggtgcataggccaagccttggcctgcaggagcgggagcctcatcgccaggccaaggggacccaggaaaagcgtcgatccgggcactcggcctgccaagggagaaagaggccgggacagcaccctagtgtgcagagagggatcccagaacgtgtggggggagtctgcggccgggaatggcgtgcgtcctgcactcccagctgacagtcacacatcgggtcacagcctggccgctgagaggtcaagtcacctctggttactgttttagaatggaggggacaggctcagagaaaataggtttccctcccaggggcccagtggtgaactgaattcaggcctgagacatactctgtctactaagtcaccccatctgcccagccttggtccacctggcactgcccagagacatcagtgatgcatttcggaagctggcaaagtggaccccactggagtacaaaggactcagggacccctgtgctggggaagagaaggagcccaggacctcccccaggggctgcctctgaggggcgtgagattcaggggcctctcgggtgg

SEQ ID NO: 27605 - DNA, 1441 bp, Artificial sequence
  DNA replication origin
tgaaaaccattgatttgcatgcgacaaatggctggattgagtggtgtgtgaattacatcacaataaagctgttactcttcagagactcatgcgagtcatgactgaggtcttcattttacaaaggagggtctggtggctcagagttggtgggagcctgaggaggaggcggggctggaccagcctcaggccagactctaagccccgcccctgttcccgcagggccttaagctccaccccatcctctactgcccgggctctctgctgctgagccttcacccacacggttccttggcctggaatgctgttctcctcgtcttcacctggccgtcacctccagaaagccttcccgacctctcctcccacgtatacccttccactgagcgacattaatggaatgtccactgcgtgccaggctctgttaggtgctggggatccactggtgaatgaacagccccagtgctgccatcctgggcgccccgaggtgtgtagccaccgtcagccgagtgcctgatggagggaggggtcagcttccaggagaaccctccgagccgactcctggtccctgcatctctctctccctgtccccagtccattccacatcctgctgttctgcgttctggtcaattcctcctggaaagtccttctgccctcagcggggactaaggataaagcatccagcagagagacggcagcggaaaggccaggagatggaaatgaccatgctgggctgggcagggggctggaggagccatcacggaaccagtgctggaatttcaagtcctgagtagggactgctgagaccgtggggatggctgagactgtggggacggctgagaccgtggggatggctgagaccgtggggactgctgaacctgtggggactcctgagaccgtgggaacagctgagaccgtggggactcagaccgtggggacggctgagaccgtggggactcctgagaccgtggggatggctgagaccgtgggggctcctgagaccgtggggactgctgagaccgtggggactcctgagaccgtggggatggctgagaccgtgggggctcctgagaccgtggggactgctgagaccgtggggacggctgagaccgtggggactcctgagaccctggggacggctgagaccatggggacggctgagaccgtggggactcctgagaccctggggacagctgagaccatggggatgctgagaccgtggggactcctgagaccgtgaggactcctgagaccgtggggactgctgagactgtggggtggatgctgcagggtgggaccccagcccccaccccgagccagcccgttgggaacaataccgtttcaagctagaccagaagaagaatttcctgtgacccagcataagccagcatgctctcctcgcattgtgcccgctgcctgcccacggggctcctgcagaggcttgccc

SEQ ID NO: 27606 - DNA, 1239 bp, Artificial sequence
  DNA replication origin
aaaaatacaaaaaattagctggacatggtggcacatgcctgtaatcccagctactcgggaggctgaggcaggagattcacttgaacctggaaggcggaggttgcagtgagccgagatcgcgccattgcactcaagcctgggcaacagagcgagactccctctcaaaaacaaacaaacaaacaaaaaacagaagggggcttacaggctccaaaagtggtgtggggtgtcacttggggctttccacactgtgtgaaggtgcctggggcctggctgcaggcctctgaacccccctccacctgtgcccacgtgcacactcacagaagatgtgtacactcaccagggtccacagacaggcacacagagtcccatctcctgtgcagcgcatgggactcctgggcctgtgtccagtccccttgctcctgacgaacatgctcctggtggccttccagtccatggagaccatcgacagggctggacagacctggccacagaggactctcttggggttgattgaacgctgctctgccctccccacagggctgggagacttccatgcccaaaggcctggcttagggctatgaaactggaggaggtggggctgggggagggcaaggagagccctgtttctgtgggaccctcctcttgtcctgttcagatccaccctggagatagaggcacaaatgggactaccagcctggaagaaggattgctacattgttttttgttttgtttttttggagacagtgtctagctctgtcacccaggctggagtgcaatggtgcaatcttggcttattgcaacctctgcctcccaggttcaagcgattctcctgcctcagcctcccaaggggctgggattacatgcacgagccactgtgcccagctaatttttgtatttttagtagagacggggtttcgccatgttggccaggttggtcttgaactctcgacctcagatgatcacccgcctcagcctcccaaagtactgggattacaggtgtgagccactgtgcccggcctgattgctacatttttataaattgaactggccaggctggtgggcaagaggcagtttgcagggcccagttattcatggaggttgggggagggaacaggaaagagtagcaaatcgccttctctctgtgctgattcctccaggaagacccaagggagaggattgagggtggctggaagcaggctggggccacccctctgcaggagaggattctggctcctctgg

SEQ ID NO: 27607 - DNA, 1311 bp, Artificial sequence
  DNA replication origin
tacctgtggataagctttctccacttccaacccctcacggccctccactccctgtctccttgtaaaaccttggaggttattcatggttcagcccctgacttcctgtcttaccgagtttcatctccaggacatttataagctactcttggcttcgaagggtttggtggctgcaatgcaggagaggggaggagagggtggccagaaccaggtgggctgggtgccaggacccctggggtctgcttccagccatggactaggcctgctggccctgggcttccccttccacctcaactccatggcctttttggtctcgaagtctctctcggagtatgattctttgctgggccccagaactccaagccggggagcccctggtgtgtatccaggtctaaggcgagggagggcaactggagtcagagagaggacagcagtgaccagcctgggagatgagggatggagtcctggctctcggccagaggggtggggggagggggaggggttgactttgaaggctgtgaagcctaagaggggcgaggcaggggtgggggttgggaagaggaatttagagctctcggcctgactgcaggttctgagtcctcctgagcgttgaaccgagtaagacaggccacatgcctgtctggtccactgcgggggtgaggtgctgcccccggaagtagggcaaatggaggtgcccttgctggggatcctgtctgctggccaggggggactaactcttcaaaaggggcttacaggcaggcgcgcacggtggctcgtgcctgtaatcccagcactttgggaggccgaggcagacggatcacctgaggtcatgagatcgagaccatcctggccaacatggtgaaaccccatctctactaaaaatacaaaaaattagctggacatggtggcacatgcctgtaatcccagctactcgggaggctgaggcaggagattcacttgaacctggaaggcggaggttgcagtgagccgagatcgcgccattgcactcaagcctgggcaacagagcgagactccctctcaaaaacaaacaaacaaacaaaaaacagaagggggcttacaggctccaaaagtggtgtggggtgtcacttggggctttccacactgtgtgaaggtgcctggggcctggctgcaggcctctgaacccccctccacctgtgcccacgtgcacactcacagaagatgtgtacactcaccagggtccacagacaggcacacagagtcccatctcctgtgcagcgcatgggactcctgggcctgtgtccagtccccttgctcctgacgaacatgctcctg

SEQ ID NO: 27608 - DNA, 907 bp, Artificial sequence
  DNA replication origin
gggtgggggccgtgggcagctcccgggaggctcctacccgcggacgggtcggcaggtgggaggagggggcgtccggtagggtcggcgaaggcgccgaggccacgtgcaagccccggccctcgaggcggcctcccgggcccgggcgcgggaccgtgcgcaggactgaccagcagggggcacgctcgctcggtgctgccaggccgggtggtctgcgtgcgcaggcgcggcggggggcctgacggcgctgcagttccccgggtggccgcgggggttgcggcggaggcagcgagcgtccgcgcagagaaaccgcctcggccacgcccgcccttgggccggtgctggggacccaggccgaggcctctggtcgtctgagggtgccaggggcagctgcagggggtttgccgggcttcacgaagtgaccgctacagggagtgcagtcgcagccacgggtgccccttccagggtcaccggaggacagagccaggggcgggggcgggggtggcgcggccggtgggaacggcaggcgtggttgggggcgcgggtggaggcaggacgcccccagccccttcttcagggcagctgcgtgggacccaggctgcccggacctggcccgccctcagggctagatcctagggttccacatcccaggcctctttcctccgcccacctctccccgctacaacccaggcagctcctggctgccttcccccaaccagagtcctctctgcaaaataataaccagaccaggtccctccctcagaggttcccacagtccttgcctgctctgacctaggctgaccccacctctccagcttgatttcctactccataaatgagatcggtgttgtttatcataattacagtttggggttgtttctttttttttttttttttgagacggagtctg

SEQ ID NO: 27609 - DNA, 2045 bp, Artificial sequence
  DNA replication origin
gcctggggatctcagccacagcagtgcaggggtggtgatcctggtgggggctggggagtagtgcctcctgcctgcatcccagggccccaggctcatccaaacatccatgttaaggtggtgggccggacacagtggctcacgcctgtaatcccagcactttgggaggccgaggcaggtggatcacctgaggttatgagttctagaccagcctgaccaacatggagaaaccccatctctactaaaatacagaattacccggattacccgggcgtggtgacccatgcctgtaatcccagctgaaggggaggactgcccctccacacctgtgggtatttccagtcgggtgggacgagagactgagaaaagaaataagacacagagacaaagtatagagaaacaacagtgggcccaggggaccggcgctcagcatactaaggacctgcactggcaccggtctctgagttccctcagtttttattgattattattttcgttatttcagtaaaaaggaatgtagtaggagagcaggatgatcataaggagaaggtcagcaaaaaacatgtgaacaaaagaatctatatcataattaagttcaagggaaggtactatgcctggatgtgcacgtaggccagatttatgtttctctccacccaaacatctcagcagagtaaagaataacaaggcagcattactgcaaacatgtctcacctcccaccatagggtggtttttctcctatctcagaactgaacaaatgtacaattgggttttataccgagacattcagttcccaggggcaggcaggagacagtggccttcctctatctcaactacaagaggctttcctctttgactaatccacctcagcacagaccctttacaggtgtcgggctcggggacggtcaggtctttctcataccacgaggccatatttcagactatcacatggggagaaaccttggacaataccctgctttcaagggcagaggtccctgcagctttccacagtgcattgtgcccctggtttattgagactggagaatggcaatgacttttaccaagtatactgcttgtaagcattttgttaacaaggcacgtcctgcacagccctacatcccttaaaccttgatttcatacagcacatgtttttgtgagctccagattggatcaaagtggttgggtcaaagtggctggggcaaagctacaaattaacaacatctcagcaaagcaattatttaaagtacaggtctttttcaaatggagtctcttatgtcttccctttctacatagacacagtaacagtctgatctctctttcttttccctacaccagctactcgggaggctgaggcaggagaatcgcttgaacctgggaggctcaggctcagcctgggaggctgaggctcagggaggttgtggtgagccgagatgacaccattgtactccagcctgggcaacaagagcaaatctccgtctcaggaaaaaaaaaaaaaaaaagatgtggtagggaggtgggggtgggagggggcaagtgggctcaggaggtggggggggtgccggcaagcagactgcttgagtggggagacgggtgaaccgcaggaccccaaggccccctcacattgagagtccagggagggatggctgtgggcaaggtctgtatgccaggtcaccggaggagggggtggtgtttccagcaatggagcgtctggtgtggaatcagtcaccttaccctcccgctcctgctgggtgataccccatccttgcggctgcccccgcgtcttccttgaggaacagcagactctgagggggcagccccttcctccccagggcacggccttgcccctcaagggttgggttcaggggcagcgggcaggcctgggcacggctgggccgtcacctcgggcgagggatggggaataaaaaggaactctgtctgagacaccgtgatccctcgccggggcccaggcctggctcagagcagccaccaggaagcgtctgcggcccgtatgggggaacagaccatacttcagacccttgctcaaccaccg

SEQ ID NO: 27610 - DNA, 1671 bp, Artificial sequence
  DNA replication origin
cctccctgccgcagcagagccgccttccacaggacctgcccacagagcccttcccagagccactgctcctcctgcagggagaagcagaaagggacaggtgtgggcatagaggacctgaactggctgcctagaacagtattgggagccctgtgcaccccctgccagacccgccatcaccaaatgactcagcatggcaggacaaggaccctgatcagaggccactggcagccggccacatgtggcctggagtggctcaggtccctggcggcagaggacacagggcttctcccagctgtgtggcctcagactaatcgcgttctctgagtcccccttgtctccccagaagaatgaggctaaggagagtacctgctgcactggggtcagtcgctgcagcgggcctgctctcacctgctggactagggggtgggcaggccacaggctgggctaggacagtgcccgagagccaacgaagacactgggtggccagggcagccccagagcgggctccactttagctggtggccagcgtcggacacactggggtccaggtgtaaaaaaatcagggcatgggtgggagctggaatcaggggttgagagacacccccctgctctccgcagctccagggagattctggcagctagcctcagttctggcccccagcagggcagagatggagacatttgctagaacaggaggctgccacagcacatgctgggggaggggcaagcagcaggaagccccttctgggtacggtcctccccgaagggcccttggtgctttcatcaacactgactcttcccagcacccgccccacgcgcccctacctctagacggagagcccactggccagcagcgccaggagtcaggcctctgacccacagggcagtgcacacagcacccattcaactgtagcatcccctgcccgccccgggtggctctcctgtgccctcatccaaccggaagacaggctgggtgccactaagggaggcacaaagagaggaaagtcgaatgtcccgcccaagatcagggtcacgcaagcagtccgaggccagcaagggagacagcggcctctgccacggcactgactccacgtcagagcagggactgctagaccgggctgcggaggggctggcaggtgacagagtcagctccgtgaggggtgagcaggctgaaggggctggcagcacggctggcctctccccggtctccactgtggcctgtactgcaggcactgcccctcctgtggggggacgctgccttccattgagggtgcctcttccaattgtacacccggaaccggggatgaccacgggacaggtccactgggatcggacccgagccaacgctccctcagtcactgggccttcataagcccctactctgacccagtgacgtctgactccagagttagcatcggttcagagccagcatccaggagtccccagaaggtctcatgatctccttttccccagtgcactgccatagagatccctttggagaaggctgggaaaagacgaacaggataaatttggggggtccttcctcaaggcaccctggtcccctccatacagcggtgtgggtctgaatggaggttttaggtctgtgacctggctccagtctgggaattcactgagggccgtggttctggtttttctcgggagatgggtttt

SEQ ID NO: 27611 - DNA, 736 bp, Artificial sequence
  DNA replication origin
aagcggcctaggggtggtccctgggagtttccatgggcggggcctgctggggagatgcgattggactggcaccggggggcggggccttggggaagtggcccaggagtggtcccaaggagtcaacgtgggcggggccagctgggaagatcgtattggaccagccctgaggaggggcggggcctcccggaggcggaagccgggattcgccctccggggagcgattggtcctcgggaggggcggggaggtggacgcgggtaccggcggtcgtcgggtcggcagcctttggtcagttggcagcggcaagcgcgctgcggttccggtggcgccatgtcgttctgcagcttcttcgggggcgaggttttccagaatcactttgaacctggttggtcctgcggcctctcgctgggagggcagcgcggcggggggcgcgcattagcgggggcgccgccgtcgtccgggggtgatgtctctcccaagccgggaatgggggcgaatgtggctgccggggagaagcgaacaggggtcaaaaggactgcggaggagtggggagcctgggggcgaggagagtggggtacccgaggagagggggccttggggctcaccgtcctggagggggcaggcctcgagtgtgaacgtgccgtttcgggggtgggtctaagggatcgggatacgtgggggtggtaccccttccctaccccctacactccaaagtgatggcgctgggggaattcgggt

SEQ ID NO: 27612 - DNA, 1510 bp, Artificial sequence
  DNA replication origin
ccaatttttaatttttttgtagagatgaggtctcgttaagttgcccgggctgccaccttgtcctcccacagtgctaggatcactggtgtaagccactgggcctgatttttgttttttttttttttcttttttttttttttttttttttgagactctatcgcccgggctggagtgccatggtgcgatcttggctcactgcaacctccacctcccagtttcaagtgattctcctgcctcagtctcccaagtagctgggattgcaggcgcccaccatgcccagctaatttgtttgtatttttactagagatggggttttgccatgttggccaggctggtctcgaactcctgacctcaggtgatccgcctgccttggcctcccaaagtgctggggttacaggcgtgatccaccatgtctggcttgattttttttttttttttttggtaaggtctctggctggtgctgtgtgaagcacaggctgtgcaatgtagaggtggagacagagaggccagcggggaacacatagtgacccataggtatgtatggggcaggtatgtatgaggcaggtatgtacggggcaggtatggacggggcagtatgtacggggcaggtatgtacggggcaggtatgtagggggcaggtatgtagggggcaggtatggacggggcaggtatggacggggcaggtatggacggggcaggtatggacggggtaggtatggacggggtaggtatgtagggggcaggtatgtagggggcaggtatgtagggggcaggtatgtagggggcaggtatgtaaggggcaggtatgtaaggggcaggtatgtaaggggcaggtatggacggggcaggtatggacagggcaggtatgtagggggcaggtatgtagggagcaggtatggacggggcaggtatagacagagcaggtatgtagggggcaggtatggacggggcaggtatgtagggggcaggtatggacggggcaggtatgtagggggcaggtatggacagggcaggtatgtatggggtgggtatgtatggggtgggtatgtatggggcgggtatgtatggggcaggtatttacagagcacctcctgcataccaggctcttggtggcagctgtggccccgcccagggcctctgcctgcctggagtctgtccagggagatgaacacacaccagtgactggcccaggcatggtgtacaagtgtgcgagcagctgggggcagtgtgggggctgtgggaagctcagggtcgggggcactgctctagggcctcgggaagccttccctgaggacaaagatgccaaagagtgttccagaataagctggagggtgccgcctgcctgtcagcctacagcaagccagacccatgtacaaacacggattcctgtgcacacttacgctggaaaccgaagagaggtgaccagccctccacacagcacacttggctggggacccggctcttcagggcgtgccagggtcttagttgactagccggcgtggctgatgcc

SEQ ID NO: 27613 - DNA, 946 bp, Artificial sequence
  DNA replication origin
caatggttcattcctataattccagcactttgggaggctaaggcaggcagaccgtttgagctcagggcttcgagaccagcctgggcaacatgacgaaacccgtctctacaaaaaaatacaaaaaattagccgggcacggtggcgcatgcctgtggtctcagctacatggggggtgaggtgggaggattgcttgagtctgggagctccaggctgcagtgagctgtgtttgtgccactgcactccagcctgggagagaaagtgagaccctatctccaaaaacaaaaaagaaaggatggctcccaagcccgaggtgcctggccatggcacccactgcacccttgagaagtgggaccagcagtctgagccatgtggcaggtggggtggtctctaggtgcctggactgcagggctggccagccgccttctctgagcttctgcacctctgccactcactctcaggccccgggaaacagggagggtacctactttacagaggaggaaaccggggcctagagggggagagacagtctatgttcaaagatggtggctggaaccagctcagaggcctccgggtggggggcggtcccagaggtaggacccctgcttggtgggctgggggtgaggtgggggcaggataggcctggggagctgccccggttgggggcttctgagcaccctcctgtgcatggctcaggcacaagagcaagaagaaagccttcaccaaggcctgcaagaggtggcgggacacagacgggaaaaagcagctacagaaggacttcgccgccatgaagaagtactgcaaggtcattcgggtcattgtccacactcaggtcagcccccggccctccgctgtcggtcagtccctaggaccacgctccctcaccccagcttccaggagctgtggcaaatgtcagcctaaaaatacccgagcctcggcacagacccag

SEQ ID NO: 27614 - DNA, 1108 bp, Artificial sequence
  DNA replication origin
ctgcctgggctcccactttggcggcacttgaggagcccctttctgggctggccaaggccagagcgggctccctcagcttgcggggaggtgtggagggagaggcgcaggcgggaaccggggctgcgcgcggtgctttgcgggccagcgcgaattccaggtgggtgtgggctcggcgggccccgcactcggagagcctggccggccctgccggccctgggcaatgaggggcttagcacccgggccagcggctgcggagggtgtgctgggtcccccagcaggccggcccaccggcgctgcgctcgatttctctcgccaggccttagctgcctccccgcggggcagggctcgggacctacagcccgccatgcctgagcctcccccactccgtgggctcctgtgcggcccgaacctccccgacgagcgccgccccctgctccagggcgcccaatcccatcaaccacccaagggctgaggagtgcgggcgtacggcgcgggactggcaggcagctccacctgcagcccccgtgcgggatccaccgggtgaagccagctgggctcctgagtctggtggagacgtggagaacctttatgtctagctcagggattgtaaatacaccaatcggcactctgtatctagcacaaggtttgtaaacacaccaatcagcactctgtgtctagctcagggtttgtgaatgcaccaatcgacactttgtatctagctactctggtggggacttggagaacctttgtgtggacactctgtatctagctaatctggtgaggatgtggagaagctttgtgtctagctcagggattgtaaacgcaccaatcagcgccctgtcaaaacagaccactggactctaccaatcagcaggatgtgggtggggccagataagagaataaaagcaggctgcgggagccagcagtggtaactcactcaggtccccttccacagtgtggaagctttgttctttctctctttccagtaagtcttgctgctgctcactctttggggtcacagtgcctttatgagctgtaacactcaaccgcgaagatttgcagcttcactcctgaagccagtgagattacgagcccactggcaggatga

SEQ ID NO: 27615 - DNA, 1141 bp, Artificial sequence
  DNA replication origin
gggtgtgggatccaggggtccccagaggccggcgagggagccccgggctggggcttcgtacctctcacgagggtcacgggtcggtccacgatgaggtcgaacgctttcatcatgtagacgatgggattgggctgcaccggcgtgcggcgcgggggctcagggtacacatccttgtcccagctgtccggcatggcggcggcgggcgcggactccgctcccggacgcgctgccctggcctctacctccgtccgggtcccgcggcctaggtcgcccgctacagaggacgccgagggcggctgcgtctgcgcgctggcgccgcgatgcaccatgggacttgtagttccccggctccgccgggcgcggccgggacccgcctcgccgcagggcgcccccgcgtggggcctccgttctcggtctgtgccgagcgcctacgcggtgctggtcgctggtctgggcgcctgggaagcagccgcgaaccggacagattcctgcttacgatgaaagaaacagacaaaaggcaactgacataaggaataggagggggtcattcggttcccactgcgcgccaggcactgtgctgagtgcagcagggaataagataaactgtgatggagaacacaggccgttagagcgcacacgacaaagtgaacaaatagcacgcgattccaaacaccctactcctccaggaagctttcctggattgcctagtccctacagacttctctgggccccgctctctacaagggcccctcatggactggctggtgccagttaacttgggagcctgtctgggggagggcagggagcagaccaggaggcagggcttgcccttaggcggctcatagggagaaggcacctaccctgggcacagggccctctggccggctttgatggttccatcctggccctggggcactctggtgcttctaggcagctccactgagcagggtcctgctggccacatcttcagtctccacacctggcacggcccctggctgctatccaggggggacactggtcatgtcctgtcctgaggttgaggccagcgacacagaaccatcaaccctacagacaaacagtgagaggtgacagcgtgctggcagtcctcagagccctcgctcgctctcggcgcctcctctgc

SEQ ID NO: 27616 - DNA, 1137 bp, Artificial sequence
  DNA replication origin
ctgcacagggaccctgctgggtgcgcaaagaggctccaacagggagcctccagcaagcagaacttaccaccttacggcctcagcttcctcactgggaaatgaacgagctaaaaggagagctcgaacatccagacacataggacagacatgctctacaactgctacaaaagagagggagctgggtccgctgttgcacggtttccagatctttgggggtttgatttggagacttcaccctcttacggaagaaccaccagagcatgctatgcaccccaagtgttcaaaaagaactgaaccaggctggacacggtggctcaggcctgtaatcccagcacctgggggccaaggtgggaggatcacctgaggtcaggagttcgagaccagcctggccaacatggtgaaaccccgtgtctactaaaaatataaaaattagctgggcgtggtggtggtgcgcctgtaatcctagtactggggaggctgaggcaggagaatcgcttgaacccggggtggggcagaggttgcagtgagccgagatcgcgccactgcactccagcctgggcaacagagtgagactgtctcaggaaaaaaaaaaacaacaaaaactgaactgggcattttcccggttcgttccagagatgctgaatttgggcatctcggccatcaccccgacacttggtcatccggcagagagacatttgagagaggcctgaggccagcggtgcagtggaggggtgcccggggcggcggggggcggagagcagtgcggggtcctggggcagtgggcgctgggtgcggcagggagggaagagtcctgggaagaagcggggcatcccggggtgcaggggagagtaagggatcctgggaggtgaggtccggggtgcagtgggaggccaaaggaggcgacggagctcggaggtctccgggggtggggagttgtccccggggtgcagcggggggcggtctcaggcagacgggaccccggaggcattggaggatccaggcagggtgtgggatccaggggtccccagaggccggcgagggagccccgggctggggcttcgtacctctcacgagggtcacgggtcggtccacgatgaggtcgaacgctttcatcatgtagacgatgggattgggctg

SEQ ID NO: 27617 - DNA, 1469 bp, Artificial sequence
  DNA replication origin
ggctgcggagatctcgcggcgcttggcgtgctataaaagctgcttcccagtaggtctcgttcttcttttccgacaaaacacgtgagtcctgttggtcgctgcagcgggcctctgcgtgggcggcgggaatccgcggacatcgggtcgggtctaggctcccgagtccgcgctcctgggcgggagcccttgtctgggtctcgcggggggctgccagatgcgtaggccacactgactagttccttcttgtcgcttttcccagcaaatggcggatgacgccggtgcagcgggggggcccgggggccctggtggccctgggatggggaaccgcggtggcttccgcggaggtttcggcagtggcatccggggccggggtcgcggccgtggacggggccggggccgaggccgcggagctcgcggaggcaaggccgaggataaggaggtaggtatcagccacgctcggggtcgggcccctgggcggcgccggagagcggtcctggtcactggcgccttttctccctttagtggatgcccgtcaccaagttgggccgcttggtcaaggacatgaagatcaagtccctggaggagatctatctcttctccctgcctattaaggtacgcgtcggtcgttggggcgttgagcaagtgcgaccccggagtcatttgggctggggttggaggattagcatctgccattgactcgcattaaagggcccagcgtctcgcgtgagaggttgaggttgtgttgcgggctggctgaggagaggattccacttagaggttggatggatacctgagcgaagccagagccacaaaaggcatttcagcgcatcttcccacattcgcagcgaattcatttcgaaagaactgaaagagaagcagcgcttggttcatgccatccgagaggatgatgaagttcaggttgtgggaggacactgtaagggttagcaaactgtcatagtccgcgtgtacgggacagctgtcatctgcatccagcgggtgcagtggggaaaggctaatggcatatttgtcatgtgagcgttcgccctagcaaggtacggtggtcatggctaggccaaagctggacaaagcaaaaggaaatctgagtggaaagccacatctcaccaaacaagagaaaaagggcaaataggaagaaacgattgagatgcagaaatagggtaaccttacatacaagcttccaaaaacgaaacgaaggggacagatcggggggaagccaggtgagggggttcatgacttcttcggttttttttgggcggggtgggcggttacacagtttcgccctatcgcctaggctggcgtgatctcggctcactgcaacctccacctcccaggttcaagcgattctcctgcctcagcctcctgaatagctggggttacaggcgcactccaccatgcccggctaattttttgtgtctttaatagaggtggggtttcaccatgtggccaggctg

SEQ ID NO: 27618 - DNA, 1616 bp, Artificial sequence
  DNA replication origin
aaccgggagcctcccacgcttttctgactctggtgagttggtggagagaacactggggcaaatgcctagacgtgggaagaagctagaagttccaggggagagggtgaggcctgagtcttggggaactggaaggtacacagttgggttggtctggtgagtggtatggatgccaggctttcctttttaacctcggtttacccatctgtaaaactaggggactagagagtagtggcaggcacactgggcacttgatcctctaaaaatcctctgtaatctccattttaaaagtcctctaaaatctccattttctaacccaggggcttggaaaagttaggtgacttgcctaaagtcacacagcaactaagcagtagagccacgatccaaactcagctatgtctggtcgtcccaaggctgcacttgtttctctctgaagatgggattctcctgccttctctcctagccctgccccacccctacaagggtgagaagggttgagggtcaggggagtgggtactttgagctaccttgacttccaggcggccaatggttttccggagtttattcatgtggacaacctttttccttttcacctctttcctacagcacggacaggtcttttgtctggaaggaggcatgagtaggggtgagtgttgggagtgggaagggagccctggtcaagccctcactcggtgacccaggtggtcccttcattagctggatgaggcattagggcatattacagggcgctctcagctctgagggtggggccggggtctgcagacactactgagtgagggtacacacattttagtttagggagatttggtggctgagtcttttggctgactttcccctctgttctgggccacagcaatggcccccagtctcactcctgccctcccagccccttgggtacccgctggcacctggctagccaccggaggatgcactttttgcagaagatgtggctgcatggcaaccttgctggcctcttgagaaccccatggcagacggagcacacgaagttgctgtcaggagggctggcgaagaggttgagatcatacccgccaccctgcaaaggccaggtgtcagcacctggctgggacagtgatccagtccctggtccacataccgagcaagagagcccagcaagcttttggcagggaggtgggccacagaacttcaagtaaaggggttggctcagcgcccactttgagggggcagctgtgggggttagggccccccaccccaggactactaatctctggctggagacgggggccttagcctggaattagacctagccagagccttccagaaggtttccttgtaccatatgggggtctgcaacccattgcccaccctttccgagtggagtggggtcgatccctggacaactgggcaggtttctggagttgggcacacatctcagggctggaagcaagagggccccaggctcaccatgatctgcgtctagacagcagctccacaggcccccagagctcaggagcctgcatttcacagtgggtgtgggctgacatcacaatagcattgtccagctcaagccagtcacaaccctggttcaggacccagagaccccgtacagcccagccctt

SEQ ID NO: 27619 - DNA, 971 bp, Artificial sequence
  DNA replication origin
caaatgcctggagagggcagcagggatgcaccggtgacagttgtgagggccgcaggcacagaggcaggcaggccgggggtctgcttttatttacctatttacaaggtatgttggccctgggctcccccaccacctcagccccaacgttgccttctggggcagcctcggcctcctcctgtggggcaccctccagcagagcggtgtcttcctccaggaagttgctgagctccgccagctctctacgaacgacactggtggcttggtccagccagcgcacacgccgcaggagggacagcagcaggggccgacggcgctcctggcgcacgctccaggcgttgtgcagctcccggtagcagttgtggcgagcacgctcggccgggtccagggtggccccgcagcccagggggcagcgctgctgggacccttgctggcaatgctgccggtgctctgccagggtcccacgcggcacctgcgaggtgcagccctcgttggggcaggccgttagctcaaaggggcatgagtcctggtgccccttgcgatgggccagggggcatgtcactatgcagccagcgtcggcgttcttgcactgagggtgaaggagaacgtgtgaagaaaccgggcaggacacccacggaatcccccacccctggctttccattcgccaggaaccagggaaccgggagcctcccacgcttttctgactctggtgagttggtggagagaacactggggcaaatgcctagacgtgggaagaagctagaagttccaggggagagggtgaggcctgagtcttggggaactggaaggtacacagttgggttggtctggtgagtggtatggatgccaggctttcctttttaacctcggtttacccatctgtaaaactaggggactagagagtagtggcaggcacactgggcacttgatcctctaaaaatcctctgtaatctccattttaaaagtcctctaaa

SEQ ID NO: 27620 - DNA, 956 bp, Artificial sequence
  DNA replication origin
cccgagagcagccggggccggctctcccgcctagtatcaccgcagcctccgcgaccccgcgggccggcgcacacacagcctctcgcctccacggaccccaatgcgtgcccaccccacgcgcgcctccgctatgccggctgcaaacccagctccctccccgcacggccccagagctccgggctcacttggtcttgaagcggcccactccggccgcggtctctgccatgttgccgccgccgccgctccagctgaaacctgctagggtcccggcagccaccgccgcgtgagggaggttagcaccgaactcttcacagaacgccacactcccggcgcgctgcgatggcgtcaccgcgcgcgaccactgtgacgtccccgccggcgccgcgcacttggcgccatctttgcttcgggcagtggcggctgcatcgggaagcggaagcgggcggagacgtttccggcctggagggagggccgtgagctgtgagggtgcttcgcgggtcggtgggggtagaccggcggatgtggcatcgctggtggcctggctctttgataccagtataaaaaggcatttgtagccagcgtttactcctgcttttcggcgttctgggatgtgggggtaccagctgtcgggtgcggtccgtgcgtagagccgtcaacctgaccctgcccctgggctcgcagtgtggctcttgataaataacgtaggtaaatgaataaaccgggtaatctcaaaggcattcatgtattgagcaccttctgtgtgcaaagcactgtaatcggcacttggcggacaccagagaagaaacagaacgggcgacgagtgatagttgctgagcgcgatggaaaaaggaggagggccgggcgcgttggctcacgccagtagtcccagcactttgggaggccgaggcgggtggatcacctgaggtcggaagttcgagaccagcctgaccaacgtg

SEQ ID NO: 27621 - DNA, 1303 bp, Artificial sequence
  DNA replication origin
cgcttcccgatgcagccgccactgcccgaagcaaagatggcgccaagtgcgcggcgccggcggggacgtcacagtggtcgcgcgcggtgacgccatcgcagcgcgccgggagtgtggcgttctgtgaagagttcggtgctaacctccctcacgcggcggtggctgccgggaccctagcaggtttcagctggagcggcggcggcggcaacatggcagagaccgcggccggagtgggccgcttcaagaccaagtgagcccggagctctggggccgtgcggggagggagctgggtttgcagccggcatagcggaggcgcgcgtggggtgggcacgcattggggtccgtggaggcgagaggctgtgtgtgcgccggcccgcggggtcgcggaggctgcggtgatactaggcgggagagccggccccggctgctctcggggaggacggcgatcggagcccggccgccgggagcagcagcgtgggctcatcgagaagccggctatggggtggagtggggaccagaagtcccgatgaggggaggagagggctgagcctaggtcggggctggtcccgggaggcggcgggggcgaagaaccacctctgagcagtcggcctggggacctttcatccgcgatccgtcttctccagggagcagggagaatgcaggagaggggcgggtccgcagaagcccaggaggccctgagtgctgtgccccgtcactccccaagcctttgccgaacagcagtgctggtgcccccgccctggcagcgcagcctcatgggattatcgtttccactggcggctgtggggctttggttgtgccaagcactggtaaaggaaagtcccaggctggcagcaccgtcgtgggagggtcaactgggtgcgggggctgaggggccgctttcgttttggcagtcaggcttccagaagcgcagtgagccaggccttgacatctgggaagagaagcccaggccgcgtacagggaatagggggaagataggaaacccgtcccagaggctgggacaggagcagtggggtgcactgtgggccatgagaaggaaagaaagcagaggcaagggtggcagaggctcttctgggcaaggtctgggaggtgtgtgggcagaagggaggggctaacgcagggcagtgacatcttcagttatgttctgaaaggtacctggcagcagggttaagaggtaggtaggggaggccgggcgcggtggctcacgcctgtaatcccagcgcttttggaggccgaagcgggcggatcacgaggtcaggagattgagaccacggtgaaaccccgt

SEQ ID NO: 27622 - DNA, 2623 bp, Artificial sequence
  DNA replication origin
gacatctgggaagagaagcccaggccgcgtacagggaatagggggaagataggaaacccgtcccagaggctgggacaggagcagtggggtgcactgtgggccatgagaaggaaagaaagcagaggcaagggtggcagaggctcttctgggcaaggtctgggaggtgtgtgggcagaagggaggggctaacgcagggcagtgacatcttcagttatgttctgaaaggtacctggcagcagggttaagaggtaggtaggggaggccgggcgcggtggctcacgcctgtaatcccagcgcttttggaggccgaagcgggcggatcacgaggtcaggagattgagaccacggtgaaaccccgtctctactaaaaatacaaaaaattagctgggcgcagtggcgggcacctgtagtcccagctactcggagaggctgaggcaggagaatggcgtgaacccgggaggtggagcttgcagtgagctgagatcgtgccactgcactccagcctgggctggagaccccttctcagatcgagaccccttctcaaaaaataaataagtaaaaagaggtaggtagggggtccagtgaagaggccagagtggctggccagagactgtgatgggctggaccaggtggaggcagtggagaaggaaggagaaggggcacgagtgaggtcacagaaatgacagctgctcgtgggacccgggctctgggcaagcctggggatggagagaggagtcagggaggggaagaggtatgccagacctcagggatgaagacactgggaggatgtgctctgggctggctacccaggcctggccacccaccgccggcaggggtgttcccaaggagccccctggctctcactggggaatccctggaagccctgggctgttgggctgactccacctgacacaggcccaccccctactgcctcagggatcaccagccagctgcgggtctctacttctcagtgacgacggtagctacagccccctgcagtactgctggttccaccccatgccctgtccctgctgttgcccagaaactcaagggcaggggccattggggtcacttggagaggagcacctagcacagggcggggccctggggactgagggggtgggtggtgctcattcgcctcccgctctccttccagctatgctgtggagcgcaaaattgagcctttctacaagggcggaaaagcacaggtaccagcctggggaagggcagtggggcgggcagccagaggccgcggggggtgctgaatgttgcctggctgagacctctctgtccccagctggaccagactggccagcacctcttctgcgtctgtggcaccagagtcaacattctggaagtggcctcgggggccgtgctgcggagtctggagcaggtgagggcagcctgggtgggtgaggggcaagtggagagggcagcccactcacaccgtgctcggcacaccactctttctcctaggaggaccaggaggacatcactgcctttgacctcagccctgacaacgaggtatgtggggcggggcctggaggggacccgctccagcgcctccctcccagactgagtccaggaagatgtgagcagggtattgctgcccctctgctgacctgtaccctcccccaggtgctggtgacagccagtcgggcattgctgctggctcagtgggcctggcaagagggcagcgttacccgcctgtggaaggcgatacacacggcccccgtggccaccatggccttcgaccccacctccactctgctagccacaggtagggccctgccgtgcaggtgggtcgtgggcacagatgcaggggctttgggcattccaccccctcaccttgcttccccgcaggtggctgtgatggggccgtgcgcgtctgggacatcgtgcggcactacgggacacaccacttccgaggctcgcccggtgtcgtgcagtgagttggaaggtggagggggagggcagaggcaccacccaggctgcacagctcacccatcctgtcccgtccgcccacagcctagtggccttccacccggaccctacacgcctgctgctcttctcctcggccacggatgccgccatccgcgtgtggtcactgcaggaccggtcatgcctggctgtgctgactgcccactacagcgccgtcacctcactggccttcagcgccgacggccacaccatgctcaggtcagcagtgggccctggtaggagggggaggcttggaaagtgggggctgaggctaagacttgacctgaggttgccgttgctccttcagctccggccgtgacaagatatgtatcatctgggaccttcagagctgccaggccacgaggaccgtgcctgtgtttgaggtggggatgcctggaggccagggctggttgagttgggtggggagggggcatgatagcagcctgtgacccaattcgtctccagagcgtggaggctgctgtgctgttgccagaggagccagtgtcccagctgggtgtgaagtccccagggctgtactttctgacagctggcgaccaaggtgtgttgggccgggacatgggcaggcggtaggggctggggaaggcctgtggacctgagagtctcagcagccctgtccccaccc

SEQ ID NO: 27623 - DNA, 3884 bp, Artificial sequence
  DNA replication origin
gtccccagttctgtgcttcccgcgcctacgagagcagccgcgcagatgagctgtccgtgcccgcgggggcgcgcgtgcgcgtgttggaaacgtcagaccgcggctggtggctatgcaggtacgcgggagcgggcgtgggcagggcaggctagccgaggcgggcggggccctaaccacaccccgcccctcgcaggtacggcgaccgggcgggcctactccccgcggtgctgctgcggccggaagggctgggcgctctcctgagcgggacggggttccgtggaggagacgacccggcgggtgaggcccggggcttccctgaaccctcccaggccaccgcccctccccccaccgtgcccacccgaccttcgccgggcgccatccagagccgctgctgcaccgtcacacgcagggccctggagcggcgcccacggcgccagggccgccctcgagggtgcgtggactctgtgccgcaccccacgacggagcagtgagcgcgaggatcccgatgaggggatggaccgcgccatcccagggctggggaggagcggggagggcggatctccctggccagcagggatgggagggggccatttgctgttcctctgagtaaagcttgttctgcatgacccccaccgtctaagcgtgcggagccgcgggctggatctctgccaggccagggtgcgggatgggcgtggcagggccgagaccatcagctccagtgcccttctggctggctaggtagggtgttggccagggtggggggctggactgcagtccagagagacagagccggccaggagagcggcctttatgggttttccaggggttcaggatggactggagagaggccggaccggctagggcagtgcgcctttatgggtttcccagggggtgggggcggcggccggcacagggagcttcatgttgtgccacaggaagtccaagaaagcggcggcctggagggtcctgctgagccgctgaaagtgccgctctggggttggacagagggaggtcaggggggtggtccacacgcccaccaggatcccccaaccccaggctgtgcccacataccagtgtagggcagcagggcctcaagcgctgcccgcacgccttcgtaggccagcagctcctcgggggcctctcgcctcaagagcacacccagcacggcctgggcctcgtggcagtgccgcgagttggtgttccacgtgacgcagaagcgcagcagggcctctgtgggcaacaggaccctcatcgtcttgcccagccaatctgccatgactggcccttgcccaccgggccacccaccctgactggccgccaacctttctggtcgcgccgcagtcggagcatggtggcttccagcttctcgcaggcctcagggtccctccggatggctgtgggagaagggaaggctgagctggggaaagcagagcccagtggtccgaagacccagcccctcgccccccggggtgggcactgaccctggatgacagtcagcacggtgtggggccgatccagggagatggccaggcccagcgcccgcaggtaccgcttctcatgcagcaggttgtccagctcttgctgcctgtggggaggggaggagaggccactgagggccgctggctggggctgcaggcagagccatcggagtcagcaggcagggagcctggcactcagcctcgttttccctacagcacagagcagggctgatgcggggaggggcgccactgccctggccttacctgaccacctgctcctcttgcctggcctgctcctctgcctgctccgcctcggtcacatcctggggttagactagggtcagatggggcctccactccaccccgactcttccctgcccttggggcccacaaccttccagaggatgactcgggagtcactggccccagtgagggcgtggtcgtccagccggctgcagtgcagcccccagaccttgtcctcgtgggcatccagcgtccgcacacactcgttgttcttgatggtccagagcttcacgaggccatccgaaccgctgggtttggggtggggagaggctcagcgtcaggcaggtccccccgccaccccccactccatcgctgccccaccccagcccactcacctggacagcagctgcgtgccacggctcacaaaggccaccttcagcacagaagcatcgtgcccctcaaatgtctgcaaggtggggggtagggcatgagatgtcaccagggcgggaagtggggagggtctggagcgccacttaccttgagacagctgaagtcctggagtgcccagagcttgatggtgccatcagctgaggccgtggccagcacctggtccatgggagagaactggacgcaccagaggccacgccggtggcctgagaagacacccagcagctggcactgtggcagggcccagagcttggccgtgcggtcctgtgagcctgtggccagcagcttgtcgttgggggcaatagccacgctgttgatgtcctggcaatgggagaaggtggtggctcagcaatcccccatcttcccccagcaagggcttggccacacccccaccccagtggctatggagtcaccttatcatggcagcgctgagtggtctgggcctgcaggaggatagggccgttgtctggggctgtgttcttggacagcaaggctttgggaagaggccacagcttcacagtgcagtcctggctgcctgtcaccaggaaggactccttcagcctgtgacccaacaggagaggaggagacacagctgagccccagccagccctgatggccagctccccacagggccaggctgggagcccacggtccagaccacggggcctgtcccaggatgcgggttggcctgggtcacccccaggcacctgtaggatcaagccctgtctacattgtccacccgcagcaccgggtggctcagccctagccacaggaccctgtgcctacatgcaggggtcacctctccacctgggcctcgtgcagggtcattctctctgcctaatgcccttccccctttaaccacttcaccagggctacttctgaggactgaccccgaggcacctagggactctcctgtcctgttctgttccacatctttgggctggagcctcagagcaagccaaagctgccactgcctccccagctccctgagcggcagccctgctggcaggcctgggcctccacctccctgacacccctgggcccagccccgactcactacctagagcagcagacggtgcccacactgtgtgtgtgaccggaaccctgagccacgcacatcacctggccagccttgttcattctccagatacggacgctctgatcctggggacagggagttgaggagagaggctggtccatgggcctactgcgtggcctccccgcctggtgcccctgcccctacctctcagggtgcctcaccttggcacagctggcaaagagccaccccttccggaacacatccagggccaggacgatatctgagatgttgtggggaggtataggtcacacagcaagacgggggaagggaagcaagcaagggaccgaggcggctcccagggtgtcaggtgggctggccccactcacccgtgtggccgtggaggatctggcaggctgacgtctgcagctcaaacacttttaggcaggggctattggaggccacgacaacgtgggagtcctcgggcccaagaaaccggacatccaaaacctcctcactgtagccagcgaactgcggggtggcagggagcaggagatgtgagccaggacctgtgtaagaggagggctggtgcccgcagcctccagactgagcaagggcaggtgtgcacctgtttctgcagccgcagggagcgagcctcgtagagcaacaggttgtggtcg

SEQ ID NO: 27624 - DNA, 3345 bp, Artificial sequence
  DNA replication origin
agatccgccctccccgctcctccccagccctgggatggcgcggtccatcccctcatcgggatcctcgcgctcactgctccgtcgtggggtgcggcacagagtccacgcaccctcgagggcggccctggcgccgtgggcgccgctccagggccctgcgtgtgacggtgcagcagcggctctggatggcgcccggcgaaggtcgggtgggcacggtggggggaggggcggtggcctgggagggttcagggaagccccgggcctcacccgccgggtcgtctcctccacggaaccccgtcccgctcaggagagcgcccagcccttccggccgcagcagcaccgcggggagtaggcccgcccggtcgccgtacctgcgaggggcggggtgtggttagggccccgcccgcctcggctagcctgccctgcccacgcccgctcccgcgtacctgcatagccaccagccgcggtctgacgtttccaacacgcgcacgcgcgcccccgcgggcacggacagctcatctgcgcggctgctctcgtaggcgcgggaagcacagaactggggacctggtgggagtgggtgtttggagtcaccgcggggccacagaggacgaggcccgcccgcacccttctccacattctccttgcttgagtctgctgacggcggggccgctctaagaccggttcggggcttcctctaggtgcggagaccaagcacgggctcctggcccgccctgcccgcggtgcttctggcccagtcttgccacacggtcaagccgcagtggtggcgtgaggggtggggttaggcgcataccgctgctccctagggacgggcctccctcccggccttggcccggggccgcctcctccaggtagggcgctggaaaccaggcggtctgccggtcttcgttctccaccagccaccagcctgtgcgcaagaagcgggcagggactcaaatctcgaggctccctcgggtccaggagcagaggagcaaatccctgggttcttggggggccctacctgaggggtgccgcagcagcacgtccaggctctcctgggcctgcgcctgaaaaggcctatcccgcgtgtcctgggtacagaagggctgcaggcagcgcaggctctgagcctccagactgtggatggagaggcggcccgcagcgcgagaaagaggctgctcctctggggtgggcaggatcacccggctgggaagggcagcccgtacgagtgagaggtaggcggatggggagggtgaaactgggggcgccaccccggcaagaccgccagcctcccactctctgcccctattcgctggctgttcccccccaccctggacctctcccagctccaaacgccgctgcatgctgggagtttggggcgagtcaggcacctgccgggtggcagcgcgggctccaggtccaggggttgcggtgcgaagaagccagtgatcgtcgggctccgtgccacgcgctctgcagtcgccagcagcctccgagaataggtttccaacagctgcaggcgcgccaggccgcggctcgtgcgccccacgcgtcccaacagtggtgcatcttaaggcaccacaaaaacgtactgtgatacgccgctttgggcttcactggtccctggcgcccccaggcaagccaccgccttccccgctcccgtacccaggctggcctgaccgagaagctttgggagaacgcggtcagatctccgcagcaggcccgcctccaccgggaaggtctccttgagggtcttctgagggcgggaaccagggcattggtcttccagagcccactgtgcacccttgagagggcggggtccctcacccggatggcaggggctgggagcttcagcagggacgaagggcctccagtgggagtcactgatgggaggcagtccagtgggaggcagccgcgtggggaagccgccaccgcggcatcagggtggcccagggtcactcaccttgagctgcctgaattcgtcccaactcctgcgcacgaaggtgtcgctgccgtctgaccagcgcacagagaaggcaaacgtctgggggacaaaaagttgggagtgccgtggaggtgctggtccaggcacccccttcctatcccttggggccactaaggacccagccaggtcttacttggagcctcttgatctgcaccagggctgccccttgcactgaaactgggtatcgggggcctgccatggctgtggcttccaggctgcagattcctgaaatgggcgaggacccttctgcctccccgtgcttgagagggctctgggggacccagaaaaccccctgggatagaatcctggcaacacctcaagcctgtggggtccttgtggagccgccccagctgagtcctttgcagctttcttgctgtcccccaagcccacgatctgggggcaggagcacagggattgggggacttccaggcagagctgctgggaggaagaagaagaatgagctttccagccctggaggcgtgcaagactgaagaaggggcgaagggtaggcgggactgctgcctggggccctcctgcctgcctctggccacaggaggagggaggagaaggcagggctaatcaaagcgccacctgtcctgcccacctctctggattcccctaccctgtgaggtaattgccctgccagggtgcgcccaacaactttgaactggcctggggatttctgtgcagaaccaaggactcagtgcttacagctttaagtgctttgtctgacttaatcctaatgctggaggaaaggtctcttaatgtccccaactcatagaggaggaaatgtgtgttaaatgcgtaattattgtgagctgttctatacatgctgggggaggggcagacctcacaggctcaccccaggggttcccctgcagtgaggagacttggggtaggagaaagagggcccatctgtgcagtcactggcatttggtgggtgggggtggtggtcagggaagtggtcactagggctgttttgagaaccacctctcaattcacgatttgccatgacttactgcaaacatggcctgggcagaggctcgcccaggtgccccacctctctggctgcttccttatagttcgggcttcggaagccacattcaaccctggcacacagtggtttttcctcgtgctggggccaccagttctgtgttgggatgcacctactccagccccttcagggagcagtcagcctctaaggcatccctccaggaagctgccctggctgcaacaaagggcctttgtgtgtctgtcccaccagcactctctctcatgccctcaagctgtccctggtcttggcatgggcaatgaacacctgctcacatagggctgatttgcagggt

SEQ ID NO: 27625 - DNA, 1644 bp, Artificial sequence
  DNA replication origin
ccgtgtggaggcggagccagaggccgcggcgctggccgggcccgaggacaggggcggggacggagcaggagggtcggaccctgctggcgccctcaggcgtcgatccgcggcgcacgcaggggttgcgccgtccgtggcggccgtcccgctttctccagtaaaagagcagtgtgtggcgcaaggtgcgcctcggccgcgctgtggacccgagctgacacccaggcaaagtccgtgttgcggcccgcgacgtccccatcgctccgttctgagtgtcctgcgtgcctgcggccaggctttgtgccctccgctgaggggcgcgtccacccgctggctgccaagcgctctctcaacgcgggccgggcgtgaccgcacagattgcggcgcgcgctagggtcctgggctcttgtcccctccctggcgccatggcaacgggcgtctggcaacgcagggcgcggcgcggccgcagagggttggcgcgtgccttgggctccctggcgcccctcgccggctgtcgcggatcctagagcctgggatgaggggtcgggctcccggttggagcggcctctgggattcctgtgcctccttgcgttcatttatccattccgctattatttgcgcagtgaccgctctgttccaagcgctgttccaagtgctgggcagagcagggaacacaattctgttccctgaccttctctgttcataatccagtggtcaagacaggaaaaaaaaacaaggactcacactcataaatgttcacgtacaaactggtgggtccatgcaagggtgtagtaaatctggaaggcctccttgaggaggtgaccctttctgaaggatgaggaatcagctgaggagcgccttcgagaccaagcccaaggtggcagggtcttggcattttgcaggaacaaaaacgccagtgggacgctagggagggttgtaaggtgggaggggagatccagggacggacaggggcccaccaaagacttggtcggcagcttcggggattgggaatttattataacggtaggagggaagatgctagacagttttgggcaaggttacccaatctgatcccatttcagtttgctgcagattccgctggctatcatatggggagtggatttcttttttttttttgagacagggtcttgttccgttacccagggtggagtgcagtggcgcgatcttgttcactgcagccgcgactgcttaggctcaagtgatctcccacctcagcctcccaagtagactacaggcacacgccaccacgcccagctaatttttgtatttttggggggcacagatggaggtctcaacatgttgcccagactggtctcgaactcctgagctcaagcaatccccctgcctcggcctcccaaagtacttggattacaggtgaggcactgtgtctgtccttggagtggattttgtaggggcaagtgaggagcatacagatggagggtggggtgtactattcaggcaagaaaagagggtaggggaggaaaaagtggaaaccatgcagggctgatggggtgtggggcaggagctgtcagctggggtaggcaggtggcctcagaatccctctaggcctctgcttgtgaataaatcctccccagcttctcctgtcttccaggggagcaaggtctc

SEQ ID NO: 27626 - DNA, 2385 bp, Artificial sequence
  DNA replication origin
ctccgtccccgcccctgtcctcgggcccggccagcgccgcggcctctggctccgcctccacacgggcccgcaagcaggcaccgcccccgactctgcccccagccccggctcgggcccggcccccgcgagcacggcgcgcgcctccggctcctgtggccgcgcgctggcctggaggctgacctggaggctcatctggaggccgagctgacccggcaggccttgcgcgggcaacatggcggcgcccggcgagcggggccgcttccacggcgggaacctcttcttcctgccggggggcgcgcgctccgagatgatggacgacctggcgaccgacgcgcggggccggggcgcggggcggagagacgcggccgcctcggcctcgacgccagcccaggcgccgacctccgattctcctgtcgccgaggacgcctcccggaggcggccgtgccgggcctgcgtcgacttcaagacgtggatgcggacgcagcagaaggtgcagttccctgcccgatttctcccagccccgcgcagcccctgtccccgcccccgcccaggtaccccggcagagcttcccagggttgcctgtccctgaaccttgccccccgggtaggcccggccttacagccttcatccgcgcgtgggttggatcgtctgcaggactttggccggagtccagtgggccaccggctgggccgtacagtggggagctttgggcgcctttgttcggagaatgaactcactctcggtcggcctgcttccgcagcgggacaccaagtttagggaggactgcccgccggatcgcgaggaactgggccgccacagctgggctgtcctccacaccctggccgcctactaccccgacctgcccaccccagaacagcagcaagacatggcccagttcatacatttattttctaagttttacccctgtgaggagtgtgctgaagacctaagaaaaaggtaagatgtgtttgcacgcagcagagctttgcactggagcctgggcctggggctcctggctgacgttatagcggggaacgtagagaaacggatgcagaggtggcagaagtttgctgaggagcagggacctccaacaggtgaggactggggctatctgagcctcctcctctcgtctcagaagccaagctgtcgggatctgctgctgggtactgctcctgccacagccacagggcttccaggaagggattccctgccttgtctggcactgaaggcggtttcccgcaagttagggaagactccactttgcctgacttctagagtaggacttctggttttaaaatcttggaaatccactgcttttgctcccaagagccatctcttcctcactgagggatccaagagccagcactggcccttgcaggtgtttctaggccagatgtatagggtagagccgccattgttgctataaggctggtcagttagaatgaagtctcttgctgaactgacgcaccagggcctgccctcagatgctaagaaacaagtccagttttcagttacaaggctgtgcccagccccacccaggccacactctgcctgaggccagggacactggatgccgcttcctgggtgttaggagcttataaaattgccaggtctgtgctgtaatgtgttgccttgaggcctcgttggagtttgccaagctgtccaggtgggtgtttgcgcagccctgggagttcatcacacccggggagctgcagggtcagccctgttctgggagtgcctgtaccttggagcataagggcactcccaggtgtagttcacagcagtgccccagctctccttccttgacagcagacagggaactggcaggggcagtggagccgctgcgtcctctcattctttacctgctctccctacacaggctgtgcaggaaccacccagacacccgcacccgggcatgcttcacacagtggctgtgccacctgcacaatgaagtgaaccgcaagctgggcaagcctgacttcgactgctcaaaagtggatgagcgctggcgcgacggctggaaggatggctcctgtgactagagggtggtcagccagagctcatgggacagctagccaggcatggttggataggggcagggcactcattaaagtgcatcacagccagagcctgttgtgtctcagttgggtggtccccaggacactgcctgtggggacctgccctgcccctcttaggtttggagcagaagtggaggtgcccacagcaggtacccactggccccctcctcagtggagaccccaaggagctgcagctgaactgcaggggagggaaggaggagcagcctgggctgccccttgacattcaggatgtagcttcctgcccaccgcataccctggcgcctcactcctcacacgggaagacagc

SEQ ID NO: 27627 - DNA, 1176 bp, Artificial sequence
  DNA replication origin
ccctgcccctcttaggtttggagcagaagtggaggtgcccacagcaggtacccactggccccctcctcagtggagaccccaaggagctgcagctgaactgcaggggagggaaggaggagcagcctgggctgccccttgacattcaggatgtagcttcctgcccaccgcataccctggcgcctcactcctcacacgggaagacagcgggcctggctgggcatccctgtgcctgtccctggcggccaggccattgccttcccactatgcagccagggatgcccctgccccccatggctctgtgctgctcactttagggggctcaattctccactctgctcagtccctacagggaaagctcaggtcgggtctttctgagggtccaccagccatcctaccctctccctgcctggcacatgcctgccagcgttgtgtcatgcctgtccacaggggattcgtggggctcacttcatcagagtttgaagcccaaatgaaacgctgaagtgactgagaacctggcttcagtatattttctgctggggcttaataaagcagtagacagggcttgttccatccctctgtgctcagctgcatttcctgctggggtcctggttcctcaggagagagagaccacagggtgagagtgagccaggaacagcaaggacgttgattggttggggcaggggggccagagtagctgatgtaggagtactgggaggccagacggcacgaggtctccaaggccccagcaaagccatggcttctacccctagttcccctgacaggaagttcttggcgggtttggagccaggggatggcatggagtgatgtggctttgaagggtcctctggctgctgagctgggatgaggcaggtaagggtggaacaggaggggtggggaggaagccggggcagtcaccgagtgaccaccaagaggaagacccaccccacggcggggacagatgcggggtacgttaaagggagagccagagaactcatggggtgaggatggagtccgaggagactgctgggagccgccgtgtgggtcagagatggagaaggctgagtgcagcaaggtggggggtgactgggacccagcctttgggcctccccagccagagcagcccagcaacagtgtgtcctgtggtcataaaactccagggacctctatcctccagga

SEQ ID NO: 27628 - DNA, 1676 bp, Artificial sequence
  DNA replication origin
gaagcagggggcagggggtagggggcagggggctggtaggggcctgaaggtcgcgaggcaggggcgggagcgggggcccgggcagggaccactcacccaggacgcgacccggagcagggtctggggccgccgcgcaaagctcacggggtccagggcggcccctgcgcggcccgcgccgaaggaggcgccctccatggccggcccgggcgggacgcgcgcccctggcgccttctgtccgcctgtccgtccggccggccccgcccgaggccgctgccgctgccgctgatgctgatgctgatgctaccaacgctgcagccgctgccgcctcccgggagcgcgcgccggccgcggcggggacgcgcgggacggggcggggccgcgcccgcgccccccactgggtccatgcgcgcggggccgggtccctcctctccctccgccgcgcccacctcccatcccccaccctcacctgcctgccccggtcccgagatggagaccatcctcaggaacccaccagccaggtccccgggggcagggtggggctcgggtgctgggcgcagactttgctagagccgggaggacagacaggaggagtccgctcctctgggaagggcacttgggtgagggagtaaaggggtaggaggtccacgggctgcagcatcttcccccaacccacgggagaggggaccggctccctggccctggtcccaagaagaccagatggataactggggtctttctcatggccccccactgtgctctagctgctatcacagcttctagcctctggcggggaggatctggtgggaagaaaggcgttggccccaggagcacctgttgagggaggggacagagccaccgtggccagcgccgctgggagtgttggtttcggtgtctccgctccttgcccgtggccaggtggtggtgctcccaatgccctccctactcctgggtctccccagcgtacttgcggcgcctagtctggaatggagggcagggagcggcatcagagactaggagtcgggtgggggtggtgcctggctgccctgtgtcccgctgagtcccctccacagaccccagccttgggtgcaacaaggtccctctcctcatgttcctagcaggctggaagttcagatgactcctaggtttctgtctagagcactgagatgtctgcactgacatttacagcgccaagcgcttgacctgtgtagtggcggagactgttaccaccctgtacttcagataataagcaacccaggtccctgctacacgagccgggtgcacagatggtgctgcgtggcccagcccccctggagctcattcttcagccttgctgggcacaggtgggcagagcaggtgttgccagaggcgctactcactgtgttccaagtccatcacactgtgcgtccgatcacaacccctctcacctgttggccacagacctcccctctgtgtcattcattctctacttcatcactaacatcagcacccagacatgctgcactttctcctaaaagccaaacactgttgaccccacctcccctccagctgccttacgttactgcttcctttagcagcaaactctgcctgcaacaccctcctctctctccctctgacccggcagaatcagctcccaccgccacctaaactcaaggttgccactgacctctccgtgccaa

SEQ ID NO: 27629 - DNA, 1942 bp, Artificial sequence
  DNA replication origin
ccccctccccgcccacccgggaggcccattgacactccctgcctcagtccccgcccctcgtcacggccacgcccagctggaaactccagcggtgttccccgcccaggccccgccccctccccgcccacccggaaggctctccgcgctcaccgccccggccccgcccacctgagaagcccaggtccagcaacaccgcgcgccggcggtcgcggacgctgctgatttgctggaagcgcacatcgagcagcaggaaggcggcgcaggcgaggaaggctccgaggcccagcgcgacgccgaagcggcaggcgcccgcgttcccgttgaacacgcagcgcagctcggggccgctgtcggtgttcacgtagccctcgttgacgatgggcccgaagacggcgatggagaacacctgcgtgcggcgcggcgctcagggccctgcggcgacccgacctctgcgagcccgcctcgagcgcccacgcccctgggcctgtccctgcgttcccaggcccgtatctgggtggggggcggtgtcacctctttctttcccgaaccctcgcgtatttagtaattattgacaacacgggccgtttagtgagcatctactatgcccagacattgtgttaaacagccactttacatgcgtcccctcaccaaatcctcagaaagtccccgtgggatcgccattgttcttattctctttataaatgcgggggacattgggaccccaacaggtgaagtgacttgtccgggatcacatggctgacaaaagccggggttgattcaagccaggtactctgcaccgcgtgggcccgtggagtcccctcagagcccactcaagagtgtgggaacaggagccttcacctgggcccgcgattcccaggctggagccggaacggcgaaggggaggtgagagtgcagcaggcagagcggggcgggagggagggtatggaggcagcggagctgttgcttcctgcgcggttgggaactgtctggcctgttttctagcatgcaaatagggtgacgggcacagctcatgcagtgctgggacagacatgtccacccagcttcctgcacgtggtgggtacccgagggatgacagcccccacgtgactgattattaatatcacctgtaagtgtttgggctgaaaagatgacaccgttgacctctgaggttccgtcaaacctcaatgcctcctgcccaccagttccgggagacaggcatgagggggaccgcagtcattttaaccagcgctgcacggggcagccctgtgtttccaagaaacgacctccagcctcaacctcatcccttcgctcctttcccgctccagctccgagagtggagccaagggggaagccgggacatgcacttgtccccaagagtgggccacaagtcgggacgtgcgctcggaccaaaacgcagcgtcctgcctcccggtctggtcagagccactccgcaggggaggccaaagcccctgccccaccgtgggcaccgccctcctccaagacaggcgccgaggtgcggctggcccagaggttgccacctggacaaaacccagagctcggcacccaactgccacctcccctgccggagggaaggagcagcagggccctcccagggacgccccagtgggctaggctgctcccaaacctgccttccacaccgccgccaggaagccctcccagcccagagcctctcctccctcaactcacagctggaactgggggccaggggacaggctccctgccaaggagacccgagggtgtgtgtgcgggggaaggggaggcgcttctcggttcccgtagccccctcctgcccctcggagaattccgtccccaccccgtccctgcttccaggtcacgagaacaggaaaaacggagtaagggctgcggaaagggactgaaattagacccggggaggaggtaggggtagaggcgaccggcggtg

SEQ ID NO: 27630 - DNA, 1290 bp, Artificial sequence
  DNA replication origin
catctcaaaaacaaaaacaaaaacaaacaaacaaaaaaaacaaggggtctcgcagcatttcagagaaccagactagtgggatacgtggtggtggggacctatggacctggagcccccagagcctgggggtcagcctggcctctacctccccgtcccctcctgtggggccctggtgcctctcagataccaatccctggcaccagaagggaaggggtagaaatgattccaggagcgtccaggtcacagtcagctcagttacagtctttattgtaaagaaggtgcagtcggaacatgggacactgaaaatacacaatctctggtctttcaggagagggagagagtgatatatacaaaaattgtaaacatgttcacttaaatatccacacagaattggtctaggctacaatgtaacaaggttgtcactcaactgcatctccagagggaggtgtctgtctgatgaaatgtggcaaccacgtttggtgttgacttaatgtgaaaagccagctttgagcaatgcatgagtagtcagctatgcagagggactccaacctgggactgggccaggaagcagggtgcaggtggagaggcagggactgggccaggaagccaaggtaaagggaaccacacaggggccatcttgtggggcacggtggccagctggagcctctgggcctctctcctgctgaggggcttgtcttgcctggcacccaggcatccttctcctctcctggcaaggtcttactgaagggctaggacagggctggtgtcttggcccacagctaccttgtgccttcctggccagaaccacccacacctgggcaggggccggggccacagagagaggagcagcttgtggagtactaggaggtgaaacccgaagactggaccatgatcacaacactgacagggctgggctgttctagcagcctgtgagagaaagtggagagtggctccggacgggacgcaccaccatgacagaaacgagacagtcactacccacagggacatgggatgggaacagtggccaggatccccagtcttggggcgagggtggtgtctttcccctgcccccgctttgtcctgggcagcccctgcacctgatcgtagagggcagctggacccccaaccccagagtgagcaggtgtggcccaagaggggaaagccttccccaggccagtccattccaggctagggacacacgtcctgggcagtgctatccccttctcaggacctcagtcctggggccaggtgctgagggactgggggaacttggcaggggcagcccagaca

SEQ ID NO: 27631 - DNA, 1558 bp, Artificial sequence
  DNA replication origin
cccagatcaggccactgtgacctctggctttgccagcaacaacaggtcccagcatcccagcccttccctcccctggcacctcccaaaagcacaagaatgcaaaccgagactggcccaccactgaggcaggggtggactcccgcttgagtgtgccaacagggcgggtggactgtcctggtgacttcctggtgggcctggccaaccaagaggccaagtggcctcaccaggccttacctggctgcctggcagcccggagaggaaggaggaaggacgctcacggtgcgacagctctggccacgctggcgggagctacgtgatgatcctggcgatggcttgcagggaggggaagtcgtcgtcccgggcagcatgcagcgcctggtggctgctggcatcgccatgcgcgagcacctgctggcaggtggggcacacacggcagtccaggcccgcctgctgggtggtggcctgccacgcgctcttcttgttcttcttggacttggtgctcagaggcttctcgcggttgcagaagtccgtgtgtgcagacaggagctcctgctgcttggccgtgtcgggcagcaggaccagcagctcattaaagaccttctggaaattctcccccagcaggtcccggcaactcttgtaatactgggctgcggagatcaggccctgccaccggagagccggactcagtcatcccctctggcccgggccctggatgaagacgggctggcaccccgccccgggcccgcctgacccatctggactccccgggcccgcctgacctgtctgaactcccctgagtggctcttgaactcgctgaagcgggcctcgtcgctctgcaggaagtccctgatggactggatgagctgaaggttcctctcccggaagttctcggggactaggtacgcccgtggggcaggcagcagcctgggtctgggggtcagaaggtaaagaggaggtggaggcttcagccttcacagtggcccaaggggagggtaccgttcctccacccccggtggacaccaggcagctcacccacacttacgcttttgtggtggtggtggtggcggggctggggacacaggccgggtgggggctaggcagaaggccagagaagccagggggcggcttgctgattgggggcaccaggcccggcgggggtgggggaggcgtgcccttcaggagcaccacagcgctgaagcctgaggggtggcaggacaagacccagagaggaccctcgctgactgcgggctgcctggcctccagggccagcttctgtctacagccaccccttccctgcagggcaggtgcagggccagcacccacaccactgctgctggtgtggcaggcccagcccacacaagctcacgcaccctcagacctgggaggcgccatgagggccggtctcacagaggcaaggaacacagggtggttaacgggaggctggaggtcatgtgggtggccgatggcatcacacaggggtccccaccacccagatgcagactgtgcctgcggctccagcctgaccccggcccctcccgacacccagggagcaggcctg

SEQ ID NO: 27632 - DNA, 1921 bp, Artificial sequence
  DNA replication origin
tgggggcaccaggcccggcgggggtgggggaggcgtgcccttcaggagcaccacagcgctgaagcctgaggggtggcaggacaagacccagagaggaccctcgctgactgcgggctgcctggcctccagggccagcttctgtctacagccaccccttccctgcagggcaggtgcagggccagcacccacaccactgctgctggtgtggcaggcccagcccacacaagctcacgcaccctcagacctgggaggcgccatgagggccggtctcacagaggcaaggaacacagggtggttaacgggaggctggaggtcatgtgggtggccgatggcatcacacaggggtccccaccacccagatgcagactgtgcctgcggctccagcctgaccccggcccctcccgacacccagggagcaggcctgagccagcacgcgtacctgggggcggcggcatccggggtgggcaggggccgccgagcgctgggaagtcctcctgtggcgtggggcaggggaaggaccccaggggccttgggagcccagggggttccttgggggcactccgagcaggggccgggccctccatgtgtccattaacgacgacggcaactggcccctcggctctgctggcaggagcttccggggcctgcaaagcccctgggggacaggtagcgggcgggggctgtggcaatgtggtgcctggcttctccgagcccactttcttcttcttcccaactttagagggttggatggaggccagccccagtgtggaggagacggagcccgtggggcgtgtgctcagaagctcctgcagggccgggccgccgtcctcctcctcctcctgtgtgaagggcgggccgcccttcctgccgcccctgctccccttcccagccttcctggtgggctggccgctgccggtagcctgcgccgagagtgggggctgtgctaccttcttgctgctactgctgctgttccaggcagagacaaggctggtgggggcggtgccaggcttgggcaccgaggacaccagggcggggaagtcctcctcctggaaggcactcctgcctctggcagggatggcgtacggcagcgccaaccccacagggcccggggttgctgcagtggagcaggaggaggaagtggaggcagagaggctggggaagtcttcgtccttgagcttcgggctgggtggtgggagggcgctgggtgcagggaagcacagctggtcaacagctatcaggccccgtggctccatacctgccctcccggcacccacctgtggctgcccgcacccgcccaccatgcaccattcacccctgggcgcccatactctcaccctggcacccccacacaccctggggcggctgggcctgtcaccgagaaggcttcttggcttacaggaccatttgtcgaggtttccttggggcctatgaagaacacaaggcccccaggtcaggtcagggtgtggggacaggccctctggggactggcagtgcagggtgctcttcaacctcccaggtgaaggcctggagcgtcccaggcaccgtgcccatcaagagctggccactaagctggacatcgtggcttacacctataatcccagcactctgggaggctgaggtgggcggatcacctgaggtcaggagtttgagaccagcctggccaacatggtgaaaccccatctctactaaaaatagaaaaacaagccaggcgtgggggcaggcacctgtcatcccagctactcgggaggctgaggcaggagaatcacttgaacccgggaggcagaagttgcactgagccaagattccgccactgcaccagcctgggcaacagagtgagactctgtctgtctcacaaaaaacaaacaaacaaacaaacaaacaaaaaaaaagagctagccactgacctcctagcccgggcaga

SEQ ID NO: 27633 - DNA, 1056 bp, Artificial sequence
  DNA replication origin
gcatgaccatgccctgctctggagcctgagatgagaccgagctgtgggtgcaggagctgacctcccaccctccggccaggctggagcgcccgagcaccccttgtgtgccaggagctcttgctccctcagggtctcgggtctgctgccctgggtgcccggggcccttccctggaccaggaggcttttactgagcatctgctgtatgcagatcccacctggggctcggggaccctcctcctctcccttcccactgctcctgtggcttggcacccaggtcgtagaggcccgtggctggcgtggaccctgcgaggctcctgtgccactcccgggctcatgtgcactgtgggtaggaaagcctctgccatccaggcctgagcattggccgggtgtggccttgacggcaggcctgttcctcctattgtcgtcccggggtcccgggaagtgacgggctgtctgctggccgcaggggtcgttggtggcgaagactacgaggaggtggacaggtacagccgccagggccgagtggcccgggctggcactcgcggagcccagcagagccgccgaggaagctggaggtacaaaaggtgggggaccttgcgtgccgctgacattctcctgtggtgaccgtggccagtggccaagctgggagtggggatggggtcagggattgtggccagagttcctggggtcctgagtggcagtagggtctgttgagggtccttggtgggcacaagtttctctctcttttctccagttctagccacagccacagatcccagggttggggtgggtgaaaggggcctgtgtcaattgggcggtcaccgcagctgtacgaggaagcaccgccccggcagccctgcagggcagaggcatcagaccccagatgatcgccccacacactgggcccaggcactgcccgcctgaggcattggtctcgggccatgctcagcctgaaggctggcctccttgtcccagggaagaagaggaccgagaagtagcagctgctgtccgggcctccgtggccgcacagcagcaggaggaggctcgcaggagtga

SEQ ID NO: 27634 - DNA, 1367 bp, Artificial sequence
  DNA replication origin
tcccgggaccccgggacgacaataggaggaacaggcctgccgtcaaggccacacccggccaatgctcaggcctggatggcagaggctttcctacccacagtgcacatgagcccgggagtggcacaggagcctcgcagggtccacgccagccacgggcctctacgacctgggtgccaagccacaggagcagtgggaagggagaggaggagggtccccgagccccaggtgggatctgcatacagcagatgctcagtaaaagcctcctggtccagggaagggccccgggcacccagggcagcagacccgagaccctgagggagcaagagctcctggcacacaaggggtgctcgggcgctccagcctggccggagggtgggaggtcagctcctgcacccacagctcggtctcatctcaggctccagagcagggcatggtcatgcggccccacctgggggcatccaggccaggtgcctgctcaccctcgttccggcgcgagtgccgtggcgcgtagctgaactgcaggtcgatgtggcggttctggcgtgcctcggcgcggctgcgactgtggcaggccgtcctgtgggccttgaggtcgatctcggtgcggaaggcgtgggtgaactgctccgtgctgcagcggccttcctcacacagaaagtgcttctcccggaagtgctcacgcaggtaggcatagtcgctggcaggagatggggtgtcggtaggagggctgcagcccggttagccccacgccctcggggagggagggtcatctgtctgtctgctgcccggcccacctgtagtagtcctgggccccgtccgagtcgcagaagtggcagaagtagtggtcgcggcgcaggtgcttaagcagctcatcattgtccaggtagcgctcgtcacagaacttgcagagcgggtgcccacggtgcgacgtgtcatcggggtcaccctgcatgcgatgccgggccaggtccttgcgcgagtaccacttgcgctcatatgtgaagatctacaaggcacaggaggctgggcacaggctgggggaccccaagcctcctgcctcttcccacaggccagtggcggagcagcaaggggcgggagagggccccgccagcagccagaggcctccctgccacgtgcagcctgaccctcagggggccatccggggccagaagcagcaggtggacaagcccctcccagccgtgtggccacatcccttgcaccacccaccgcctaggctctctccggggtcgctgggggggcacacctggaggtgctggaggcacagacggcagcagaagagctcatgctgcctccgcatgtgctgctccaggtccccgaagaggctgaaaggtggcagctcggggcac

SEQ ID NO: 27635 - DNA, 1570 bp, Artificial sequence
  DNA replication origin
ggtgggccagcacgggagggctacatgccccatatggagtctagatgggcatccatctgcacagcagctaaggcaggtactccgagcaccaggggtagcaagacccagagtattcgtccctcctgaacagctgggaggggtcacctaggcagggcacctaagcggagcaacgagacaggggaaaggagacactgggtgggctcaggaacaggaagaggcttgtgaaagaacaatggctgtgagcaaggtgggcccaaggccacaatcactggagcaggagggcgtgcaggtttggggccggagtgagaaataccacctgatagtgggggcctgaggctgcccatcctcagacaggcagggagaccaggactggctgcccagacctcaggagcgggcagtgggacagcagtgcagcctggcatggccagcatcgccctccctgagggtgaggagggggctggacaaggctgcgccccgcagcacagtggccagggtggagtcaggcacggtccactaaggagccaaacagcaagaccctcccccgcctgatggttccagcacagccaggctgggagtaggggacgtaggggacatggaggccaggggaagatggctatgggtaggggacttgggggcctgggggagatgcctggggtgggacttggtggctggagggaaatggctgggttgggacgtgggggcaggggggagatggctggggctacagagggagacaacaggtctaggtcgccccagcaggagagggtcacgtgtctgaggacagaagtacagaacccatggggagaggcttggggatgggctatgcagcaaatgatgaggggaagggcactctacgtgagccctggagacggccaagctaggccccaaggagagcaagaggcaaatggggtgaggcctgcttaggaacaggaggcccccaagaccccccacagggacaggtgtggtgtctgcctggggccttgctgctctacactccccagcatgtcatgggcacacaaaaggacagcggtgagggcctgcccacacgtggggagggggaccctggggttggctcccagggccatctagagagtctagacctccaaggagcccagatggggacagcagcagcagggagcatcttacagagggccagggccatgggggacgggagcggggtggggggacagcagaagcagggagcattttacagatagggccagggccacgggggacgggagcagggcggagggggagcagtaggagtaggaaagcatgacccaagccagcatgtcaccctcctgacctgggaccttgggtaactgtgggctggccctctgcgccccctcccactgcctgcctgtaaggtgcaggtgggctgccctggggggcttgcagcctcatcaggactcctgcagtaacaccagggaccagagcaagctggagagcaagatgcaaacagcaggaaccggcccttgagaaagacgcagccaggaaagaggcccagaacgtggggctccaccaccccaggacctctgtcagccatggccaagaccagcgcccccacctc

SEQ ID NO: 27636 - DNA, 1998 bp, Artificial sequence
  DNA replication origin
cccgttgctgggtggggcggtgacgtttgcccggaaggggcgggcccgccgggagccaggccgctcggcgccacgaccggccgagaggggggccggatcccggaccatggcggcggccggggggcgccgaggggcggcgcgcggacatggaggcggaggcggcggcagctcctgagcggggaggcgggagctgcgtgctgtgctgcggagacctggaggccacggcgctggggccgctgcgaccacccggtgtgctaccgctgctctaccaagatgcgggtgctctgcgagcagcgctactgcgccgtgtgccgcgaggagctgcgccaggtgcggggcgccgggggcgcggcccgggggcagcggggctcccggcgaccggatggggactttgcctcactgaggtccggccgtgggcccggcggcgccggcttccgagagaggcctggtggggccacccagggcggggtcccggccgtgcggctgacggcggggcgttggggcttggaggccggaggcggccgagcgggttgcaggagggggcaagccctgtggggacagcctggggacttcccccgtgtcccgggggttcctgccgggcctcaggaagggtcctgatcagatggagaactcggtgacctgctcgtcttcaggagtttattttccagggtcctccattcgaggaaacaaggcaagggggactctgcggaggccatccgtcctggaagcagggcgtcaaactctgggcattctcagcccagctgtgtttctgggcccccattggatgaccctgagcaaactccttccgagactgacgttttcctctgtggagtggaggtgacactagcctcggaaggagacctgcccgtcggaggggaaggccccctcgcgcttcttggcgggaagggagaaaagtgttaggaagttgtcctcctcctcgccgccgccccccgcctttggcgctcatctccgcagtgaatgggagacgtttttgactgtacagacttggaagccgtggaggggtcagagggtaccatgcagcgttcctccaccctcactgcactgccagctgctggctgtgggcacctggctggagcccgttggtttgctgagcttagagatttgtttgcttccagcattgtgaaattcccccggtttgttcatagaaggcttcggctggtgacatctgccaggaatctaactttcttctccccagaagtgatgcagagcagtattgaggtgtaggttctttctttttttccttttctttctttaagtagacgtttacatcaaaggagttgaagagatgctgcaattctctgagcaatttgtgggcttatagtctgtgccctttttggaaaaagacatttggagattctatcagtctgtcatgtgacaggaggaggccgacccagaccccggggagatctggggtgcaggaacagtcacagaggaccttggcccgtggcttcctcagggcgcttcctggctttgccagggcctgccttgccagccagtcctgcatagcatgacctcactctccaacagctaggtttcccagcacacctgtagcttccttccggaaagaagacgctaaggagttcttggcacgtgaggtcccgacccaggctgcaggtctgatgcaagacatgagtgaacatctgcgtatgcttactgtggcagcctctgcccgctctcattccttgtaggccccacgccctccaggagctctgtggctgggggctgcggacatgagctgtcagccggggtgtggtttggcactgggtgcccccagccggcttcctctagggcctaccccgccttactgggctgaaggaggggctcctggaaagtttgctgtttgctggtctcctctcctttgcattcgttctattttcttcccatcttgagcttgccgcctcactctagtctcctttttccttactgagttcagcaccatcccctgaatatattctgtgtcccatgcgtgctcaggaa

SEQ ID NO: 27637 - DNA, 1193 bp, Artificial sequence
  DNA replication origin
ctagtcgtgtgtgtttttttttttttttttgagatggagtctcgctctgttgccaaggctggagtgcagtggcgtgattgtcgtgatctcggctcactgcaacctctgcctcacggtttcaagagattctactgcctcaggctgccgagtagctgggactacaggcacatgtcaccacgcccggctaatttttgtatttttagtagagatggggtttcaccattttggtcaggcttgtctccaattcctgacctcaggtgatcccaacctcccaaagtgctgggattacaggcgtgagccaccacgcccggcctaaaaattttttttgtggagatggagcctgactgtgtaggccaggctggtctcaaattcccaggctccagcaatccgggccacccagcctcccaaactgctgggattacaggcttgagccactgtgcctgacagcttttttcaagtggcaaaattggggtttcaagcccatttgtgtctgtttctaaagtccaagttcactgggcatggatcacttgagcccaggaggttgaggcctcagtgtgctgtgatcgtaccactgtgttacagcaagagcaagacccggtctcaaataaagtaagtaaagttcaggctcattgatacaatttactgcctcttttccagtagggtttagatctggacctgccttctggatggcagagggagggaggtcctgagtgtgcctggccctcaagggtagggaggaggccctgttactgcagcatccatccaaacacgtcctgtgctgggcccagcgtaaagaggacaggttccgttcgtgccttccagaggccccttctgggcaggcctggcgagactgccctgggctgcgagatggacgtcaccacgtgctgcctttcacgttgtctttcatgtagggatttaaacagggcattagggaagtggaggcgggaccacgcttgtgtgtgttccaaataccagagaccggtttcctaataaggtggccagatttagcaaatacaaatacggcaggtccacttaaatgtcaatttcagataaggagcagcattttagtatgagcctagcccatcaatatttgggctatacttacactaagacatgaccccttgttcatctgagatgcaaaccagttgtgccgtgtttcatctgacaacgccagttcgtggagcccggcgagt

SEQ ID NO: 27638 - DNA, 1564 bp, Artificial sequence
  DNA replication origin
gctgaagtccagggactccggttccagcgcaggctctggggcgcgcgggctccggggcgcacggacggggatccctgcctgggagctcctgcgtcgcgtctcccacagctcctgaacccacgagggcagcaggagaggagcctcgcgggctgcgggttcgggggagagggtgtccctggccaggggcccggcggccgcgcgcagcgcgcggcgccacagatagggtgagcgacgcagccccatgagcaggccagcggcgcggcccaccgtgtggtagcggggactcgccacgtgcttgtaccacgcgccggagggcagcggcagcaggagcagaagcagcagcagtgccagccgcggccggctcgcgggagccccccgctcccctgggcgccacgccagggcgctcgcgtcgacggccgcccggcggggcgggccacgaaccggctcggctgggtttgggcgcgcagtggagttgggacgcccaggtaccggagcgcaggaggctggaggcgagccgtgggtcccctgcaggcccagctataaccgctcggtggccccgcctcgttccgccccctcagtaccgctgggctccccagatggggggagggacggagggaggagagggaaccctggcagctggcgggggacgtgggtacttgagcacctcactgagtgggccgctggctggaactgggctcgaggctcctctgaggggacacgtcccattctctgcctgctcagcctcctccctctaggagtggaagtgccagggagtgggtactgggaacactgatgagggagtagggctgagggatgcccctttagccagactcctgccggtgggacgacagcagagcgaaggcccaggtgcaggcagagctacagtggctattgcaggagggctgtcgggggccttcagcaccattcaagacccctctgggtgagtccccccaagagttgtcccttgtccttgcctagcatagctcccaaagctgtccccacaccctgtcctgtccactgccacccccagcttctccccaccaacccatctccccgcagaagccttagaagcctcatgttggcaacaccaagccatccgtggggtctgcagttctgtgaggcttccaggagaaaaagtcagcccctcctggaacctctacccctggaggggcaggacaaggccttgcagacctccagcgcctcctctctggtgatggtcccccaagaccactttatccagccagtctcaatttttgcctaaaccaacagcctgtggctttgcctgcctctgtgcgtctgtgcctaacacctactcatccttcaagactccacttaaatggcccagatccttggccgggcgcggtggctcacacctgtaatcccagcactttgggaggccgaggcgggcggatcacctaaggtcatgaattcaagaccagcctggccaacgtggtgaaaccccatctctacgaaaaacacaaaaaattagctgggtatggtggcaggcacctgtaatcccagctacttgagaagctaaggcaggagaatcgcttgaacccgggag

SEQ ID NO: 27639 - DNA, 1646 bp, Artificial sequence
  DNA replication origin
ctcccccaatgcttgctgggtggccccaaggggggaccctgccacatggccacaggagggctccaagggtgggctgcatcagggcatgtgaccttggtggtttggggtccaggacagtcattggagtcccagggaagattagagagggttgaagaggcagcgggagggaggaggggcccagacccttgggaagggaactggagggggcctggtggatggaggtcctcggtgttcaagatggcagggcacatttatgtgggggggctggagccagtgaccagaagtgcatgcagagggggataaaaggcagagaagcaggccgggtgcggtggctcacacctgtaatcccagcactttgggaggctgaggcgggcggatcacgaggtcaggtgatcgagaccatcgtggctaacatggtgaaaccccgtctcaactaaaaatacaaaaaattagctgggcgaggtgacgggcgcctgtagtcccagctactcgggaggctgaggcaggagaatggcgtgaaaccgggaggcggagctttcagtgagccgagattgcgccactgcactccagcctgggcgacatagccagactccgtctcaaaaaaaaaaaaaaaggcagaggagcagccaggggcagtggctcatgcctgtaatcccagcactttgggagggaggctgaggtgggcggatcacctgaggtcaggagttcaagaccagcacgtccaacatggtgaaaccctgtctctacaaaaatacaaaaattagctgggcatcatggtgggtgcctgtaatcccagctactcaggaggctgaggcgggagaatcgcttgaacctgggaagtggaggttgcagtaacccgagatcgcgccattgcactccagcctggacaacaaagagagactgcatctcaaaaaaaaaaaaaaaaaaaagcaagaagcaaggtggggctcaggtggaggggcccctcctcccggggcatgacccagaagaaggggaccaggggttcttaatcaatctgcggaagcctttggctaagggagggagggggtgccgggagatccaggtttgaaatgaatgctgagtgcccggcgcttcccctggtcggcgagggaggggcccctgacatttgccagggcgtgggcgcgcctgtctgcgccctgagctagacggcaaagtacacaagcagacgaaggggtcgcatgcgggggcgcaggagtcaggcggattttattgaccggacggcaggcggggtctatgagcggctcctggaagcgcgcggccactcctcctgggtcaggcgcggaggcgccacgggcgggcgggggacgctgtcagaacggtccgggggccaggcagggcaggccaaggcggtttgctgcggggtccaccgctgggcgggagacgtctctccgaagtctctaacgagaacacagcaaggccgtggggaggaggctgtggccctccaaccaccgcccccgggtgccagggtcgagcctgcccagggaaagctcttctgggcgcggagcagggaatggaagggcccgagggtgccccctgaacgcgcggctccgtgctccggctcagacctcccgagacccccttgcccgcggcggtccaggcctctcccctctcacgtacctggccag

SEQ ID NO: 27640 - DNA, 943 bp, Artificial sequence
  DNA replication origin
gcgtggtggtgggcgcctgtagtcccagctactcgggaggctgaggcaggagaatggtgtgaacccgggaggcggagcttgcagtgagcggagatcatgccactgcactccagcctgggcaacagtgcaagactctgtctcaaaaaaaaaaaaaacaaaaattagctgggcgtggtagtgggcacctgtaatcccagctactggggaggctgaggtgggagaatcatctgagccggggaggcagagaggcggaggttgcagtgagccgagatagtgcctcttcagcatgggctggagactccgtctcaaaaaaaaaaaaaaaaaaaagaaaagaaaaagaattgaaggggtggagataaaaagcacccacatttgggagacagacacaccttggagatggaaaggacctaccagtgaggggaggggggcttctagaagtgggggtggggagctggttccacagaggcatcctggagccaggcccaggaccacctctcccccaatgcttgctgggtggccccaaggggggaccctgccacatggccacaggagggctccaagggtgggctgcatcagggcatgtgaccttggtggtttggggtccaggacagtcattggagtcccagggaagattagagagggttgaagaggcagcgggagggaggaggggcccagacccttgggaagggaactggagggggcctggtggatggaggtcctcggtgttcaagatggcagggcacatttatgtgggggggctggagccagtgaccagaagtgcatgcagagggggataaaaggcagagaagcaggccgggtgcggtggctcacacctgtaatcccagcactttgggaggctgaggcgggcggatcacgaggtcaggtgatcgagaccatcgtggctaacatggtgaaaccccgtctcaactaaaaatacaaaaaa

SEQ ID NO: 27641 - DNA, 1252 bp, Artificial sequence
  DNA replication origin
tcccagcgatctcagggagcccgagcctggacctggaccggggctccggggtgtggccgtggcctggggccctgtctgggggtggggccactattccgactcccggtaatggtccagagctgctcaggcaggcggggcttcctaatggacattaatggcccttcaagcataaccagaccgcgcctagggcctcttccctcaggctgcaccatgcctctctttacattctgaaactggagcaggcggagccagcgcgacagaaggaggtgaccaacagagacccacagaccagacagagagagaaggccgggggactgcgacgacccaagagtggggagaggcaggaaaccgctgccgccgacggggcgaccccgcccacccgtcgtggccccgcccactgcggctctagccccgcccgttgctggaggcgcgagtcggacgctaccgcccggaacagtagccgcgcagcgccacctggccggaactggtggcattgcatcgtgcgaggagttgccccaggatcctgcccatctggcttccttccactcgatccagtcctgtggggtggggactggggtgaggctggcgccctaggcctggttgcgctgcaggggaataagggtgtggagtgggggaggcagagaagcctctcatgggctctgtctccccatcttggaccaggcaagcaccagggaacatcactgaacgcccccccgccagccccgcgagaacagagctttgagcaccttggcctgcgcaaggggaggccagagctgaagcagccccaggaagaacatttaacccagcctggggccctggagtcctccttcggcgggggaggtcccgggctgtcctggaatctgcagtctggagcaggcggtggggaagggggaggaggcagtgggaggggcggtgagagcagacagagccagccctgccagagcacgggtatcgtcccataggcagtggggagcccttgaggcgtggtgtggtggtgacgaggtcaggacatccatgttcttagaggtcaggttcagtgaggaacaggggcaggagtgggaaggaatgagctcgcaggagaatgagttgccctgtgaggtgtgtgaccacctcttcacccagcacagagccggagggagggctagatggaaccaagggctccataagaattggctgttggccgggcgcggtggctcacgcctgtaatcccagtactttgggaggccaaggcgggcggatcacgaggtcagga

SEQ ID NO: 27642 - DNA, 1272 bp, Artificial sequence
  DNA replication origin
ggtggctggatgggagactccagcagccccaggtcccctgggtaagggggcttgcagaccttacccgccctgggtggggcagacgcctgatcagccttgggcatacaccatccttccctggcccaggactcagctgattcctactcccagtgactgaagatgggctgaggggccggagcagtggctcacgcctgtaatcccaacactctgggaggccgaggtgggtggatcacctgaggtcaggagttcgagaccagcctggccaatgtggcgaaaccccgtctctactgaaaatacaaaaaaaattagccaggcgtggtggtgggcatctgtaatcccagctactggggaggttgaggcaggagaatcgcttgaacccaggaggcggaggttgcagtgagctgagattgcgtcactgcactccagcctgggcaacagagctagacaccatctcaaaaacaataaataaataatttaaaaacaaataaaaaaaaaaagatgggatggagaacagcatggcagagggaggggccacaagggacatgaggtcacaaccagggccaggaaccaaggaaatatcaccggacacactgctgctacagagttaacaaaagagtccccaaagccatgaaggagctgaggagggtaacagagtagcaaagggccgggcaacaaaggaagtgggcctagcaaagcagggagcaggaggaatgaggcagccagagaggaaccagaggtcacgatttcagaggaggtgcagagtcagtgagaggggacagtgagtccaggggcctggaggaacaggcgaggaagggtgacctagaagctctcgggggcaaaccctcccaggcctcttctccagccagcctccggaagctctcagccctggtccgaggctgaccttggcccgtatgggtgctgcgctggaggcagagaaaggcgaagggaagcacctgggcaaaggtgttcaggggccgcaaagtgcttggtgtctcgaagaaagggctagggaggtgggcgggagggagtagggtcagcatcgagaggagggtggactttattttcctggttctgtggggtgcagatggggtgtgggtgacgtgggctccccgggccccagcaggagggaagaaagtcaaggcagaggcaatcagaggcttgggagatcccccaactctccacccaacccccttaacccacgcctgccagcatgctacccaggcgtgggtcctatccagcagagggagagcaggtctcagccgttcccctggg

SEQ ID NO: 27643 - DNA, 1699 bp, Artificial sequence
  DNA replication origin
tcaggcgtctgccccacccagggcgggtaaggtctgcaagcccccttacccaggggacctggggctgctggagtctcccatccagccacctccctcgactctagtgtggccaggaagctacagcctgccaggttttgggtggacctggttggtgtgggatgaccccctaagcccaaacaggtgtggtatgtggggtgcgtggtggtgggtcacactgcccacagccatcttcacagactccaagggtggcagcaccaggctgtgtccagggaggccagccacaggccagacaggcagcctctggacatgcagacagagagatggaagcggccggccgggcgggagcctgaagcagccttacccaggaattgcaggggttggggtggcgagcagtcgcggcgcctcagcctaagtggcttttaggggcagctgccgggatatgggcacccagggggccatggcccaggaggctgcccagaggcgagccctgtgcttgggtgggggcaggggagcccagcccagggccccggagagacgagagggagaggaggactgcgccaagcctgcttctacggctcacatggggaattgcctgggctggctgtgcctgacccctgggaaccaggtatgtgcaagggggcctggctgggctggggaggagggcagactggggctgtgcctggactcagctaccttcctatattggagacagaggaagagctgggtggtgaagatagcatggactccgaatctcacatccctgggcccaaatggagctgaggaggcttcgtgggtcttttccctctccaggcctgtttgcaggtctgtgaagtggccggtcccctagggttgttccaggtaaaatgcacttaggcctaaatgatttcactgtggtggtgactgtcctgttggggaaggagggacactcgtgcttcaggtagaggctgagggacgtggacggctgtgggcaggggaggggaggcctgctgcctgcctgtggacactgtggagcagcgcctgtgcacacccagagcttagagcccaaataattcagtggagtgtagcccatgtcaggaggtgggtagcagggaccctcgagactcatatccttttgtcaccctgcaaagtcacagtccaggcctggggtgggctgggacacaagtgagggggccggcccggccaagggaaagaatggcagcagggcgtgggaaccgacgcggtgcagataggccgaacacggtgggtaggccagggagtctcccagccactggcccccaggatgcagggaggggctgctgcgtgtcacttttaaagccctttttgcctcctgggccctcctgagactctgccctgggccagggagtctcccagccactggctgggagggatccaggtgagacacagccgagaggagacaggcaagggggtccggaagggcttcccggggagggtggggagggctgtggcccttgttcttaccctttggcccctttgtcggggtcccttggcctggagaccctttgtccaacccgtcgcccacctcaagacctgcctcgatgctgcgcatacagtaggtatccaataaatgttcctgggatagaaggcaaaggcgctggcaccaaggcggctgcccagagtaggggcgagacagagaggtcccggtggttaaggggtcccctagccctgccgcctccccctg

SEQ ID NO: 27644 - DNA, 1904 bp, Artificial sequence
  DNA replication origin
ggcggccggtgggcagcgggcgccatggccgcgccggagccgctgcggccgcgcctgtgccgcttggtgcgcggagagcagggctacggcttccacctgcacggcgagaagggccgccgcgggcagttcatccggcgcgtggaacccggttcccccgccgaggccgccgcgctgcgcgctggggaccgcctggtcgaggtcaacggcgtcaacgtggagggcgagacgcaccaccaggtgggggccagcgctcgcccccggcccgccgccccctccccgagcgcgtccccctggggcgagcaggggtcgcacgggggcccgagggggctcccgcggggaggacgcggacgttgtcgggaggcagcggcccggcgccttcggagtcccggcgcaggaagctcagtcctgcacgggggtgggggggggcatcctggcagggaggggcccgcactgcggctcctggccgctggcctcgccctttggtcgcgttttggcctcagtgtgccgtgaaggagggtgttgggccgcctggagcccctccggaaaggtgaagacctgggtgcttttgcctgggtgtgtgtgtacacgtgtgcgtgtgaacacagctgggcgtgtgtatgcaggtccctttggggtcagccatgtgtgcatgcgcctgcctgtgcgtacccaggaggggtcgcagtaaaggcatcagtgtgtctgcacctgtgtgtgctgtagtgtgtgtgtgagtatacaggtctgcacgtgtgcctgtgtgtgtgcaggtctggactcctgggcgtatgggagctgggctctgtgtgtgtgcacgcctggctagtgtactcatcactgtctgcaggccggtgagtctttgtgtctgtactctagtgtgtcccagctggtgtgtctgggaccgggctgagttggtcattgctggcaaccacattccttagctacaaaggcactactcctcctcagaggctgcctagcctggctggggttactggccgaagcctcctgcctcctggctaaggagaacagagccttttctctgtgggttctgacccctgaggtgtgtctgtctcccacaggccagggactccctccagaccctggttggggtccagcgtccacacaccccttttcctccaggtcccctgtccctcacagcaccgatgaatccataacctgtctacatggctggtcctggaacctagagattagcaggttggttcagctggacctggagctggtctcctgtttacctggtgccttgtctgtcactctgtcggccggccccatgccttccacccagagtgtctgctgtgtaaggttgtttgctgaagaatgtggggatcaggccaggggcctggacctgagggattgagggtagggctgccagggctggggccaggctgctgttggatagtcactgccaccctcgccctgggaacacctgcttttccaaggccctgtggggctggtctctgaggactggacacacagaccatggtggactctccccactgccccaggagggcaagaggggcagttactgccccatttgacagttgaggaaactgatgccagagattgagggtaacttgtctgggacacatagtcaagaagcagctgggcactgggttcctcttgtctcactctgggtcatggggagagaggagggctgggggaagatgggcctggctcagtccctcctatctgttcaccacccctgctgagcccggcagctggtggggagccttgtccaccctcccccaggccgcaggtgggagtagggctgcccctcttcctgcccacttcccagtgggcactgctttctctccgcgggtgtgcgctggccccccgcgtggtccagacacttcacaggcacctgcacgcacacaccgacggccacc

SEQ ID NO: 27645 - DNA, 1831 bp, Artificial sequence
  DNA replication origin
gcggttgtccctgagggctctgcctgtgcgtccccctgccccgggctctcctccagagcgtggggcaggcgctcctaggccagcagttttgttttctctccagaggcctccgtggggctggctgcggtggcggctctgtttgctttcacattccaggaaaatgagccgccccacccccgtgggcccagcaagcaggggctggggcaggagcttagtgtggacagggcacagagggcctcctggtgcccggaaggaccccccgctaccatcccaggccctgccccatgttacctctggcatcctgcggtagggctctgggccaggggaccatgcaggcaaggccaggcccaatgaccacctcccagccagggggtgggccagggtgcggcggcggtggccagcggctgcccgtgctcagttaaacatggcggtggccggagcaggcaggaggcagctcaggtttccagggagcgccaagcttgagggcgtgcgcaggggagactgtgcaggcgggctgggggctgccagggcccttccctcacctcctacctccctgtgtgtccctgagggaccacaggccaggccaggccagggctggggcggcatggcaagggggcgctcagacctcaggagggcaggtctccaggcctcagacacccccaacccctccagccacccaccttcaagctcgctccaaaccccaatggaccagaaacggccatgtcagcgggggggaccgccccgccaagggagcaagggggtccttctccacacagctagtgctctgtcccctgggctcaggacctgcccttggtctggaacacccttctcctgtccagcctgccagatgcctcatctgaagcctcctgcccaccctctgaaccctctctgcatggccaccacccagcccgtcacaccagaaactccagggacaagcctgtggctccctggccccacaggggctcagctgggccacatgggctgaattagagggtgcaagacccccaaaatctccagggccccaccacatagactcactcctcccccagacacacctggtggcacaggcgtggggcttcaaggctgaccctgacacctgcccaccaaagtgcccctcagggatgcagtcacagcacggcccccaggctggcctgggacgcagggaaggcgtggggacaggagtccagttcgggaggggaagtggagcacagcccccaggctggcctgggacggagggaaggcgtggggacaggagcccagttcgggaggggaggtggagcacggcccccaggctggcctgggacggagggaaggcgtggggacaggagtccagttcgggaggggaggtggagcacggcccccaggctggcctgggacggagggaaggcgtggggacaggagcccagttcgggaggggaggtggagcacggcccccaggctggcctgggacggagggaaggcgtggggacaggagtccagttcgggaggggaggtggagcacggcccccaggctggcctgggacggagggaaggcgtggggacaggagtccagttcgggaggggaggtggagcacggcccccaggctggcctgggacggagggaaggcgtggggacaggagtccagttcgggaggggaggtggagcacggcccccaggctggcctgggacgcagggaaggcgtggggacaggagcccaattcagtggaggaggtgggagcgtgatatgggcccagtccgcaaagacacatcacacagccacagacacaagacgtccacacacacctgcaaacacgcacagcagcccacacatgcggccagccccacagtgct

SEQ ID NO: 27646 - DNA, 1164 bp, Artificial sequence
  DNA replication origin
gtcggggaggcttctgggtttgaaaacaggctttgcccaagttcccacagctaaagctctgtcacaggcagcctgggtgcccggagtgtttgccactgagacctgggcctgcccgtggggggcacggtaccgagtttgggcagtggcggcaccaccggggagtggcctctggaggcgggaggctggagcaagagactgaccctgtccgttgggcctgcaggatgtcagtgggcccctgagggagctgcgccctcggctctgccacctgcgaaagggacctcagggctatgggttcaacctgcatagtgacaagtcccggcccggccagtacatccgctctgtggacccgggctcacctgccgcccgctctggcctccgcgcccaggaccggctcattgaggtaccggcccaccagggctgcggggtgccgagtgccccgcacctgtccacactggggccctgggtccttgcagggaggagggagacgctgggaacctgagctggtgcgcctcctgctgcctcggtgggcggtggctgtgatgaatatttgatgccacacctggccacgcggcgttgggggctgtctgggcccatggcggggctgatacatgctggtggcggcaggtgaacgggcagaatgtggagggactgcgccatgctgaggtggtggccagcatcaaggcacgggaggacgaggcccggctgctggtcgtggaccccgagacagatgaacacttcaagcggcttcgggtcacacccaccgaggagcacgtggaaggtgggccacggcccagggcacagggtgggtgcggtgtggtggctgagcagccactgacacgctgtccccacaggtcctctgccgtcacccgtcaccaatggaaccagccctgcccaggtaagagggtggggtgcccatgagacacagggtgcctctgggggtacccaggcccgacagaggcccccttctccctggagatccgtcctcgaggtgtgctagtgacacccgattttagccctgtcacctccctttaatgcccctgtgggtctcatcctgggtcgtgccacacacaagccacgtggggcccctggggtcggggccactgccttctgtcctctcctgggcaccacctggtaaggagttgccctccagtctctgcctcctca

SEQ ID NO: 27647 - DNA, 1209 bp, Artificial sequence
  DNA replication origin
ttcacccaggctgaagtgtggtggtgccatcttggctcactgcaacctccgcctccggggttcaagcgattttcctgcctcgccctcctaagtagctggggttacaggtgcctgccaccacacctggctaatttttgtatttttagtagagacgtggtttcgccacattggccaggctggtctcgaactcctgacctcaggtgatccacccgccttggcctcccgaagtgctgggattacaggcctgaaccaccatgcctggcccatactacccattttacagacaagcaaactgaggctcagagaggcctgtatccaagccacctggtagcagaatagggattagaactcagcttggtctaagggtttcaggccctgggaccgtgaagcaaaaggaactcttccttcctgatatcacacaaagcccaggtcacgcctgcactgggcagaagttcgagcacgaggccctaaaccactggtgtcctgacctgctgagtggctacagtgatgcaggcgatgctctggggcaccgggtgtccatcctcccaaggtgctgtctgcaggggagggtgccagccaaaagccaccgggtagaaagaaaacaaggaccttgctaagatggggggtcatctgggcagatggggcccctgcctacctttgggggggcactggagtcatagcagtgctcagtccccagatggtccacaggtgcatcctttttgttcctcatggcacggatgttgaccagctgttgctgccagtcctggggctcccagactggcaccttgaggggctcagccccctcacctttctcactgtccgagccctcataggccacacgcagtctctgtgctttccgcggacgcttcacggggctgtggcttttcctcgcttctgcaaaaagcaccacgcagtccctctggtggggccacaggtgaaggtagggtaggggtgccatcccgcctgctagctcacccctcactcgttcatgccacaactgtccatcatctaatacacttggggtgctctgccctctgcagtctggggtatgtgggccctccttatgccagcgaccctgacaaggtccatgttagctcatgaggactctagcaacagcctgtaccaaggtgcccccaatacatcttctatactgcaccagagacagtctgctaacacccacatcaggttgtgtcactcccttttaaaaaa

SEQ ID NO: 27648 - DNA, 1293 bp, Artificial sequence
  DNA replication origin
tgccccgtggggaccgccacttaccccgcgccgcgccaccgcgctccgggccgccccgacgcggagaaaggcgcacccccctggccccgggacgccgccggaagcgcgacccgcacttccggtagcggcattgcgcggagggccgccttgggagcttgctgggagttgtagttctgtgccgccctctggcggaaaggccggcgatccttgcatcacgtgacggggccgcatgggccgccgggatgtgtagtccgcaggagtccggcatgaccgccttgagcgcgaggatgctgacccggagccggagcctgggacccggggctgggccgcgggggtgtagggaggagcccgggcctctccggagaagagaggctgcagcaggtagcgccgcgccgtggctggagcgtgggaggaggcgggataggggctgcaggctggagtcccgggccgcctcctgcggctcccagctgcgcgggcaggggctgcaaacccggcagccgcgaacggttcccacgtgcggccctgcgttcccaccttgcgcctttttcccaaagattgcggtccgcaggggctgggtttcgggcgctccgctccgctgccccctttcgccccaagcaagaaaacgcttcctttcccaccactctgtccgggactctccactccaggctctgtgggtcccatccccgccctcctgcagtgaacttgctgtcctcggagaggctgggtgccaaggacacacgcagccagaagcctgctcccccagctcgggggagggtgcctctgagggaaaacaggaaagggcatggcacttattatatttatcctgcagccgttgaggacctgctgggggccaagcactgcagtgagcagtgagggacacggacagggcctctgcgctagtcccgctgggacttctgcagaattggccagagctggattcccataggcacccagggaccccaggggtagtccagactatgtcaggaggaactggtgcagctgggagcaggcaggtggtgatgccagccagggtggcaggagctttgatgccaggatagagtttggagtttattatgacagtaaacggaagtcaattaggaggttttgttgtttgttttgagatcgggtcttgctctgtcacccaggctgtagtggagtgttgtgatctcagctcactgcaacctccgccccccaggttcaagcagttctcctgcctcagcctcccaagtagctgagactataggcccctgccaccacacccggctaacttttgtatttttagtagagatgggg

SEQ ID NO: 27649 - DNA, 1542 bp, Artificial sequence
  DNA replication origin
cctgcagcccctatcccgcctcctcccacgctccagccacggcgcggcgctacctgctgcagcctctcttctccggagaggcccgggctcctccctacacccccgcggcccagccccgggtcccaggctccggctccgggtcagcatcctcgcgctcaaggcggtcatgccggactcctgcggactacacatcccggcggcccatgcggccccgtcacgtgatgcaaggatcgccggcctttccgccagagggcggcacagaactacaactcccagcaagctcccaaggcggccctccgcgcaatgccgctaccggaagtgcgggtcgcgcttccggcggcgtcccggggccaggggggtgcgcctttctccgcgtcggggcggcccggagcgcggtggcgcggcgcggggtaagtggcggtccccacggggcaagtggcggtccccacggggcagcggcctagagaggcggaccccgcagtgtccgggtcccgggccctcacccgcgcccactgcaacccgactccggagctccgagcatcccttagttttaagtcatggcgggtgcgaacgggtctctgctgcaggcggctccgtgacagctcctgcttcacatgggtagaggagagacggcaaacgtcggggctcccaggacttcgcggcggcagtcctaacccgtgcactgagtcgggcggggcgggcggcagcgtctgagtagagagctctctagaccaggcctggtgtctcccgggctttcctaggtgcctgtttgcgagctggtcagctgggctgtagttgagttctcccagggagtgtgggaggaaaggttatgcccaccagagacccagggtcctgacggctggaggtccgcagtggggaaggtgggcagaggtgttgctcagatgtccccattcctgtttcgtttgcacagaggggttttctggtgcgtcctggtccaccatggccaaaccaacaagcaaagattcaggcttgaaggagaagtttaagattctgttgggactgggaacaccgaggccaaatcccaggtctgcagagggtaaacagacggagtttatcatcaccgcggaaatactgagagtgagtgagctacctgtgtctttgctaggctagagggaaatgcagagaaggctgggtttggtcttgcaccaggttctgtgggagacgggttgctggcaactgtctacacaggaatgctgtctccagtacttggaggccgacatgtccttcctcaggagacttcgaaagtcaggatcttggtgacctggttcaggcacacttgagttactattcagatgttgatgaaagaaagcccatcttatagatgaggcctgagtatcatcatcttcacaggtaaggatatgtccaggtgttacatgataagatgtgagttcctgggagaagtaggttctttattttattttttttttgagactgagtcttgctctgttgcctaggctggagtgcagtggcacaatctctgctcgctgctacctctgcctcccagtttcaagtggttctcct

SEQ ID NO: 27650 - DNA, 740 bp, Artificial sequence
  DNA replication origin
ccaaacgctcgccctaaagacaaaagccacaggatcagcagagcctgccagcgtcgcccacacggctgccaagaagtccctgaagtgcaggggcacccggactccagccctggacccctctccttcccacagaggcgccctgcaagagacaggtctgcagcatcagcattgtacagggcagggggccggatgcaccggccgaccgcagagcggcgtatggggagcaactgctgtgtgtcgggacctggcacagcgggtggcgcagagcaggggatgacacagctcctgcccgacccctgcactcggtgcagggcagacagccttgtgctcagagactgaggacaaggcctgagtgggggaaacccaggagagcctgtgagagtggacggcccttctgagcagctgggacatgaaggagtagaagtggccgaccaggggaggcaggaacaccaagaggcctgggtgttcagggtcagccaagaccagcacagatggaatgcagtgagcaggggagtggccccgaaagggtgcaagggcaaaacaacaccgtagccccacaccagctgccaggtacgatctcagcactctgcgagaactgcctcatatgatccccagaacatcccataagaggaaggtgcagtgaccatctgtttacaggcgaggaggcagtgcctacggtcacacagacctcatgacaccaggagaccccacaggccatccagctccagagcccatcagcc

SEQ ID NO: 27651 - DNA, 1183 bp, Artificial sequence
  DNA replication origin
caactgcctggaaaggcctagaaatgccaccgcagcccccgcagcaggacccccagtgggatgggtgggcaggcgtgaggggagctctcccgttcctgccagctcactgcacacagaaaccgccttacctggtaaaatgatggcaacacagatgtcggcgagttcctgagagaatagagccggtgggctccccagagagccatgcccacaaaaaacacggctcctctcagcaggggcgcgtcctccatgtaggctctaaaagtgttccccagagagacggaatgtgagcagggccctgtcccagggtccgccatggatgtgtgaggttgccgaggctcctgcagcagccccagaggtccctgtgcttggggggggcaggagcaccgctggggaagggcagggaacagaggccagcagtaacactcttgttcactcctgcgcacaggcggcagcccatcactgctgaccacgctgtgagctacaggtcatgccagggacaggaagcaggcaagagggatggcccacagcctcgcagtctgggggagacaggcgccagccacataatctcccaggtaaacgcaaaatctcttcctccaatcacagccaagaaggaaagccacagcaaaaactactcagggaggtgggggagtcagtgaccacgctaagacctcagtaaacagagtaactcggcaaaggtggaagaacctgctggcaagaggaatcagggcatgcacaagcccttggtggaggggagaaggcaagatggaggaaaggagagatgcagggggtggggcagggctgggagagatgcaggctgaggcagggctggcccccagggcctggttctacgggaggagggagggagagatgcaggggctgaggcagggctaggagagatgcagggctgaggcagggctgggccccagggcctggttccaaggatggagggaaggaaagatgcagggccgaggcagggctgggagagatgcaggggccgaggcagggctgggagagatgcaggggccgaggcagggctgggagagatgcaggggccgaggcagggctgggagagatgcaggggccgaggcagggctgggagagatgcaggggccgaggcagggctgggagagatgcaggggccgaggcagggctgggagagatgcaggggccgaggcagggctgg

SEQ ID NO: 27652 - DNA, 1711 bp, Artificial sequence
  DNA replication origin
catgactttggaggaccgcattagtcgagtctgttaaccacagctttaaggaggactccacggccacacgggctcatcagcataggggccctggggaggcgaggctagtatccagcagcctcagggctgtgccttttcctggagcctggggcgggtgatgtacaggaggccaggcagcagaagggaggccgggacttcgccgggacttagcagggactgaagtcctctcagagcctgtcgctgggccagagcattgcccccgaccgctggtggcagtggcagaggtcatagcctggggcttctaaaagaggctggacctgggagaggcaagaaaggcttgtagttgtggctactcttggccctcctgcccgagcttccttcttggcccagctgcatgggcacagccaagattccttggggggtggggtacgggcaggaacagcagctgccatcacagccactgtggccccttgagaggatctggggggtgtcctgggccacgtgggtcagggtggcccctggagaggatctgggggtgtctcaacccatgaggcccggagcggcctcagagggctgggggcgtctgtccccatgcggcccagagcggcctgagagggctgagggtgtctccatgcggtgggtgtgtagcgaggcctctggtgccaagtccatgtggggagtggaagtcagcctgtgtcatcgtgcctggtactgcagaccttggacagcccggagctcaggaccatcgtccatgacctgttgaccacggtggaggagctgtgtgaccagaacgagttccacgggtctcaggagagatactttgaactggtggagagatgtgcggaccagaggcctgtgagaccccctcctgggtggggcctttgggctttggctggtggggaggggccgggtgctgggtgaagtgcagctttctgagcctcagaagccaagggccaggtgggcgcctgctttccaggtttctgcactcggcagggaaggctggcaggcacagcacgtgtttggtaacaagctcggggctagcccacccatcagtttcctcccacctgtgtggagcaagcttccatccggctctgtagagtcctgtggctcccaggcggccgcagtcattttgccaggaacactcagcttagggcccaggcttttccatgggtttggacacaagtcttccccgctgccaggagtgcctttgtgtctgggctgtgggctgcaggctgtgaggcggctgggctctgacagcaaaccagcctctcgaccagcagcccagtgtggagaaggagagcgccggaggggcagaggggcaacaccggctcttcttttgacaggagtcctccctcctgaacctgatctcctatagagcgcagtccatccacccggccaaggacggctggattcagaacctgcaggcgctgatggagagattcttcaggtagggggtcctctgtagccttgcctggcacctggagcctggccctgtctctgtctggggcccacccgggctgggtctcaggatgcccgatgagcagggccctcccctctgcctctggagagccctggctctgggtgagcaggtgctagcttgctttccagtccagcaggacaggtcctctcatgacgccactgggctccctcttttcgggggtcgtctggagagatgctccctgggaagcagagctctgtgccctgtgtgcct

SEQ ID NO: 27653 - DNA, 1517 bp, Artificial sequence
  DNA replication origin
ggcccagaggccattgctgcccacggagctctggcacgctagcacccggccccgggtacaacggctctcaccttctcgatgatgtccagcaggctgttgaagtggtgtgtgtggcagccctctgccaggtccaccagcaactgggtggccagctttcggacctggtggtctttatcctcggggatgtgggagagctgcgagatgaccactgagttaatcagctcctcctgcacaggcacaagggaggccaatgagcgccagcccaacgagggccacatctcgtgacacttccaattcctcaggaaccgacccgcaagcagcggacatgtccctcgggacttcagcacagctgggcagagagcacaagcacccgctgagcgcgactcagagaccccggggccccttccagggatcctgtccagctcctcgttcagaaggctggtgagcaccgcagggcggccgggcacagacacggggcccacaactcacaaggagcagccgaggtgaggccctgcccttcactgtcacagccgagaacccctcccacatggtgctgtgcgtgtgtgcgtgagggtgtgtgtggctgtgtgcacgcgtgggcatgtgcacgtgtgtgcctgtgcatgcgtgaatatgcgtgtgtgtgcgtgctgtgctgaggacagcgtgagttttcacagaagcaggtaaaaagttccacaggaacagagaccaggacaagaccagccctgatgggagaagccagaggacccagaggaacttccaggaggcccttagctccctcagacagaatgcgggatcgcaatgcccagcaaagggcaattcaaggacagtggacgctggggagaggagcagagtgggcagctctcaggagggcaggactgcgaggctgcagggaggagttcggtgggaagggacagcctcagagcctaagctgcgcctcctgggaaaggggtatgactggcaggcacacaaatgtctctcaaggaaggtgggcctggggccacagagctcccagaggagggagtggagagggagagcccgcagaggagagaccaggcagggctggcgatcacgcaggtgcacagggtgaacgtcaggactgaaacggaagacaatgtccccatgcaagactggctgaaacgaactcacacagaatttttaagaggctcctgtgttgggtgaaaaccggccggagctccctgagggcaggcactgtgccttccttgctacttggccacgtgtcaaggcctggcagaggcacccaggacgagcaagccagtgaatgaacaggggtaaacagaccacgctgggggctgcagagggtccggcaggaccgaagtcccaggcagagcccggctctgcgggagcacgtgcacaacagagacagcccgcccacggagaaatagccctgagcccccagctgcggccgcctggacacgcacctcatagaactgcctgttgatgagcagcacaaaggacagcacgtccagcaccttgatgcgcacggcgcctcg

SEQ ID NO: 27654 - DNA, 675 bp, Artificial sequence
  DNA replication origin
gcacggtgacatgggttggggcagagaaaaggacgcacggcgacttccggggcagtgcatggccctgacgctcctggtgctgcagaatctgtgaaggacctgcagcagagggctgggcaggtgggcggcacagggcagagctgagagggcagagctgagacggcagggcagggctggagagggcagagctgagagggcagggcagggatgggcagaacagggctggaggagtttcgctgagtttgcgctatagatgttggcaccaggctgagcagaggtgactgggatgggagccctccctcctagagcaggtgctctctggggccacccctgtggcctcagagtcctgttcagcctgtcgatggaagaagtggcagggctgggagctgagctccgctttctggcagttgggggcgtgtggtgctgccagaggagcgaggcgcccatcccttccatcccaggcgggcccagctgtggtggtggggacaccaggctctgtgagctccgaggcaagggagggaggaggctgtgggtgctgggcctccggtgtcaccaggacagagcctgtgtctgtgttgggatgtgggtgtgtgcacatcagcaggtggccttttctgagtgcctgtggtgctggacgtgggtctgagcaggtgggacgccgcctgtcctgggcct

SEQ ID NO: 27655 - DNA, 1003 bp, Artificial sequence
  DNA replication origin
tctggggcgttggggctccttcctcacccgatagtctgaggatagccagaccccccaaacaaggcttgaataactctccacccgtgaaagaattcaaggagagctctgcagccgaggccttccggtgccgcagcatcagtgtgtctgaacatgtggtccgcaggtagcgggactgtcgggtggggggcacggaccctggagcttggccccgtgagcacctgggtggcagtgcatggggctgcttgcatgacctcatcgtctgcccgtgtcctccctggccagcccagggggagccggtgacgaggggtggaaaggttgcattctgtccccaggccccgtatgagcacgggctggttgcacgcatccccaggccccctcggggtgccgctccgagagagccaggcgtgccgggcagcagcctccccaggctgtccccaagggccgcagtgtgggttgggggagacaccactcctggttttggccttttcgtattctctagaatggacgtttttcttcgggctttcttctcaacaaggtttattttttgttgtagctgaaagggaacaaggggcatttgtggagggtgctggggtggggcagcctgggagggcctgggtgggggctaggatcctgcagggcatgggcatgggcctgggccccaggccatggtcttagttctccccgcagtgtctgggtgcaggtgtgggctctcgggctctcggctgtcacctgcctgtgggtcatcgctgctggcactggcagaggggatacctgtctcctcctggaagcccgttgcaggccaaggggtcccatggccctcagtccatccacctcctcacctcaggccggcctctgctgggtgggacttggccaggggttggggtggtagaggtgctcggtgaggcttaaagccattttctagcacattctgtatcatgagcaaaatattgcctaggggctatgaaatttgtatcagaatgaactcccataagcctcttccctg

SEQ ID NO: 27656 - DNA, 1288 bp, Artificial sequence
  DNA replication origin
gtcagaccacggctcgctggagcagagaagggctccaggactgagccgagctgaaaacccgcaggaaacaccagcacccagagcaggcccctctgcagcaagcgggccacactccaccactccacggctctggggtgagctgtggaaggctcaccccagagtcaggacgtgggccgggcctgaagccagccaccccggcccctgggctcggggccttcctgaacactgggaccagcagcaactgagggagccccggtgcctgtgtggaggtggctggggccaaggctcacccgacatggaacggacccgatcccgggccccacgggacacctgctgcccagcctgggactccagcttggccggcgcctccttggtctgtctcacatgcaccccggggctggagctgagaagagaatcccacgcacagggtggacttagtccccaggctggtacgagggtgccacgtgggcctgggctcgggacagccggtgtcgaggctggcaggcgcggaggaaaggaaggtgcagtcacctcgactccgggccggactgcagctcccccgagtccaggcctagtaacgaccgggtcccggttcccacgcttgtcgtcacagtgacaagcttgttcccaaccagccaggttttggtcctgccacccgctaggaggaactcgcccacaggagacctagaagacagggagcgtgaaacccagcttgcccgtggagctcccgcaggcccgcccagccctgtagtgccgcctggacctcttcgggacagccgtgaagttggagaagacgtatcgagccatcatgtccagacaggtttccgtgagctccaggtggaggtttttcaggctatcgtcagcctgggccacggagttctcatctgcagaccccaagctggcactggtgagggacgtctgtatcctgctggagggagaggccgtgaccagggtcagggtgccaggtagggcgggccgagccacctatcaccaagggccaaagctcaacgcatgcacggctgaggacctcgctcggaaagaccccaacagggcgtgggcggcccagcgagcctcagcttgagaatcacgtggaccacattgtcccagagaacggggagacgctgggtggggaagaccaggcctactggtcggagcagactcaggaggctagagaccgacatccccctcaccgaagcccacgggagcactaggttacggcctcctggcgaaacggtgtagtcatgcagagaggcggaggccacacagacaggcccagattgcattctgc

SEQ ID NO: 27657 - DNA, 2652 bp, Artificial sequence
  DNA replication origin
gggagagggacacgccctgggctctgcccagggtgcagccggactgactgagcccctgtgccgcccccagttccgccacaaagtccgctttgaagggatggagccgctgccctctcgctcctccaggggctccaaggtatccccggatgtgcccccacccagcgctggctccgatgcctcgcacccctccacctcctccagccagctggatgggctgagcgtgagcctgggccggctggggacaaggtgtgagcctgagccctcccgcctccaagccgtgttcgaggccctgctcacccagtttgaccgactcaaccaggccacagaggacgtctaccagctggagcagcagctgcacagcctgcaaggccgcaggagcagccgggcgcccgccggatcttcccgtggcccatccccgggcctgcggccagcactgcccagccgccttgcccgggccagtcggggtgtggacctggccactggccccagcaggacaccccttcgggccaagaacaaggtccaccccagcagcacttagtcctccttcctggcgggggtgggccgtggagtcggagtggacaccgctcagtattactttctgccgctgtcaaggccgagggccaggcagaatggctgcacgtaggttccccagagagcaggcaggggcatctgtctgtctgtgggcttcagcactttaaagaggctgtgtggccaaccaggacccagggtcccctccccagctcccttgggaaggacacagcagtattggacggtttctagcctctgagatgctaatttatttccccgagtcctcaggtacagcgggctgtgcccggccccaccccctgggcagatgtcccccactgctaaggctgctggcttcagggagggttagcctgcaccgccgccaccctgcccctaagttattacctctccagttcctaccgtactccctgcaccgtctcactgtgtgtctcgtgtcagtaatttatatggtgttaaaatgtgtatatttttgtatgtcactattttcactagggctgaggggcctgcgcccagagctggcctcccccaacacctgctgcgcttggtaggtgtggtggcgttatggcagcccggctgctgcttggatgcgagcttggccttgggccggtgctgggggcacagctgtctgccaggcactctcatcaccccagaggccttgtcatcctcccttgccccaggccaggtagcaagagagcagcgcccaggcctgctggcatcaggtctgggcaagtagcaggactaggcatgtcagaggaccccagggtggttagaggaaaagactcctcctgggggctggctcccagggtggaggaaggtgactgtgtgtgtgtgtgtgtgcgcgcgcgcacgcgcgagtgtgctgtatggcccaggcagcctcaaggccctcggagctggctgtgcctgcttctgtgtaccacttctgtgggcatggccgcttctagagcctcgacacccccccaacccccgcaccaagcagacaaagtcaataaaagagctgtctgactgcaatctgtgcctctatgtctgtgcactggggtcaggactttatttatttcactgacaggcaataccgtccaaggccagtgcaggagggagggccccggcctcacacaaactcggtgaagtcctccaccgaggagatgaggcgcttccgctggcccacctcatagccaggtgtgggctcggctggagtctgtgcaggggctttgctatgggacggagggtgcaccagaggtaggctggggttggagtaggcggcttcctcgcagatctgaaggcagaggcggcttgggcagtaagtctgggaggcgtggcaaccgctctgcccacacacccgccccacagcttgggcagccagcacaccccgctgagggagccccatattccctacccgctggcggagccgcttgatgtggcggagccgggcaatccacttggaggggtagatatcggtggggttggagcggctatgatgcacctgtgaggccatctggggacgtaggcagggggtgagctcactatcaggtggcacctgggcctgtcccaccagctcacgcctggacccacccccactcacatttgcgtgcagggccatctggcgggccacgaagggcaggttgcggtcagacacgatcttggccacgctggtgtccacaaggccctccatgtctggggagacttggtggtcacgccaggcccagggctcttggcgccacactgcagggccccacccggccctacctttcctgcactgcagggccccacccggccctacctttcctgcactgcagggacaccaggttgcactcgtagtccagcggggtgacgatcacgtggacaaagttgaactggccctgcccggacaagagaaagggtcatccccgcacacagcgtgtgctgaaggctgatctcggctactgcctggttgcactgctagacacctgtcagctccatgggcagcatctgcccctgaactttcccctctggcagcggggctgtgtttgtctggcctcccccaggccaagccccctccacatctgggcgcagcacccacatatgctgcagccacaggcaagacacctctaattgctggggcacctccac

SEQ ID NO: 27658 - DNA, 1463 bp, Artificial sequence
  DNA replication origin
gtgggggacatctgcccagggggtggggccgggcacagcccgctgtacctgaggactcggggaaataaattagcatctcagaggctagaaaccgtccaatactgctgtgtccttcccaagggagctggggaggggaccctgggtcctggttggccacacagcctctttaaagtgctgaagcccacagacagacagatgcccctgcctgctctctggggaacctacgtgcagccattctgcctggccctcggccttgacagcggcagaaagtaatactgagcggtgtccactccgactccacggcccacccccgccaggaaggaggactaagtgctgctggggtggaccttgttcttggcccgaaggggtgtcctgctggggccagtggccaggtccacaccccgactggcccgggcaaggcggctgggcagtgctggccgcaggcccggggatgggccacgggaagatccggcgggcgcccggctgctcctgcggccttgcaggctgtgcagctgctgctccagctggtagacgtcctctgtggcctggttgagtcggtcaaactgggtgagcagggcctcgaacacggcttggaggcgggagggctcaggctcacaccttgtccccagccggcccaggctcacgctcagcccatccagctggctggaggaggtggaggggtgcgaggcatcggagccagcgctgggtgggggcacatccggggataccttggagcccctggaggagcgagagggcagcggctccatcccttcaaagcggactttgtggcggaactgggggcggcacaggggctcagtcagtccggctgcaccctgggcagagcccagggcgtgtccctctcccccccactgggccgtacccacctccttgaccttgctgaggcccatccagaggcgcagcctgcgcaggaacaactccaccatctcgtagtcctggggctcccaggccggccggtacagctctccacgcaaggcgtggtagcgccagcggagaataacagcccccagccgtagggcgccccacagccgcagtgcccagagccccacacacagcaggggtgacaggtgccaggactcggcaggacacagggtagagagcccagtcccagggcacagcaccaacagggcctgggccacgctccagagggagtccacacaggaagacacgagctgcggggaaggcgacaccagtgagggcgtacagctgagctgagctgagctaagacgccctccccggccgcgcagtcacctaccaggatggccagctgggcgtaggctaccccgagcaccaccaggcccaaggtgacccccaggagctctggcagagctcggcataatgtcttgccaaagacggaccactggcgcacgaagcgtagctgctgggcagcctgcggacgagaaatctgtctgcttgcagccctggggtgtgcgcccagccccgcg

SEQ ID NO: 27659 - DNA, 1959 bp, Artificial sequence
  DNA replication origin
tgagcctgggtgcggcctgtgcccctgccacctccgtctcttgtctcccacctcccacccatgcacgcaggacactcctgtccccctttcctcacctcagaaggcccttaggggttcaatgctctgcagcctttgcccggtctccctcctaccccacgccccccacttgctgccccagtccctgccagggcccagctccaatgcccactcctgcctggccctgaaggcccctaagcaccactgcagtggcctgtgtgtctgcccccaggtggggttccgggcagggtgtgtgctgccattaccctggccaggtagagtcttggggcgccccctgccagctcaccttcctgcagccacacctgccgcagccatggctccagccgttgccaaagccctgctgtcactgtgggctggggccaggctgaccacagggcccccccgtccaccagagcctcctggtgtacatgctttttctgctggtgaccctgctggccagctatggggatgcctcatgccatgggcacgcctaccgtctgcaaagcgccatcaagcaggagctgcacagccgggccttcctggccatcacgcggtacgggcatccggtgcactggtctgtcttctgggctttagttttgcctttagtccagccagaccctaggggacatgtggacatgtgtagatacctttgtggctgctagaactggaggtaggtgctgctggcatcagtaggcagaggggagggacacaggtccgtgtcttgcagtgcacaggacgggcccatgacagacaactgtctgccccagaacatccccaggataaggctgagaagcccaggtctagccgtggccagcagggcagtgggagccatgttccctgggtctctggtggccgctcactcgaggcgggcatggggcagtaggggctggagcgtgtgactgatgctgtggcaggtctgaggagctctggccatggatggcccacgtgctgctgccctacgtccacgggaaccagtccagcccagagctggggcccccacggctgcggcaggtgcggctgcaggaaggtgagctggcagggcgtgccccaagacttaaatcgttcctcttgttgagagagcagcctttagcggagctctggcatcagccctgctccctagctgtgtgacctttgccctcttaacaccgccgtttccttctctgtatatgagagatggtaacgttgtctaattgatggctgctgggagggttccctggggtggcgccgaaccagagctcaggcgagctggccagcaggaaacactcctgttgggttttgatgaggccctggccccggcctggggctctgtgtgtttcagcactctacccagaccctcccggccccagggtccacacgtgctcggccgcaggaggcttcagcaccagcgattacgacgttggctgggagagtcctcacaatggctcggggacgtgggcctattcagcgccggatctgctggggtgagcagagcgagggccccgggcgtctacgccaaggacaagggagtagttctccaggagtgccgcggcctcctgaccagcctggctccggggtgccggaagggctggggtgcggcacccacgccacccctctccggcagggcatggtcctggggctcctgtgccgtgtatgacagcgggggctacgtgcaggagctgggcctgagcctggaggagagccgcgaccggctgcgcttcctgcagctgcacaactggctggacaacaggtgggagctccctcccctgccctctccggggtggccgcagtcaccagccaggagcccaccctcactcctccggcccccgctggcctaggcggcttccacagcccctcagccacgcctgcactgcgcggtccccgcagctcccgccctgccacccgctcctactgacccgcaccctctgcgcaggagccgcgctgtgt

SEQ ID NO: 27660 - DNA, 1248 bp, Artificial sequence
  DNA replication origin
ctgctggccacggctagacctgggcttctcagccttatcctggggatgttctggggcagacagttgtctgtcatgggcccgtcctgtgcactgcaagacacggacctgtgtccctcccctctgcctactgatgccagcagcacctacctccagttctagcagccacaaaggtatctacacatgtccacatgtcccctagggtctggctggactaaaggcaaaactaaagcccagaagacagaccagtgcaccggatgcccgtaccgcgtgatggccaggaaggcccggctgtgcagctcctgcttgatggcgctttgcagacggtaggcgtgcccatggcatgaggcatccccatagctggccagcagggtcaccagcagaaaaagcatgtacaccaggaggctctggtggacgggggggccctgtggtcagcctggccccagcccacagtgacagcagggctttggcaacggctggagccatggctgcggcaggtgtggctgcaggaaggtgagctggcagggggcgccccaagactctacctggccagggtaatggcagcacacaccctgcccggaaccccacctgggggcagacacacaggccactgcagtggtgcttaggggccttcagggccaggcaggagtgggcattggagctgggccctggcagggactggggcagcaagtggggggcgtggggtaggagggagaccgggcaaaggctgcagagcattgaacccctaagggccttctgaggtgaggaaagggggacaggagtgtcctgcgtgcatgggtgggaggtgggagacaagagacggaggtggcaggggcacaggccgcacccaggctcacccgcagcatgccatgtagcctcttgaccttgcgggcttcttccttggccaggaagagtgcaaagccgtggggtggccgtacgcggggcacacgtgcgctcacaggcgtcacagccgggctctctaccagggtgtcatcttcatccgggtgcagccgcttggccaccagtgagaagtacagggcttccagcaagacctggggagggggtggcttcagaggggtcccccgtgatggaggcctgtagcctacccctggcagccccctcaccttcagtggctcccagccgaggaatgaggccaggaagctggcgctgctggacaggagccacgcaacactcacgcccggggggaagctcgcacccacccaccctgagacagccacagccacagccacc

SEQ ID NO: 27661 - DNA, 1243 bp, Artificial sequence
  DNA replication origin
gccaccagtgagaagtacagggcttccagcaagacctggggagggggtggcttcagaggggtcccccgtgatggaggcctgtagcctacccctggcagccccctcaccttcagtggctcccagccgaggaatgaggccaggaagctggcgctgctggacaggagccacgcaacactcacgcccggggggaagctcgcacccacccaccctgagacagccacagccacagccaccaggagcaggctgagcccgtgggccagggaggcacaccaggccggcagcaggcgcttccgcagaccctccaccagtcctggggaagcagagacagacctgtgagaggcagctcacagggaggggctaggggcatcccggggctacgcaagcacacctgtcctggacagcctcgctgcctggggctgttcccagttcaggcctgggctgggtggccccagctcccccagcctctgcagcgccagcgtctctgtcttctccccaggagtgctggacctgagggacatggtaggctgtgaattcatcccggcctccaggaggcagttgcagccaagcccatgttaacctgggcgggcagtttcttgagcctcttgggtcacagggtccccccgacaaaaagccggaagaccctaccccaaacgagagtgggagtggtgctgggagccagggaaccaagagccactccaggcaccgaagtcaggcgtccgcctgcgtccctctcccgcccgcttgctgctgataaacccatcgcccacagcctgaccagctgcccttacagcagtgcacagtctctcagggtgcaatgagccccccttcaaccctgcaaactatgattgggtctcaaccatccaacaagcatctctacaatctagagacgccagtgtgtctgtcccatgcaggtttatggcctaaaattaacttctggacaaggaaacatatgaatgcctttcaaatcccaacagtgtgtagggctccctgaggccagagatctgcttgtgtctccaggagccagtgaccaccgaggctgtgccactgcatcgggccaccatgctgatatgcccggtcccagagctgctagagaagaggtacagaggcagcgaagacacgttgagggggaggacgagaccaactgcgagacgccgagtcccgggctctcaggacgctctcccgtacctgcgccctcgtcagcccatcaccgaaagaacggcctgacccagggtcacactgcact

SEQ ID NO: 27662 - DNA, 1330 bp, Artificial sequence
  DNA replication origin
cgcggagcctgctgtgctatggcggcgccccagggcctggctgccacttctccatccccgaggctttcagcggggccctggccaacctcagtgacgtggtgcagctcatctttctggtggactccaatccctttccctttggctatatcagcaactacaccgtctccaccaaggtggcctcgatggcattccagacacaggccggcgcccagatccccatcgagcggctggcctcagagcgcgccatcaccgtgaaggtgcccaacaactcggactgggctgcccggggccaccgcagctccgccaactccgccaactccgttgtggtccagccccaggcctccgtcggtgctgtggtcaccctggacagcagcaaccctgcggccgggctgcatctgcagctcaactatacgctgctggacggtgcgtgcagcgggtggggcacacgcggccccctggccttgttcttggggggaaggcgtttctcgtagggcttccatgggtgtctctggtgaaatttgctttctgtttcatgggctgctgggggcctggccagagaggagctgggggccacggagaagcaggtgccagctctggtgcagaggctcctatggcctttcaggcccgtggcagagggtgggctcaggagggccatcgtgggtgtcccccgggtggttgagcttcccggcaggcgtgtgacctgcgcgttctgccccaggccactacctgtctgaggaacctgagccctacctggcagtctacctacactcggagccccggcccaatgagcacaactgctcggctagcaggaggatccgcccagagtcactccagggtgctgaccaccggccctacaccttcttcatttccccggggtgagctctgcgggccagcctggcagggcagggcagggcatcatgggtcagcattgcctgggttactggccccatggggacggcaggcagcgaggggactggaccgggtatgggctctgagactgcgacatccaacctggcggagcctgggctcacgtccgctaccccttccctgcccaggagcagagacccagcggggagttaccatctgaacctctccagccacttccgctggtcggcgctgcaggtgtccgtgggcctgtacacgtccctgtgccagtacttcagcgaggaggacatggtgtggcggacagaggggctgctgcccctggaggagacctcgccccgccaggccgtctgcctcacccgccacctcaccgccttcggcgccagcctcttcgtgcccccaagccatgtccgctttgtgtttcctgtgagtgaccctgtgctcctgg

SEQ ID NO: 27663 - DNA, 1649 bp, Artificial sequence
  DNA replication origin
caccgtccagcagcgtatagttgagctgcagatgcagcccggccgcagggttgctgctgtccagggtgaccacagcaccgacggaggcctggggctggaccacaacggagttggcggagttggcggagctgcggtggccccgggcagcccagtccgagttgttgggcaccttcacggtgatggcgcgctctgaggccagccgctcgatggggatctgggcgccggcctgtgtctggaatgccatcgaggccaccttggtggagacggtgtagttgctgatatagccaaagggaaagggattggagtccaccagaaagatgagctgcaccacgtcactgaggttggccagggccccgctgaaagcctcggggatggagaagtggcagccaggccctggggcgccgccatagcacagcaggctccgcgggtccgagcgcttgccctgggccacgatctcctcgcccgccagcgtcaggggctcctcgttgagcacgcgggagcgcatgaggatgcgcatgagggcagaggtcaggttgtaggcctgggacgccaccatccgagatggtgactcggctcccagctctgagggctgtggtgcccgcacgtccgagctggccaggtggatgaggtctcctgcagacatgcgtgaggtcagtgcagagacagggaggtagagggagggtgggggcaggcaaaaagggggagccggagggtgggggctgggagaaagggggaacctgagggggcagagagcgaggtgcaggcagaaggaagggggaagctggagagagagtggtggaggggggagggggaaggtgatggggatgaggacgaagatgagggggatgatggggagagggaggaaaaaggaaggaaaagggtagagaaaagagaagggagaagaagaggagcagggggaaagggaggggaagggggataagggaggggaagggggatgagggggatgaggaagatgaggggaatggacaaaaggacggggaggacggggggggaaatggagaaaaggggagagagatggagaaaagggatggtaatagggaagggggagggggaggagaatgggaattgggggagggggatgaggatgggaattggggggaggggagggggacgaagatgggatggggcaaaggcgacgcggttggggggaggagggaggcagaggaaagggccgcacggggcgggcgggtggcatggggcacgggccgcggcacctgtgatgttgaggatgctgtctccgatggcggtgggcgtcacggtgcccgcggtggtctctgcctgcaggatgagcatcatggcctccagcttgtgcagcgtctgcttcaggcacgagcggcatacgagctccctgctgggcccctgtgtggagccagcagtgtccagccccgctcctggccccactccttgcacacgccctcctctctacacgggtcctcacctggctcccacccccagccctgcagctggagagcccacttgactggacccccacagcctcctcactaagcattttctgtggctctgcatgacccagggcctccacctggggaccacgtgatgcagcccaccgaccacacaaggcacctcttcacatgagagcggaggaggaggggagagaggagagggga

SEQ ID NO: 27664 - DNA, 1049 bp, Artificial sequence
  DNA replication origin
agggaagggggaggggaggggaggggagagtggagggcacagagcagcatcttcttagtccctccccacatctgggcccctctttacaccctgggtcccccgagaggcaccctgcgttcacacaggacagaacggctgaggctactgaagcaggtcagagaccgaggaacgccatggcaggaaggagcccaggctggaggctcagctcctcggccaagctgcccgtctgccctggggggctgaacccagtgccctggcaggcatgcggggcagggtgagcaggtggggccatcctaccatgcactgggccagcgcagcagcgatctgctggatgtcatccacagtgtggaccctcagggacaccagagtctccgtgatgttcttgcgtatctgggctcggtgctgccgctcgtgcttgggctctgccgccacgtccagggcccgctcgtactggggcaggcagggggcacagcaagctgtcagcagcgcaggaggccggcaggaggccagcagatgcccacgactcccggggtgcagttacgtgctagacgctgtgtgatgcgggcactgacccacaacactgagctgtttcttcatgggcaaaacagggtaagcacatgggccctcctgggcgggggctgcattgtggaaagcagacgccggagagggcccggtgggtgtggctgctgggagcggaaggtcggggtgctgcttcagggtcactgggatttatctctggggcccgggatgagccctctgcaaagctccaggcaggggtacaggtcttggtcccaagcacgcatgcagcagatgtgacgtcccctcccaggctgcactcacctcgttcagcacggtgaccagggccaacgagtactcgatgacgtgctggggatcggcctgccgcagcagccctgggagcacactagcggtgagcccgtgcagccagactgtgagccccgttgcgctgccgttgggctctgggagggtgatggccaaagacctacgagcagaggggggtggtgagcaggtggcagtctcgggggcgccct

SEQ ID NO: 27665 - DNA, 2477 bp, Artificial sequence
  DNA replication origin
ccccgttgcgctgccgttgggctctgggagggtgatggccaaagacctacgagcagaggggggtggtgagcaggtggcagtctcgggggcgccctcccacggcctggctcacctgttgagggcgaccacagcggctcccagctggtcctgcaccaccacggccaggcccacctcgaagtgtggcctgaaacccgggggcagcacggctccgtagctggagaggctgcccttgtagacacagaactcctcgcagtggccctggcgacagcgccgcagcagcagggcgtacaccagcggggcgccagcatcctccgcgtcatgccagcctgagggacggtccccacggcatcacgggagggctccgtgacgtcacagagtcgggggatcccgctgctccccccacgcaggcctgcactcacccgtgcattcgaagtgcaccttggtggtgagggcgtgcacagcgcccagtgggaagaggcggcaagagccccccagcggcgggcggttgggggacaggcggatggaggcgcagccctcctcctcgccagagcggcccagcaccgtgagcgtgaaggtgtatccctcgccgtcccgcagcacgccccgccgcagcaccagtcgcatgcctgcactgcccgtggatgtggtggtctcatccagcaccagcgtcttgttgctgaacgtacgtgcagcccaccgctgcaggcagaaggggtggtgagggggcgcaaccctctgccctgtcagccccacttctgcctgcaggccccgtcccctcggccatgggacccatccccagcccgcccacaccccgctcaacactcacccctcgcttggagccgctgctgcaattgaggcagcggccctccaagtacacgtaggagctgcggctcacttcgtacacggcctgtgccttgcaggacacacactccaaggacacaatgggcacccggccactccggatcagcacctggcgtgggagtggggttacctccaacacaggtctatttggcctgctggaaggactgggggacccatggaggatgctgctcccaaactccaggtttcccaggggcctggccactgccggtgagctcactccctcccaggatactcatccggtttgccaccttccaacttggacggcggaagggcatacacagggcagaggacactggagtgtgcgttctggtgtactggacccagctggaccctagcaggaggcaggcaatgctcactgagggcccctggggggatgcgtgtgagaagagacgtatgtgtgggtgtgaggaccgcagctgccacgtaggcctgactcacagactcctgcagcccttagccagggcctgggtcaggaggctgagctgggatggaacctgctcccacaccctcccctcagacgacccctctgggaagacccccaatcaggccagctgaggaaagcagggactggggaacagacgcccactctggggcaccagcaggccccgcctgacagcagcaggagcagccaccacgggctcagggtcaccaagcctcctggccggtccagagaggggagcgtgagggtgagaaccggcccaccacatccagcaacagggacatgggctggggacagtggctacctctggggtgggaaggggctcttcctcactgttggtattgctaggggactgtgtagcttttgccactagagcatatgtggcttgaagactgtacgtggaactgtggcaggtttggaaggaagcaaagctgaagcaggctgtcgtgttacatagaatttgcatcagaaacagagaggggagagcgtgcggcctccaccagcactaaaacacggaaaacagtagatgaccagggaggctgggctgtccaaggcaagtggccgaggggcgggcggcacccaccgtctggttggtggcctcctccttgcggccggccttccacacggtcaggctgaaggtgtactccacgccagccgccagccgctcccgtggaatggtgaccgtgctgctcccgcggggcccaaagttcagcgcacacccgccagcctccctctgcaggccgagaacaaggggcgacgtggcctgagagccccatccagttttaaagcagagcccggcccaggagacagcgcgggagaccccctccccatgctgggacggggcccaccaggcactgaggacgggccagccctggtggcaagctgggtgttctctgggctcatgggtgtggacgggtgaggggcatggaggacggccctgccacgcactgacctgtgtcgaagccacacaggcccagtggaaactgagcggcgtctggtcgccgtcctccaggttggggtcgtaggactcgctcccatccagcaccaggtcccgtgtgtctgaccacacgcggtatgagccaccctcaatgatgggcaccaggcgctcgggggccaccgtcacattggcctggatgctctgtgtcagtggcgtgtc

SEQ ID NO: 27666 - DNA, 2284 bp, Artificial sequence
  DNA replication origin
ggtggccggccggcccgtcaccttctacccgcacccgctgccctcgcctgggggtgttctttacacgtgggacttcggggacggctcccctgtcctgacccagagccagccggctgccaaccacacctatgcctcgaggggcacctaccacgtgcgcctggaggtcaacaacacggtgagcggtgcggcggcccaggcggatgtgcgcgtctttgaggagctccgcggactcagcgtggacatgagcctggccgtggagcagggcgcccccgtggtggtcagcgccgcggtgcagacgggcgacaacatcacgtggaccttcgacatgggggacggcaccgtgctgtcgggcccggaggcaacagtggagcatgtgtacctgcgggcacagaactgcacagtgaccgtgggtgcggccagccccgccggccacctggcccggagcctgcacgtgctggtcttcgtcctggaggtgctgcgcgttgaacccgccgcctgcatccccacgcagcctgacgcgcggctcacggcctacgtcaccgggaacccggcccactacctcttcgactggaccttcggggatggctcctccaacacgaccgtgcgggggtgcccgacggtgacacacaacttcacgcggagcggcacgttccccctggcgctggtgctgtccagccgcgtgaacagggcgcattacttcaccagcatctgcgtggagccagaggtgggcaacgtcaccctgcagccagagaggcagtttgtgcagctcggggacgaggcctggctggtggcatgtgcctggcccccgttcccctaccgctacacctgggactttggcaccgaggaagccgcccccacccgtgccaggggccctgaggtgacgttcatctaccgagacccaggctcctatcttgtgacagtcaccgcgtccaacaacatctctgctgccaatgactcagccctggtggaggtgcaggagcccgtgctggtcaccagcatcaaggtcaatggctcccttgggctggagctgcagcagccgtacctgttctctgctgtgggccgtgggcgccccgccagctacctgtgggatctgggggacggtgggtggctcgagggtccggaggtcacccacgcttacaacagcacaggtgacttcaccgttagggtggccggctggaatgaggtgagccgcagcgaggcctggctcaatgtgacggtgaagcggcgcgtgcgggggctcgtcgtcaatgcaagccgcacggtggtgcccctgaatgggagcgtgagcttcagcacgtcgctggaggccggcagtgatgtgcgctattcctgggtgctctgtgaccgctgcacgcccatccctgggggtcctaccatctcttacaccttccgctccgtgggcaccttcaatatcatcgtcacggctgagaacgaggtgggctccgcccaggacagcatcttcgtctatgtcctgcagctcatagaggggctgcaggtggtgggcggtggccgctacttccccaccaaccacacggtacagctgcaggccgtggttagggatggcaccaacgtctcctacagctggactgcctggagggacaggggcccggccctggccggcagcggcaaaggcttctcgctcaccgtgctcgaggccggcacctaccatgtgcagctgcgggccaccaacatgctgggcagcgcctgggccgactgcaccatggacttcgtggagcctgtggggtggctgatggtggccgcctccccgaacccagctgccgtcaacacaagcgtcaccctcagtgccgagctggctggtggcagtggtgtcgtatacacttggtccttggaggaggggctgagctgggagacctccgagccatttaccacccatagcttccccacacccggcctgcacttggtcaccatgacggcagggaacccgctgggctcagccaacgccaccgtggaagtggatgtgcaggtgcctgtgagtggcctcagcatcagggccagcgagcccggaggcagcttcgtggcggccgggtcctctgtgcccttttgggggcagctggccacgggcaccaatgtgagctggtgctgggctgtgcccggcggcagcagcaagcgtggccctcatgtcaccatggtcttcccggatgctggcaccttctccatccggctcaatgcctccaacgcagtcagctgggtctcagccacgtacaacctcacggcggaggagcccatcgtgggcctggtgctgtgggccagcagcaaggtggtg

SEQ ID NO: 27667 - DNA, 2326 bp, Artificial sequence
  DNA replication origin
tgcgggtagaaggtgacgggccggccggccaccaggacgccgtcactcacacccacagccacggagggcagggaggcgcgcacgctcacaggcacctgctgcgtcaggttctcgaaggcattagatgccagcacggtcaggaggtactcacctgtggggacaggcccgagtggggcagccgcggcacccccacctgctccccacccgctcggcagaagccccccgcctgaggagcccggggtgaacggctgcacctgcggcccagccttaagggtcccaggctcccaagccacgtgcgggacggagcacaggtgtagcagcactgagggctgcctggcgaggacggcaccgcctccaagtgcagctgcactcggggcagcagagcagcaagagccaggcccggggagggcggggggcgcagttcaggggcccagcttccctgtccactccccccacgcctggcccctccctcaccccagtaggggcctaagccatcagcccaggtgaggtcacagtgagggctgttggggaggaaggggggcagcttgactggggagctggggggaccccgtgctcagagcctgaaaggcagtggccccctcaccccctcatccctcacctggggcagcgtaggtgtgcatgacattgtgctccaccagcacctgggccaccgaggggtctggaaccgggaaggactcgttgtacggaggctggaactggtggagggcctgctccccatccccaaaggtccacctgccggggcggtgggacgcagtgagtgaaccgggacaggggtgggcggtggcggggcagggggtgcttgggacccagccgaggctccactctgcagtcacgccccgggcctccattcagggcccacccggctgtgctgaggcctctcccggctcccgtgcagcctcagggctcctgtgcacccagttacctcccaacagacagggaaaccgaggctcagaaaagcaaccccgtgatgtgggggtccctcggctgaggctggggctgggacaagagcctggtgcccaccccaaaccggcccccgagtcactcacaggaaggccacctccacggccgagtccaccagcacgcccgccgtcagtgctagcgtggcattgggggacagcacggccggcactgtggagacctgcagaccctgcatcctgttcatccgctccacggttacgttgtagttcacggtgacgttgctcacgtggttggaggccgtcagctgcagggacaggcgtcagtgagcccaggtggcaggtgagaggcctggccctgattggcgtccctccctccactcacccacagccatggcagcgtcctcgggcagcatgaagcagagcagaaggcagaggtgaaggtggagcccgcccccgccctgccccgccccatcccctcccctccccacccccgcccacctactgagagcttgaagaccgccgcgctctgataaatgacattgaagaccacgttctggaaggtcagggactgcttgtcgttgatggtccaccggaagaccatgtccgagccggcctccaccacggggctgtacctctgcggggggaatggtgtcagcctgggctctgtggaggactctgcccttagcctgtcgcctcctggacacacctcccgtcgggctggagagtcccacgcggggcacagaggagaggaggtgcccggggctctgcatgccatgggagccaagcccgggctgggacactcactgtccggctctccagccagccatgtagtactactaatgcctcaacctctctgtgcctcagtttccccatctgtaaagcaaacctagtaccagctacaaagagtccacctctctctgagtcttctcagaccctcccggcgctcttgccccagctcctcacccagagagctcggagcagtgaggggaggcacctacactggcttacagaacccaggacaggctgcacaggtcacgccatttctgatggcccctcccaaggcccctggtgaagaggcaggtacccgcaagatggagacagccctgtcccccatgtacccagcatggtggcaccgcgggcagcccgcagtttcccatcaggggttcagactccacctcaaaagccactcgctttagccaggcgagaacacagcagagggcgtgagagactcacgggggctcgtgtgaggtcagggagcagagttttaaattcattttgtgaaatgagacagtggaatgagttagcggagccactgtcagagccgtgactttccaggaatttaaagcccaccaggtagcccgaggagccagccagcaggacctgcccgg

SEQ ID NO: 27668 - DNA, 2498 bp, Artificial sequence
  DNA replication origin
cagctctgcagatgcagaggtggacatgagctgggggcagcctccggacactcctgggcacgccatacgggaggtggcctgcacggggatccctgccggtacccacaggccccgtgggtgggtgctgctgtgagcctgggctggtgggccctggtctccgggctctgagcctcagtttccccatctggaaagggggacagtgatggggctcccagcgggctgctgtgagggtgggaggatggaggagtgccctgagccccctgccatcccacacccgcccccaggagcctagacgtgtggatcggcttctcgactgtgcagggggtggaggtgggcccagcgccgcagggcgaggccttcagcctggagagctgccagaactggctgcccggggagccacacccagccacagccgagcactgcgtccggctcgggcccaccgggtggtgtaacaccgacctgtgctcagcgccgcacagctacgtctgcgagctgcagcccggaggtgtgcggggggccaggcaggggcctgagacgctggctgtggttaggggcctgccgagcgcccgcggtggagcctgggctgaggaggaggggctggtgggggggttttcgggcggctcggtccccagtctgttcgtcctggtgtcctgggccctggcccggcgcctcactgtgcactcgccaccccaggcccagtgcaggatgccgagaacctcctcgtgggagcgcccagtggggacctgcagggacccctgacgcctctggcacagcaggacggcctctcagccccgcacgagcccgtggaggtagtcggccccccacgttctacaacctgccctcctgcctgcccctggaggccttgcctgccctgcccactgtgggtctcgccaaaaaacttgggggccttaatgttgcttgtgcccagtgaagatggttgggaaaatccagagtgcagagaggaaagcgtttactcacattacctccaggccttttctctgagcgtgtgtgagttattcctgaaaggcaggtcaggggtcctgccccccatggacagtttccaccggagtcttcctctcgagcgacaggagccaggcctgtgggggtctgatggctcgctctccttccctcccctcttcctgggaagttcgggtagggggagtctgggcttcaggctgggatggggtctgtggagctgaggcggccccctgcccaccaggtcatggtattcccgggcctgcgtctgagccgtgaagccttcctcaccacggccgaatttgggacccaggagctccggcggcccgcccagctgcggctgcaggtgtaccggctcctcagcacagcaggtgggactctgggtggtgggtggtgggtggtgggcgccgcaggactcggggtggcctctctgagctttcacgtctgctggtcctgtggccaccagagtggttcccagtcttaggtggacagagcaggggttccagagacaccagctcattccaggtgtcctgggggtggattgggtggggcctgcctgggggccggcctgggtcagtcggctggccggagacggacgcagcactgggctgggagtgctgcccaggtggggagacctgtcctcacagcaaggccaggattgctggtgcaggcagttgggcatctctgacggtggcctgtgggcaaatcagggccccaacaccctcccctcctcacagggaccccggagaacggcagcgagcctgagagcaggtccccggacaacaggacccagctggcccccgcgtgcatgccagggggacgctggtgccctggagccaacatctgcttgccgctggacgcctcctgccacccccaggcctgcgccaatggctgcacgtcagggccagggctacccggggccccctatgcgctatggagagagttcctcttctccgttcccgcggggccccccgcgcagtactcggtgtgtggccctgacctgggtctgttccctgcatctcctcaggccaccttcctgtctgctgcccagggtctgggtctgtgcaccagacacacccagcctgcaggcccctcccacgtccttgccacctctgacctccgacctctgcagtgccctcggccctctcccagtgggagaagctctcgcctgggcccttggcacgagctgtgcctcctcttcctctctcccagcacagctgctccttcctgtctgccaggtcttggcctgtgtcctctccccgtgtgtcccccggtctgcaactgtcctgcctgtccttgtcacgagcactgtggggaggctccttgaggtgtggctgacgaagcggggagccctgcgtgtccaccctcatccgtcgtgcgggggtccacgggccatgaccgtgaggacgtgatgcagccctgcctccctctccacaggtcaccctccacggccaggatgtcctcatgctccctggtgacctcgttggcttgcagcacgacgctggccctggcgccctcctgca

SEQ ID NO: 27669 - DNA, 1675 bp, Artificial sequence
  DNA replication origin
ctgtgtgggggctgtggacagggttgggagaccttggctctgtgggggactgtggacaggggatggggggccttggccctgcgtgggatgggttgggggtccgtgcccttcctggccctgggtggacaggtccatgtggcactcggcatagggctgagatgggtgcagagggctgaggcccccaggcctctcctggcttggtttccccagatgagtgttcatttgggtcttccatcagaaagtcccctcctgacctctgggagtggggagctcaagggtgggaggccatagcttggggatgctggcaatgtgtgggatgggcccagggatggcctctggcctactaggggctctggccctgacccacggccactcactcctcagagacgtctcccacaacctgctccgggcgctggacgttgggctcctggcgaacctctcggcgctggcagagctgtgagtgtcccccagtcgtgccagcatgcggggctcactccgggtgggctggcggcaccgcctcttgctgctcagctgtgggggcttccatcagctttgccgaatcccccgtctcttccagggatataagcaacaacaagatttctacgttagaagaaggaatatttgctaatttatttaatttaagtgaaatgtaagttgtggttctttgggtggggtcctggctggaccccaggcccccaatatcccttctgccctcccagttggtccgtgtccccttccaggcttgagaccagatcctgggggcagttcactgcctgcttggagccccccagtgccggcttggttggggcaggggaggcggtgctgtcagggtggctccagggcctggttgccagtggggggctggcatagacccttcccaccagacctggtccccaacacctgcccctgccctgcagaaacctgagtgggaacccgtttgagtgtgactgtggcctggcgtggctgccgcgatgggcggaggagcagcaggtgcgggtggtgcagcccgaggcagccacgtgtgctgggcctggctccctggctggccagcctctgcttggcatccccttgctggacagtggctgtggtgagtgccggtgggtggggccagctctgtccttcccagccaggtgggacctgggccctgcagacactgggcagggctcaggaaggcctctctggggggggcctccgggccaagggaacagcatgggagcctgtgagtgcggcgggcggatgtgggggcgtggggtggagccaggaggagcagaacccggggtccagtggctgcctcttctaggtgaggagtatgtcgcctgcctccctgacaacagctcaggcaccgtggcagcagtgtccttttcagctgcccacgaaggcctgcttcagccagaggcctgcagcgccttctgcttctccaccggccagggcctcgcagccctctcggagcagggctggtgcctgtgtggggcggcccagccctccagtgcctcctttgcctgcctgtccctctgctccggccccccgccacctcctgcccccacctgtaggggccccaccctcctccagcacgtcttccctgcctccccaggggccaccctggtggggccccacggacctctggcctctggccagctagcagccttccacatcgctgccccgctccctgtcactg

SEQ ID NO: 27670 - DNA, 911 bp, Artificial sequence
  DNA replication origin
tatgtatgtatttatttatttttgaggtagagtctcgccgtttcacccaggctggagtacagtgatgcgatctcagctccctgtagccttgacctctctgggctcaagtgatttttctctcctctacctcccgagtacttgggaccccaggcgcatgccgccatgcctggctaatgtgtattttttgtagatacggggtctcactgtgttgcccagggtggtttcaaaatcctgggcccaggcgatccttccgtctcagctcccacggtgctgtgttaccggcgtgtgccccagtgcctggccgtcttggaggtcttgtttctctgggtttatgcctcgaggtggcgcctgctcccctgtgctccctggtagcctggtagtgagcctgcttctcacacagtcatacctggttgtggtcccacagtgggaccaccctgttgggttcagaacaggagatgggggcccctcgagtctgtgtgggggctgtggacagggttgggagaccttggctctgtgggggactgtggacaggggatggggggccttggccctgcgtgggatgggttgggggtccgtgcccttcctggccctgggtggacaggtccatgtggcactcggcatagggctgagatgggtgcagagggctgaggcccccaggcctctcctggcttggtttccccagatgagtgttcatttgggtcttccatcagaaagtcccctcctgacctctgggagtggggagctcaagggtgggaggccatagcttggggatgctggcaatgtgtgggatgggcccagggatggcctctggcctactaggggctctggccctgacccacggccactcactcctcagagacgtctcccacaacctgctccgggcgctggacgttgggctcctggcgaacctc

SEQ ID NO: 27671 - DNA, 1895 bp, Artificial sequence
  DNA replication origin
gcgggcgggcctggggacggcggggccatgcgcgcgctgccctaacgatgccgcccgccgcgcccgcccgcctggcgctggccctgggcctgggcctgtggctcggggcgctggcggggggccccgggcgcggctgcgggccctgcgagcccccctgcctctgcggcccagcgcccggcgccgcctgccgcgtcaactgctcgggccgcgggctgcggacgctcggtcccgcgctgcgcatccccgcggacgccacagcgctgtgagtagcgggcccagcggcacccgggagaggccgcgggacgggcgggcgtgggcgcgttccctggcccgggacgggaagcaggacgcgggccaggacgctcccagggcgaggctccggcgcggcacggcggccctgctaaataaggaacgcctggagccgcggttggcacggccccggggagccgaaaaaccccgggtctggagacagacgtcccacccgggggctctgcagacgccagcgggggcggggcgcggaggccgcgctcagctgggaggacaaacagtcgctaattggagaggaattgggatgcggcctggggctgcggggtacccggagaggtggggatggctgtagggggcggcagggaagagttccaggaggtgtctggaaaaggatttgatggatgtgcaagaattgggctgatgcttaggaaggggcgatgaggtgggtccagaagaaggggggtgaacggtgtgagcaaagaccgtgaggctggaggctggccacgggaggtgtgaggggtaggggcagggtgggaggtgggctcgcgggtgggctggggtcatgaagggcctcaggcgctctgctattgggttccaaggctatcctgagaacaggggtgaggggggattgccgtggggggttaaagccttgtcatgttcgctttcgggagataaaaacaacaggtggcctttatggagacgctgcccagagccaggtctgtgccaggctcctgttgggggtcgtcatgcggaatcctgactctgaccatccgaggcatagggaccgtggagatttgcatttcacagatgaggaaacaggtttggagaggtgacacgacctgtcccaggcatcacagccgggatgtgcatagcaggggtttggaactatgaggtgcccaggacccagggttggattgaaaagggcggaggggactaagataagcagacagttgtccccagcgctggggagagtcttgggaccagtctgatgccttgtatttcccaggctccaggctcctcgccgggacagtgtctccttgggtgcgtgctggatccctgggggacgtggcacatccccaggcttgctaaacattgggtgggttctggcatttggttttgtaacgtttctgggtcactcccgcctgtggccacccttccttaggggagccgtgtgtccttggggctttgctgggtggtctcgagggtgggagaagaatgggttctcctggaccaatggagcccgtgcccctcggggccacattgctcctgcgctccctgactgcggacgcgtgtgtctcgcggctgtctctgtggagatggcctcctcctgcctggcaacagcacccacagaattgcatcagacctaccccacccgttgtttgtgatgctgtagctgagggctcctctgtctgccaggccggtcactggggactctgtccagggcctggtggttcctgcttcccagcacctgatggtgtccatgagagcagcccctcaggagctgtccgggagagaagggcgctggtggctgctgagcggagagcaaggcccgtgttctccaggcccttggcacagcagtggagcccccgcccctgccttgtgttgtcctcttaggctctggtcctggg

SEQ ID NO: 27672 - DNA, 1926 bp, Artificial sequence
  DNA replication origin
gcccgcagccgcgcccggggccccccgccagcgccccgagccacaggcccaggcccagggccagcgccaggcgggcgggcgcggcgggcggcatcgttagggcagcgcgcgcatggccccgccgtccccaggcccgcccgcgcgcggaggccgcagctcaggcggggcccgcggacggcatggcgggcgcggggctggatggggctgcggccgcgacctgctgctgagcgacgcccgctcggggctcggggccaggccgctccgggagctcggccgcccgctcggacgctggcgctgcagtgcgggccccgccgcggctcctcctcctcctccccgcgcggcgcggggcggacggggcgagggggggcggggcgggtgcaggctccgcccccttcgccacagcgcgaccgggccagcgatgagggactggcatccggaggcttcaccctccgctccacagggtcggcagcagggcggggcctccggaagctccgccccacgcgttcccggggcgcatgcgacgtggggcggagcgtctggaagctccgcccgtcgcactgcagagtcggccgaggcgcacgagctatttttcacgctccgccccgctgcaggctaaagtgcgtgggcgggaagcggtgggcagggtgccatctggctccgcccttctcctgtggtgtgggccaggcggcgggttcctcctcctgcagcagccacaggctccaccctgatccttcttccgcggtgtggatccttctcccgcaatctccgtgcgcggcccgagtcagtacccgcagcctcccgacgcacccgctggctccaagcctccctaccccaggtttcctggctgagagagagacagagggagagagggggaagagagagaacaggcaatgggaggttgatggtgagagcttattgaaagacaagagggaggaaacccacatccttcattccccatccattcatttattgccttatttattccattgaatcttcacagctctagaaaaagtgtgctacaattattccctttattaaatgaggtcactgaggcacagacagtttaagaaatttgccagcagggcacagtggctcactccggtaatcccagaactttgagagggggaggaaggtggatcccttgagtccaggagttggagaccagcctggccaacatggcgagaccccgtttctacaaaaattagccaaaattagccaaactggctcacgcttgtagtcccaggtactcgagaggctgaggccggaggagcgtgtgagcccagtaggcagtggctgcgctgagccgtgattgtgccactgcactcccgcctgggcaaaagagtaagatcctgtctcgaaaaaaaaaaaaatggaaaaaagaaaaaaagaactggctgggagtggtggctcatgcctgtaatcccagcactttgggaggccgaggcgggcagatcacaagatcagaagttcgagaccagcctagccaacatggtgaaacctcatctctactaaaaatacaaaaatcagctgggcatggtggcaggcacctataatcccagctactagggagcctgaggcaatagaatcgcttgaacctgggaggcagaggttgtgccactgcactccagcctgggcaacagagcaagactccgtctcaaaaaaaaaaaaagaaatttaccaggtcacacagcaggtggatggtaaggctgcgattgtattccaaacccagcttttaattgcagtcaaatgacagacttaagattcaaggactccagtggagggaagaaacagccacaagaaactgctgccaaatgagcaaaacagattaaccaagtctcaatgattgtttgaaggcggttgtggaataaaatgcaattgtttagaaaggatttcttaaatagaaaagacatatgtttaaagaagcaa

SEQ ID NO: 27673 - DNA, 1534 bp, Artificial sequence
  DNA replication origin
ccccctcatttcatggagaggggagcaggcccagacagggaatgccacgtgcccaggggcacatagcaagccggggaccccgcggagggcacagaccgctgagctccagaggagggtcttgggaggtgccctgggggcacaggccgtggcggctttgccactccctggcttgctaagagccccttgaagtccaacccagctctctgctgctcagccacagagctctcgctcgagtgcctggcgggaacaggagtaggcaggacagggccctgtcctcaggaggctcccaggctgctacagcggccatgcagccgctggggaagggctggagagcatccagggagccagaagtggggcaggaggagccagggcaggctcccttgagggtggggctccaggcagagtctggaagcctgaggaggcctcactcgtgcctgcgccccctctcctggcacacaagggccagcccgagggccccactctgggggcagagtgtagggaagaggctggaaaatgggggccagaaagagactgtcctgatccatggctcccaggggtcgttttggctgggggctcacagcacacatccttccagacacccaggacggtcagaaggaactggcaggagttagagggcacggtgtaaggatgccagggggccgggccgtcagaaggtaacaggagcgaaagtcccagagcaaggccccaaggagacccagggcgctctctccgctcgaggacaggaacccgtggagaccttcccctccctggaagagccagctctgcaccagaagggtggggggctgtagcacccctcccaggggaacacggacctcactctccgcccccagctcccagggcccatctcaaactcggaccctgtctcagggacctgccctggcccacaggactcctctcttctccaggtctgaagatgccaagaatccggacatcccaaggcctccctgctgaactttcccaccatgccggcccccgccttgccctcgccggcccccgccttgccctcgccggcccccgccttgccctcgctggctgcctgttctagtttttctagttttatttgttgttgttgttgttgttttttgagatggagtcttgttccgtcgcccaggctggagtgtggtggtgcgatctccgctcactgcaagttccacctcccgggttcacgccattctgctgccgcagcctcccgagtagctgggactacaggcgcccgccaccacacccggctaattttttgtatttttagtagagacagggtttcactgtgttagccaggatggtcttgatctcctgacctcgtggtctgcctgcctcggcctcccaaagtgctgctgggattacaggcgtgagccaccgcgcccggccttttttttttttttttttgtggagaccaagtttcgctcttgtcgcccaggctggagtacgatggcgcgatctcggctcaccacaacctccgcctcctgggttcaagcgattctcctgcctcagcctcctgagtagctgggactac

SEQ ID NO: 27674 - DNA, 1285 bp, Artificial sequence
  DNA replication origin
cgggcttgcgctggcaacctttaaaattaggagagtttacataaaaatccaagtctctggtttctcttgaaaatggggagctctgggtgcctgcatcacagacccctctcttggcttccagcaggcctcggaatctttgatcattatgtctcttggttgctgtgtttgccatctgtttcaccctctggagtgtaagctctccgggcacaggaagcagcttgtcttggtcaactgctgtccccagcagccagctctgggcctccataagcagttattaaattggtgaaagaggtgtggtggctcacgcctgtaatcccagcactttgggaggctgagcaggcagatcacttgaggccaggagtttgagaccagcctggccaacatggtgaaaccccgtctctactaaaaatacaaaaattagctgggcctggtggcatacgcctgtaatcccagctactcgggaggctgaggcaggagaatcgcttgaccccaggaggaggaggttgcagtgagctgagattgtgctgttgcattccagcctgggtgacagagcgagactctggggaaaaaaaaaagaaagaaaagaaaagagaaagaaatgtgacttagaaacacaggcctcacttcaggaggacatgtccttgctaacaaagatttaaggcaagtgtgatcagtagtgagggcaaggcttctgggggagggagggtttgcactgggctttgaggattgagctagagtccgacacgagagagaaagacagtccccaggtggagggagtcaatatgcataggctgagagtgctaggagatgggcactttgtgccgaggtggccaaagtgtggcccagttccttggaggaaacgggaggtaatcaagctggtaaggtaggatggggtcagctgggaagggaaacctgagtgttattcctaggagcttggaaattgtacagcgggaagtagagagctgtgcgtggcttttgagcagaacaacagaggacgctgtgctacaggaatattggggactggcaggaggggatggatggtggagcctgtaggcctggagatgagattgatgggggttgcagtcacccaggggagggataataggaacagagaggaccttcaggaaagaagctgtaggcctggaggcagggaggggagggtcagagtccatgcccatgggcagagaccagtgggatgctgcagtgggttaaagatggattaaaccccagcactttgggaggccggggcgggcggatcacctgagatcgggagttcgagaccagc

SEQ ID NO: 27675 - DNA, 930 bp, Artificial sequence
  DNA replication origin
aaggtgggtactgccctcagtgtccagatggggaaaccgaggcccagaaaggcaaggagcctgtgcaaggtcagcaggctaggaagggcagagctaggatttgttcctgtgatctccagctccagagaacataaaccgtcccatggcagaaatccctgtagacttaatccccaggaacctggcagagctgggggtcaaacccggaagccctctcagaacccttccttgtctcactcctctggccccccagctcttccagaccaacccccagtgtgtgtgcactgggcctgggtagaggcatttagcttctgcagctgcagccctggggactccaggtgtccacccgcgctacaaggcctctttcaggatggctggcccagggtctgagctgggggcctcagcagctgctgtgcactggccccagggtcctgggcagtggactcccagtccagtggaccccgtcctgccagctgctgctcaggtacccccagggcgcgggcagcaggaggagttgggtgcaagtagggcatcctgcagggggaggagtgcggatggggcccccaggaagagaaggaggcaggcgcgctggagaaagtgggaggccaggcggggaggggagccttgagagagcagaggaaacgggcttgcgctggcaacctttaaaattaggagagtttacataaaaatccaagtctctggtttctcttgaaaatggggagctctgggtgcctgcatcacagacccctctcttggcttccagcaggcctcggaatctttgatcattatgtctcttggttgctgtgtttgccatctgtttcaccctctggagtgtaagctctccgggcacaggaagcagcttgtcttggtcaactgctgtccccagcagccagctctgggcctccataagcagttattaaattggtgaaagag

SEQ ID NO: 27676 - DNA, 1873 bp, Artificial sequence
  DNA replication origin
gtcgacaccgccgccaagcgagggccggccgggctgcaagggcccgttgggcggcgcgtcggggccggaaagcgcagtcccggagcgcgccggtcgggccccgttggcggtgggcagcgtggaggcagcgggggtgctggcccctttgctcttgggggtcttcttcctggacatggcgggcgggcgctcagtgtgctcccgctgcagccgccgtgccctgggccgtcccgcaccccgcgcccgccgagcccgacccggacccgaacccttcccctggcggcggcggcggcggcggcggcggcggcggcatcatcccgggcgcccggctcgcgccccgcccccgccgctccacgggcgcgcagccactcaggcccggcctcccgccgccgccgccaatgccgtgcgtggggcggggacatgcaaatacacccccgctcggcggggggtggggggcggtcaggaggtccgggccccgtcccgcccccgatcacgacccctgcccgtggctgccttggggccaggagccagctgtggggtgacaggcctgggccaggagtcaccccgggatcctgaatcccctctgctggctgcacaccaccccagctcggtgacccccaaactggaccgccagacctgggaggaaggggtgtcctgagatgtgggtgctggggcagagggcccgcatggacgggcaccgcgggcttctgtctccttagccccagatgcctagcgcttggcccggtgcccttcactgctccatcccctccagggtaggcgggtccaggaagctccagccctggcttggcaaacacaccaggctgctggggcaggcgccctgggctcaggtgacagctggtcaccgggaggacacagcgggcgctgcgatctcccccacagcttctgcctgctgtgcacgcctggggatctgcgggaaggaggaagtcgctgtggcagccagcccccggccccctgagggtcccctcccacgggactctgccctcagggtctgaaaggtggaaagcagaggcccctgcccaggctgtgtggctggccccttgtccttctcctccaggttcggaccttcaggtggccagggccgattctccaaatcctaagctggtccctggcagacccacctccccaacctgggctgcactggagctctgtcaccccctctcacagagaagatgggactgcagtggtcagagctggggcacagtggtccagaggggtggtgtccttggcatgcaggggcttcttggtgtttctttgggagctggagagatgacccagctgtccccggagacctgacagctgtcaccaggaccttgggcccttcagagacctgagccctcccagctggcagtgcccagagtccaaacaattggctgcctctcgggtcagaggcctgagaaaacacagatggggggcactgcccagcagagtgattcctcgagagggcctggcagaggccgtggaagcctgccctacagcaagcactgttgtgtgccaggcacacgacctcttcaaagttatcctgcaaggtgggtactgccctcagtgtccagatggggaaaccgaggcccagaaaggcaaggagcctgtgcaaggtcagcaggctaggaagggcagagctaggatttgttcctgtgatctccagctccagagaacataaaccgtcccatggcagaaatccctgtagacttaatccccaggaacctggcagagctgggggtcaaacccggaagccctctcagaacccttccttgtctcactcctctggccccccagctcttccagaccaacccccagtgtgtgtgcactgggcctgggtagaggcatttagcttctgcagctgcagccctggggactc

SEQ ID NO: 27677 - DNA, 2313 bp, Artificial sequence
  DNA replication origin
gccaatttgacctcacccacacctgcaagtgcaggcctctcccggcagcctctgcactattcctgcttagagcctcttacgctgacttatttgaactcatgaccccaccaggcctcttactgacactgcctcggtttcctcatctgcaaatgggtgcagtaactaacgagctgcaacgcctcagccttcccagtagctctttttgctaatttgaaagactcaggatggcttgaacccagaagttggaggttgcagtccaccatgatcaccactgcactccagccagggcgacagagtgagaccctgcttcaaaagaataaaaaattaaagccactccttgctgggattgtcagggctgggcctgggcctgtctgacccaaggcagtaaccgcagatcccagaactgcctggcagcgtccccagccgggccctcccagttaacgattagacgtaaggcagggagtggtctagccccagtcccatctgttggggtgggggcggggggcttcagccgcagtctgaggccctgggcagctggaacctgtgccacctccttcagcctgagctcctgctgtcagagtgcttctgggtctcccgggaaccaggcagggccatctgctgggctggggaggacaccgccttccctggcaccctgaacgagagtgcgaaccaaatggcctcacctcttaccacctgcccgagagccaagagggaggtggggaagtggggaccagacaggactggcctgcccccctcgggcacttcagtcgtcactccatcccagaggacttgaggggacttggaacccccagactggagggagccccttttcctgtccctggaacagcccttcctccatcctccctctaactggctctaattaaagggtgagaaaaatgcaaatttaagatttgctgaggacaagccggcacctcagcacgaggaattccagctggtgggggtgggggtgggcgctcctcacccaagagcagggtcctctcccctaggcaagccctggaaaccctcgctcaggctctgcagggagcatgtgcttctagggcccagtaaggcctctgtaccgaggcagcactgctggccccaagtggacgtggcccttgacttcctctgacccaccaccctgtaggcaacagtgtccgcctcccccaaggcacaggatatggtccctcggtaatgccagcccctggcatagggcaactaactatgcttgtcgggtgcagccaccagcccaggtgttggaaggtcgaggcaggcagcttctggggtccaggcctcgagcctgttggtaccatggggatcagagagaacttgctgctcgggtaccggcgggactctgatgtggggccaggccagggcctccactcacccggaagtcaatgcctacggtggagatgaaggtccccgccaggaaagcaccatccttgaatcgcaccagcagacaggtcttccccacacccgagtcccccaccagcatgacctaggacaagcaggagggttggggggagtctggtctgccctgagctggcctggtcagaagggggctgcaggtgaggagcaggagtggagggaggcagcccaggcctgcaggctcagcggggccagggaccccgatgggctggacacccagcgtatgcctctgaaaggctggggctgctctgtccttctgcacagtggccgtctcagtcagcggggagtgagggcagccacctgcatcccggaccctccctaacgtccatacccccacacggtggacagcatctgggaggggagcaggtggggtggcagctgggtacctcctaagagacttggggaggcctctgccgggggcttctccacatcccagtagggacatgaccccagcaaggctcgaggaatttgccccattaggatcagatctcgatctgaagagggacctgggccaagtctgaggttggggggaggtgcaagtgggcagcagtcaggccttctccccgaaacctgtgctaccaaacccaaaatggtcctcccagccccctgccaagtccacacagcctctgccttggtctggagtcccagggttccccatccatctggcaaacctcttccccccagcaaaaaaaaaaaaaaaaaaaaaaggcccacagccgctgggttgagggagggcagcatacgggaaatggtgagaccccgggcgggggccagggcactggggcgcgggaccccttgtgccaccatgccgcctggggggtgggggacaggccctgccagctgttggataccccagacctgggatggacagctgtgtgtgcacgatgc

SEQ ID NO: 27678 - DNA, 1340 bp, Artificial sequence
  DNA replication origin
gtgtcctccccagcccagcagatggccctgcctggttcccgggagacccagaagcactctgacagcaggagctcaggctgaaggaggtggcacaggttccagctgcccagggcctcagactgcggctgaagccccccgcccccaccccaacagatgggactggggctagaccactccctgccttacgtctaatcgttaactgggagggcccggctggggacgctgccaggcagttctgggatctgcggttactgccttgggtcagacaggcccaggcccagccctgacaatcccagcaaggagtggctttaattttttattcttttgaagcagggtctcactctgtcgccctggctggagtgcagtggtgatcatggtggactgcaacctccaacttctgggttcaagccatcctgagtctttcaaattagcaaaaagagctactgggaaggctgaggcgttgcagctcgttagttactgcacccatttgcagatgaggaaaccgaggcagtgtcagtaagaggcctggtggggtcatgagttcaaataagtcagcgtaagaggctctaagcaggaatagtgcagaggctgccgggagaggcctgcacttgcaggtgtgggtgaggtcaaattggcttaagggaagcctgcaggggctgggctggacctgggagctgggaggtctcaggggacaggaaggcagtgaagctagtgggaccagaggctgggctgggcccatgccagagctgcctggttctgtctgtttcagaacaaagttctggacgtggatggtgtgaaggtgaagctgcaggtaaggtgactggcagaggacaagttgggggacaggggacaccagggaagggctggacagcctgaccagtgcctgtcgctgcagatgtgggacacagctggtcaggagcggttccgcagtgttacccatgcctactaccgggatgctcatggtgagcccctgggtacctgggctggttggggcgggggtctgagcacctgagggtgcaggtgatggtggatgtcctcactgccctctgtccccagctctgctgctgctctacgatgtcaccaacaaggcctcctttgacaacatccaggtcagtggctttcctggtggggtgaaagggccctgatagggcctgacccatcccaacctccttctggtagatggcatcagggttccaaaggaccccgctgagagaggggagggggaaatgacagccttctgggctggaggtggcccaagtggacctgagtgccattccagctccctcagcaggaggctttgtgtaagggacctgtaaggtgggcttctgtatgtggtacac

SEQ ID NO: 27679 - DNA, 1804 bp, Artificial sequence
  DNA replication origin
gcatttcttttggagacggtctctcagacccagacccgaagctcctcccttatgcagagtccgtgaagcctaacggtgagtgacggatgaacaaagccaatcagacttcgatctgcaacatagagtgattctgaagctgccattcccgccccgcgacgacgaggccgccggaagtcgtagtttcggaagtgcggcgcgtgaggcagccgtccgggcccggagaggcggggaactacacgtcccggcgggcgcagcggcctggcgcttccggctcgcgcgtctagtccctttcccggccggcggccgagggggcatcatgaagcgggctggcggcgctgccgctcccgggcggccgcgggcgggtgagtgtccccgcggcgcgcccgacccggggctcgcgcctcgggaccgcgcggtggggcgggatcgggcgcgtggagatcgaggcgaggcgaggcgaggcgaggggtcgggccggggcggggaggggggggcggggctgagacggtcggggtcggggtcagggtcggggtccgcgtcgctgtccgtccgccagtcagtagtccgtccctcgctccgtcctgttctcgcgcagttctttactcattccttcttcctgcattccccgagactcccgggtgccaggcactgttctgggcgccgggagaccgcggagaacacggtcccagttctcctgtgctcggcgtctgctgcagggttccccaacctccgcaccatcgaccacgcggcccgggtcgctttttgctgcgaggagctgccctgtacattgtaggatgtggaacagcttgcctggctcctggccgctagataccagtaaacaccaccccttcctcaattgcgataacaaatgtctccatgcattggcaaatgcctcctgcggaacaactccccccatcccccatctagacagacagggtggtgggattgacaataggtagttaaaatcatggggagcagcggtatgtgctgtgaaagaaagaaagagggtgctgaaaaagtgagtactggccgggggtaggggcggcgctaccgttagccaaaggcctgttggagaagcagccagtcccaggacatgcaggaggagcattccaagtagaaagagccagatgtacataggcctggggtgagaaggggcctgacgcaccccagcaagcactggcaagtggagaggtgaagtcgatgaggccggaccaggctcacagggtgcatggtggggtggggcgggggggttattatgctggcaaatgacttggggttgaggaagcgctggagaggcggtccgatctaggtccagtaaagagctttctaactgtgtgtggaccacagacttcagagttcactggggaagcaggagagagggaggctaggccatcgtctcctagtccccactggggtcctgctgtcaagatacggttgtcttgagccaggccagagtggtcagctggggttgagtctggagtccaggggcaggggcctgctggagcccaccctgctcttgggggtgaggggctgctggcttgctcaggaatttcatgccgcccagcctgtctgcccacctttctcactacccctcagaccccttcctgggcacacacaggccccctagccctcgccaagtgaggagcctccctcttcctcattccttctctttgggcctctcccttcctagaccccttccctgtgcctctctgttgcgaatatcctgacttcactgttctgggcattcatagttctctgtggaagcctcgggccccgtgtcctgagggggagcagtggtatgggc

SEQ ID NO: 27680 - DNA, 766 bp, Artificial sequence
  DNA replication origin
ctgaccccgcagggtgtccatccaggagatgctgtgacaccgtggtcaaggccacaggcactgggctcagacagagctgggttcaaagtccacttctaccacttcacagctgtgtacctgccctcctggcctcgggcttctcgaaaaacggaatagagccagaaccctgtctggaaggagccgagagaagatggatccgtcaagagtgaaggcaccccagacagcagctcctctgctgagtggaccatggaggctgaggaaggcggagaggccggcccagggacacagccagcaggctgtgccgctgtgaccagagtcacattccttctgcttcgtccacggctgccacacatccaggagccccggcagcgcctgagccagtcccatgccaagccggggagtggctgcatcccagagccaggctgcccaggcctcctggccaggaggctcttcaactgcatcttcctcctttccccaaactgctcattccttgtccaaccagctggccgagagtcacaccaaccacggggtgccaggccccatgcgggagggtggggatgtgtgacggctgaacacgaatctgacccgggaggagctaggagccttgtgggggacacaggcagacagaggggcaggagccccaccaatcgccactcaatctgccaaaggcacttttcggtgggtgccaaagaccctgaacttttccattcacttccagaaatatcgtaacacttggccccagtgggccacggtggaagtcacttca

SEQ ID NO: 27681 - DNA, 1469 bp, Artificial sequence
  DNA replication origin
ctgtggaagcctcgggccccgtgtcctgagggggagcagtggtatgggcagcctggcctaaggaggggaggggctgggagtcagcaccccaacctgacgccccaacctgagggtctctggtgaagtgacttccaccgtggcccactggggccaagtgttacgatatttctggaagtgaatggaaaagttcagggtctttggcacccaccgaaaagtgcctttggcagattgagtggcgattggtggggctcctgcccctctgtctgcctgtgtcccccacaaggctcctagctcctcccgggtcagattcgtgttcagccgtcacacatccccaccctcccgcatggggcctggcaccccgtggttggtgtgactctcggccagctggttggacaaggaatgagcagtttggggaaaggaggaagatgcagttgaagagcctcctggccaggaggcctgggcagcctggctctgggatgcagccactccccggcttggcatgggactggctcaggcgctgccggggctcctggatgtgtggcagccgtggacgaagcagaaggaatgtgactctggtcacagcggcacagcctgctggctgtgtccctgggccggcctctccgccttcctcagcctccatggtccactcagcagaggagctgctgtctggggtgccttcactcttgacggatccatcttctctcggctccttccagacagggttctggctctattccgtttttcgagaagcccgaggccaggagggcaggtacacagctgtgaagtggtagaagtggactttgaacccagctctgtctgagcccagtgcctgtggccttgaccacggtgtcacagcatctcctggatggacaccctgcggggtcagggagggcatgtggggagggccgagagctgttggctgcgtgtgtctcagtccggccttctcagtgggtgggcaccgaggacttcaccaggccctctgtgtggatcatgcggggggaacctgtggagagggacccaccaaccccttagtctttgacagatccgctgctgtccccagccttgctccctggaggaggagggtgcagccaggtggggcaggtgaaaggggaaagcgggcactggaggctggggctggtcacgtgtagacccggacaccctcacccggctggaggaagccggctgcctggaaactcggggtggaggtgacccaaccccagaagcacccaggtgggaagtagggggcagcgacgcagagggccaggactgagggccgtgggacggtgtgggaaaggaggtggcagtgcggtggcacgctggcatgagggcgctgggtgactgagggggtcagtggtctctgccctcacattcctgttgcctcttcgggcccatgtatggccagtgtttatgtcagctccctgctgctgcagggcagaaggaaggagggagcccgggagaccgagccacac

SEQ ID NO: 27682 - DNA, 1513 bp, Artificial sequence
  DNA replication origin
atccgctgctgtccccagccttgctccctggaggaggagggtgcagccaggtggggcaggtgaaaggggaaagcgggcactggaggctggggctggtcacgtgtagacccggacaccctcacccggctggaggaagccggctgcctggaaactcggggtggaggtgacccaaccccagaagcacccaggtgggaagtagggggcagcgacgcagagggccaggactgagggccgtgggacggtgtgggaaaggaggtggcagtgcggtggcacgctggcatgagggcgctgggtgactgagggggtcagtggtctctgccctcacattcctgttgcctcttcgggcccatgtatggccagtgtttatgtcagctccctgctgctgcagggcagaaggaaggagggagcccgggagaccgagccacacaggaagcaaatgagaacacagcgtgggactgggaagcgtgggctcggcgggggggggggggacactgccacccttggctcttgggcaaagctcacgacctgtttctgagagtctgaggcccacttgacttgggtgagagccaggaacgcactccccagcccagagctgtgaagctggggtctcttcctgtgccccaggatactctccccactctggatcccagcagcctcatcctccaggaagccctctggacttcccctcgactgggccaggtccccacacaatagacagccatgagatacaggggaaaaaaggactgagagatgttgccagcccccaaggggtcggaggggcagcaaaaggcatccttactgtgaagttggggtaaagccttggccgagctgtggggaccccctccctggagcagagggagatacggacgctggagaggcttggccagggcaagacaggcctggaggctgagtggatgcagtaggagcagagctgggggaggagttcagaggcctctgcagagctggggctgtgggtgttgggggcagggacaggcaagggggttcgccgtgctaggagggaagcggggccaagccggcctcagaccagggcctgctggggttctgaggggatcctaaggaccaaggctggcagaggccggggcaccccaggagccttcgacgtcacaccctgcctatttgggatggaaaaaacgttctaagggacgtcagggaacagcggcggaagtgcgtgtggctttgctatggcaaccaggcctgtttctatagaatttagcggcctgggcttgggccagggggctgaggcaggggctgggctggggcgggcagtctgtgggtgccctgggcaggctctgtgatgccaggggccacgctcggagctctggccgcagtccagccagccggccacacacagccctgtggcaggcggggcggaggcttctggagccgtcccaggctcctcccagggcagttgcaggcctcacaggcacacccacccatggcttgcgccccacacatgttcaggggacccccacaccccacctgctccgggttg

SEQ ID NO: 27683 - DNA, 1729 bp, Artificial sequence
  DNA replication origin
ggacgtcagggaacagcggcggaagtgcgtgtggctttgctatggcaaccaggcctgtttctatagaatttagcggcctgggcttgggccagggggctgaggcaggggctgggctggggcgggcagtctgtgggtgccctgggcaggctctgtgatgccaggggccacgctcggagctctggccgcagtccagccagccggccacacacagccctgtggcaggcggggcggaggcttctggagccgtcccaggctcctcccagggcagttgcaggcctcacaggcacacccacccatggcttgcgccccacacatgttcaggggacccccacaccccacctgctccgggttgctggaggagctgctttaaggccgggcctggcccgagcagggagctgcatctggaagcccccatctcccccactcagcagggccccccaggctgctgccaagtgggcggggacccctgacccagaccccctccaggtgtgtctccagggaaaggggtgggtgtccgcatcccacatgcccccagggcgatgccccagcagagccctctaagcccagcttgtgggagctagggaggggctcctgagggatttgccgaagaggggctggggtggaggcagcgaggcgctgaggaagacttccacttccttattgcacagtgggtgcccccagggccccggaatccctcctacgtgaatgtggggtggacaaagaccctgggcctgaatcccagattcaggcgaggtcagggaggggctgccctgcgttggccccagctggaggggacggtggggggccaatcctgcccttcccctctgcacggtgctgacccacgcacctcgcccctgaaggtcagcactggccttccccagggtggatgctgcgcttcctcaatgacttttctctttcaaagatcgaatactcctggagcatccagcatgggcagtgtggacgggcaggtggtgtggacgggcaggtggtgtggacaggcaggcggtgtggatgggcgggcggtgtggacgggcgggaggtgtggaccggcgggcggtgtgggtgggcgggaggtgctcgggcaggcggtgtggatgggcgggcggtgtgggtgggcgggcggtgctcgggcaggcgtggtggggacatggaagggaggggtaggggggctgatggggaaagccctttctcagccactagctgcccccatggcttttcccggtttgggaagagtctctcattctatggaacacacccccacttccccagcactgggaactggagggcagagaggccagagaattgaaggggaattctcactccggttgacaacttcctgcccggccaccccccagcctcgatgactgtggggtggggaaagaggcactctccctctggggggccagggcatgcccccagaaaagcctcccagccatcaggggatgctgagctattgtgctttccagttgtggcccaaggggtcctctccctactggggaaacttactgcaaaacccagtccctggggactgggctgaggggaggcctcgggcatcttgctcaattccgaggtgcggggatggatcctgccttagggcgggacacaaacgttccctggcctccagccccagggtcccgcccgcctccatgtccctggctggggctgaacactgaacccgagtgaactgggaagcagcctcctgtgcagagtatccccctccttccctccc

SEQ ID NO: 27684 - DNA, 1523 bp, Artificial sequence
  DNA replication origin
agggcgggacacaaacgttccctggcctccagccccagggtcccgcccgcctccatgtccctggctggggctgaacactgaacccgagtgaactgggaagcagcctcctgtgcagagtatccccctccttccctccctccttccgtccccctccctccctccgtccccctgcttccctctgccccctccctccctccgtcccctccctccttccgtccccctcagctggcgctcgatggggtcttgcgcacaccccacagatcctgtggtgttgtccccgtggcccggctgctgttggccagctgggactttctggctgatttgcacattgccctgcgtgcctttctgttcacctcacttcagagtgagggggaagccagacagttgctctcccagactgtgagcaacaggcactgaggccagcccgacccatcccaggggagtgcctgctggggtcctggccacctgggcccccgggcaggcatcactggcagggcttgcagctggccctggggccccggaagcttgcagtacagggagctgatgggtttgtaaaatgcaggtcagtgtctcctagtggctgcccggtgatcccctccctgctcccagagggcaggagccaacctggggctcccaaaagggctgaacctcctgtgccgagtcatggcgccctgcacttcaggctatcagggccttaccccagctgggacatcctcaccccaagcacaatggcaaaaggcaagccctggccagctctccccgaccttcctgccgggagctgctggagacgggatagacatgtgccagggcagagcagccttgtagacacaccacgaccacacctctgtcccagggctgactcctctgagcctggctgcaggtgtgtggcactgcccacactcaggagcccctgcctcttccacaagagaagtcccccgagagcctagtctgggtcacacagggccaagcccctcgagtcgcagtggggcctggggaaggccgagggaggctttggccaggccccatctcccgagaccatgggacgcaaagatcaggtggggccaggtagctcgtggcgctgccaactgcaggggctgagatgtcgggttgagcccgagtcctgaaggctgagtggctccagggtgggtggccttccaggtggcattggaagggacaggtgggcctgggcagcctagagaatgggagaggagacagcaggagtggtagacagcccaggagctcaggtgcagggaaccaagggcttgagagccagcccctccctgcacacctgtaggccgggctggggggccccaggccagactgtgggcacggtggtgggtgatgagtggcatcttgaaggcgcatgcagggcgggcatggccaaagggacccagtcaggagggactgatggaggaggtactggagccagctgggctcagtgatgccccctgagctgtgctcctgctgggtgggggcagagaccagctccgccactttggcctgggactgggactgtcctgctc

SEQ ID NO: 27685 - DNA, 1047 bp, Artificial sequence
  DNA replication origin
ttagtgctgcgtggcctggcctggtcgcatggttaagcgtgtgagtgctgtgtggcgcagcctggtcgcatggttaagcgtgtgagtgctgcgtggcctggcctggtcgcatggttaagcgtgtgagtgctgcatggcctggcctggtcgcatgctgaagcgtgtgagtgctgcatggcctggcctggtcgcatggttaagcgtgtgagtgctgcgtggcctggcctggtcgcatgctgaagcgtgtgagtgctgcgtggcctggcctggtcgcatggttaagcgtgtgagtgctgcatggcctggcctggtcgcatggttaagcgtgttagtgctacgtggcgcggcctggtcgcatggttaagcgtgttagtgctgcgtggcgcggcctggtcgcatggttaagtgtgtgagtgctgtgtggcgcggcctggtcgcatggttaagcgtgtgagtgctgcgtggcgcggcctggtcgcatggttaagcgtgtgagtgctgcgtggcctggcctggtcgcatggttaagcgtgttagtgctgcgtggcctggcctggtcgcatggttaagcgtgtgagtgctgtgtggcgcagcctggtcgcatggttaaacgtgtgagtgctgcgtggcctggcctggtcgcatggtttagcgtgttagtgctgcgtggcctggcctggtcgcatggttaagcgtgtgagtgctgtgtggcgcagcctggtcgcatggttaagcgtgtgagtgctgcgtggcctggcctggtcgcatggttaagcgtgttagcgctgcgtggcgcggcctggtcgcatgattaagcgtgtgagtgctgcgtggcgtggcctggtcgcatggttaagtgtgtgagtgctgcgtggcctggcctggtcgcgtgttaggcatgtgagtgggctccacatgtgcacgtcctccttgtgtcccggaatgaggccaggtctcctccgtcctccctctagaccagaatggaaacgaccttcggacccgccttttcagccgtcaccaccatcacaaaaggtgagcccttaagcc

SEQ ID NO: 27686 - DNA, 946 bp, Artificial sequence
  DNA replication origin
ctggcctggtcgcatggttaagcgtgtgagtgctgtgtggcgcagcctggtcgcatggttaagcgtgtgagtgctgcgtggcctggcctggtcgcatggttaagcgtgttagcgctgcgtggcgcggcctggtcgcatgattaagcgtgtgagtgctgcgtggcgtggcctggtcgcatggttaagtgtgtgagtgctgcgtggcctggcctggtcgcgtgttaggcatgtgagtgggctccacatgtgcacgtcctccttgtgtcccggaatgaggccaggtctcctccgtcctccctctagaccagaatggaaacgaccttcggacccgccttttcagccgtcaccaccatcacaaaaggtgagcccttaagccaaggccagcccaggctgggaataaccggggcacccccatgcccaccctgctaaggactgagggacacttcccggtgagctggtgttgggtgccagtgctgggcgcgggcagcctcacaccgcagcctgtgtcctcacagcctctcagccctgggcctccccactggacaggagtcgggtgtcctgctccttgtgcctcggtgactgtgctgtgccctctctccctgccctcttcatcccctctagggaggcttgccctgacatctccagcaccaccacacagccctgtcccttgtcacagtgatccccagcttgtccccagtctcaggctcctggccagcctccgaaaggtcccgtgtgcccggaggtcttctcttgagtttggccctagggcttcagtaacagtgctgcagttgtgacatgttaataggaagggagggagagtggaagagatccataagtctggtttgtttttttgagacgggtgtcactctgtcacccaagctggaatgcagtggcgcaatcttggctcactgcaacctgtgcctcctgggatcagtcctgccacctc

SEQ ID NO: 27687 - DNA, 1007 bp, Artificial sequence
  DNA replication origin
ttgaggcacctctgccaggtgagttccctgacagcctccactcacagagggggaagctgaggttgaggtgtgggctgggatacagaagggccaggaccgcatcctggtgtccctggcacagccaggaccaggaagtggccccagctttggtggcctcctctggggcaggagctgaagtgccctccctcctcctgcccacacgtcaccccagcttggccagggccagagggcagggctaccggccggtcagtccacgtgggaggcagagagagacacctcccggactcaggaccagcccagctcagatgtcacgatgagccctgggctcgagattgaggcctcgagaggctgccgtgtgactgggcctcggtttccccatctgtcatgaggggccaggtgaggtacctgtgggcgccctgctgcctggctctgcccatccctgccgccgaggggccaggcatagcagccgtgccctgccccatcatgggtaccttccgccgtgtgacaggggccatggggcttctaagggtagatgaaaaggcaccgttttttggggggtaggattagaaaaaaaaagagggcccctggagagcccctgaggggatcaccagcagcaaagaggcgctactgtaagcaggtgtccttggcggccctatgaccccatggccaggtttatcagagcaattaaaaagctaattagcagccagtgtgcttctacaaagggcagagtgccagaaaggagagagaacaaagtcaccccagaaccccaccccggaatgagggtccctggccctgcacctcgggaagaaggcactgccacttccgcatggtctccctgagcacggcgcttgcgttcaaagcgcagcactctggtttttaggggataggactgagaagcagcagggaagcttcaggtttctgtcgtgtatcccgcccagtggtcttgtgcaggtgaagatttattgggcttggcttgctggctcatgcctgtaattccagcactttgg

SEQ ID NO: 27688 - DNA, 2275 bp, Artificial sequence
  DNA replication origin
ccagatgtagaccgagcccagcgtccatgctcctggcactggtttgaccttgagagggaacccaagcttcccccgtgccatccctgcatgctttcctgcctgcctggccctggggagggctgtgagctacaggggacccacagggtcgggtatccagcatgggccccacctcccccacatctgctgagggagcccccactgagacgccagccctcttgccttgcagctgacgggaccagcacctacaagcagcactgcaggacaccctcctcctccagcacccttgcctactccccgcgggacgaggaggacagcatggtaggtccctacccccaggagcccgtgtgagcctcagcctccccccatcctccctcctgggggaaccaggtcccaggaggagttgacagtgagctggtgaggcacaggagaagaagagcacctgtggataccctgaggcctcggcagacatggcaagtctgtgagaaaggaggctcctgtggctggactgtgggtggcagggggcagccagtgagggcagctgggtcagagggcctggcacctgcaggccaggatgaggcatatttggctccatcttaagggaggtggaaaccacagaaagttcagtcaggaggatagcacaataaaatacatgctttgaaagcttcctttgctgctgggtagggaatgagcggggttgctgggtccaggcagggtttgaggaggggtcctgatgaggcggggggaaaggtgtgtggacctaagctgtggggacaccagaggcaatggggtgggggttgcggaacctgcgccaagtgctgggggagccggagaattccctgttgctggctgtgtgaggtgcagaaaggatcagggcagtcgggggctggctgctggtacctgagccctgtggccagggtctcagtggccgttccctgccatcctggtcaatggcgctcattgctgggctctgggcctacccaggggacagaggccaactctaccctgggcatgaaggactggcccagcagggggtgggggtgtgtggggcctctctggcagctgcctctctccagtgcttggacaccaggtgtggcggccctgctggccctcttgggaccgaggccttttcttttttccttttttcttttttttgagacggacttttgctcttgctgcccaggctggagtgcaatggtgtgatctcagctcaccacaacctccgcctcccgggtttaagtgactctcctgcctcagcctcccgagtagctgggattacaggcgtgcaccaccactcctggctaattttgaattagtagagatggggtttctccatgttggtcaggctggtctcgaactcccgacctcagctgatctgccccctccttggccttccaaagtgctgggattacaagtgtgagccaccttgctcagccagaaaagaagtttttaattaattgaacaaacacacctgtgtgccgggcgctgtgctaggccgagggcgagttgggtatgtctgggccccgtcccctgggcctctgcctgcctcggtctccacaacccgaagccacgagtcctccatgtctgtggttcccataatcacctgctatccccatgggtcacggtggctttcaagagaggcgggtaccttctctgtttgctgataggcccacacagggagtccccctcctgcccttcccccgtcccccaggcctgcctgctgtcagcccctacgcccaagagggtgggagactctggggtagtattgggcaggcccgggagagtggttcccgtgccagctcctgctctgctctcgcccctggggctccctctgctgctgtggggccttgtgactcactttctctgactcccttctgttccccatgtgctgcttccatgcagacgggcccttgggacccaaagggaggtgggtacatggcacacaatgccccccgccggccttgggactggtttgcctctgtgctctgtgggtttcatacccaggctgccgggaagggggccagaggctcggcagagcagcagctgggcccctctgcagtcaaagcaccaggagagaagccttgggcagtgtggctcttggaaacttctggaggtttccaggccagaggggaggaagggacagtgtctgcccctcccccaggctcccttgtcggtggctcagccagaggcaggcacctgtggccctcactcctgccctcgggaagctcagccgaggttctctgggggcctggccctgccttccctctgagcctcccag

SEQ ID NO: 27689 - DNA, 2395 bp, Artificial sequence
  DNA replication origin
ttggcagcctccctgcccacctccctgccctgaagaactgggctcctgcctctcctcccacccccacctccctctccaaagctctcaaccccagcatttgctcaaatccgcccatgctgggccggctgcgggagcgtccacgcccgccttcctggacgccctcggctccccctctgggtttccagggccttgggcctcagagaggattacagaccccggtgtggccccagctccggcctacctccccgggaccagcaagcgggcagctctcagcggagcctgtggagggcctgcgcccaccccggcccacccccgcccgccccccactcacccgtacttggagtgggggcatttgatgtgctcgcactccttgaggtgggcctccaggttcatcctgagcagcggggggcagctggggttgttgggacaccgcacaggcctgtagtcacagctgccctcgtggtccctgtgccagggcgggatgcggggaggcctcagccagagccctgagaagcagcccccagggaggcagaggtgcccagggaggggcacttacttccgggcgctgagcttgatggtgaaggggcaccctcgggggtccacctcaaagatggggggcttcccgctgcccgctacccggcagccgtgccggcagtggatgaagagctccccgatctgctcggccaccgcgatgttgttcaccaccacggtcagtttgacgttgtccacgggacacttctctgggagaggagggcgtgctgaccctcacggcctgcctggcacacgctccctcacccgggtgggcatgagcctctaatgggggccagatctgtccatctgcgcctctgaggcacgcaacatgggaacgggggcacaggtgggccaccaagaaggagcagcaggtgctgagggagtgtcacctgtgacactcagctgtgcccggaaaagtgtggggtggggccaagagggcagagggcagagtgcggagaggcaggcaggagcgggcgccgtgcgggaggacgacagcctcgccagtgagaaaggcctccccagagggtgccaaccctggcatggggagcctcggcccacacccactgtggggtctctgagtctggacacactggaatttggggtgtccccactctgctcatggaggtcccgagcctcagcctgagcgtccctaggacggctgcagccccatcccaaccccagcagaggccaaacagggccggacgctgtgcaggggacaagggagaagccgcccgcctctgctcggcagccatgggcacggtcggcgtcaggcctgggccggggcacaaacctacctgacttcaaggcgcatctcctacagaacgtgtgctgtggaggcaaagggcgggcttgagggtggcgcagggtcctctttttccctagtccatggccatggcagccacaggcctcgctgtaccccaagcccagtgcagccaggacaggccttgaccaaggccagggcgccacagccccggcccccgagagccctggggtcctgtgggggcctctggcagcaggggggctgggaagggcggcgggctcaccccacacgtggtgatcacggggtctttgaagacgctgcagcagagctgacagcacagcttcaccgagggctgctccgcaaacaccagtggctcctggaaccaagcgggaaaggcaggcgatggcgggaggccaccctcagccccgccaccacccaggcacccaggcgctcttgctccaggcctggctgtcctctgaggacagggtcacgtcctgagagaggcctgcttagagctggggggcttgatcggggcccaggagggagagcgaggtctgtggccccagaggcagggcccaaccccggaggatgagttcagccgcccagccttggccgccctcgcccgcctccttcctggggtgagactagaaagggccctgctggagccctgtgcttcccgctgccagttcccgggcagccctgagaagggggagtgggggaacatgcccaggggacccggcctggtccctcgagtccccaccacggaccagcaagcactgcagttcccgtcaggccccagccgccctctccctgtgagctgggcgggcatggcggaggggaaggtgcctccgtgccacggctgcggtgacagccctggaagccgctctgcgccgagtcccccacacctaccggctcctcctcctcctcgggcagtgagaatgtggagcgcagagacatgctggactctgagtgcagggagcggacagagatggcggagtcggagcggcggggagtgctgatggggggctgtgtggagggagaggcgcctgtcggggggctccgcacggggtcagagcctcggggaggacaggacccagcccggcg

SEQ ID NO: 27690 - DNA, 1217 bp, Artificial sequence
  DNA replication origin
acggctgccgggtagcgggcagcgggaagccccccatctttgaggtggacccccgagggtgccccttcaccatcaagctcagcgcccggaagtaagtgcccctccctgggcacctctgcctccctgggggctgcttctcagggctctggctgaggcctccccgcatcccgccctggcacagggaccacgagggcagctgtgactacaggcctgtgcggtgtcccaacaaccccagctgccccccgctgctcaggatgaacctggaggcccacctcaaggagtgcgagcacatcaaatgcccccactccaagtacgggtgagtggggggcgggcgggggtgggccggggtgggcgcaggccctccacaggctccgctgagagctgcccgcttgctggtcccggggaggtaggccggagctggggccacaccggggtctgtaatcctctctgaggcccaaggccctggaaacccagagggggagccgagggcgtccaggaaggcgggcgtggacgctcccgcagccggcccagcatgggcggatttgagcaaatgctggggttgagagctttggagagggaggtgggggtgggaggagaggcaggagcccagttcttcagggcagggaggtgggcagggaggctgccaagcagcgtgggttttatcctcaggaagggaggaccccttgaagagctctgcgggggtgacgtgatgggatctcacttgtgaagcagactgggggtagctggatggggaggaggggcaggacggcaggtgtgggtgggggcagctggacctggggtgcagcggccacagggctggagcatttgagggggattcttggggatggggaggcaccggcagggacccgccaggcaggcagctgtcctgtccccgcaggtgcacgttcatcgggaaccaggacacttacgagacccacctggagacttgccgcttcgagggcctgaaggagtttctgcagcagacggatgaccgcttccacgagatgcacgtggctctggcccagaaggaccaggagatcgccttcctgcgctccatgctgggaaagctctcggagaagatcgaccagctagagaagagcctggagctcaagtttggtgagggtgggcaccggggcaggcaggggcctggccactgctccgggcaccagtgacaccccctctcctcctgctactcagacgtcctggacgaaaaccag

SEQ ID NO: 27691 - DNA, 823 bp, Artificial sequence
  DNA replication origin
ggtgggtttggtgaatgtgggtgtgtcagcgtggcagccacgtggaagcagggcatgtagcaggccaggccacgggcttgcagctcctctgagggtgtgcctggccccctctccaggggctgtgcaggcagcccatccaccccagtggagttcccacggacgcttctgctcatggtccaaggctgtgttgtgtggtcattctcgccctcccttttcctctctcctcctgccccctccaagaagtactgactggtctcctctatcgtgtttgctgatccacagtgttgggcacaactttgacgtttcttaaaaaaaaaatttaaaaaatgccgaaaaccagcgattgtggtgtggggcgggtggaggcggctggcggaggtggcgtcccggcgtgcagggccccttcctgctgtctcaccccgtgtttccctgcgagtggacgtgcccagctgtccccccaggcctctcctcagagggcggcacaggctgggctccagcaggtgggcaggggaggtctgggcaaggcgctgccgtcggctgtcaataaacagcaggaaacagaggtgcctggctcactttttgggggcacatgtgttgggggagatgggactggaggccagcagcttgggtgtgacgagttgcctcctagcagggaggggaggccccggagtgggccgaagtcctggggtccaccaaaggaaactgccccatgcccccccactcacagcagccagtgcctgtgcacaccaacctcaaggccacacacagcccccttgtcccgaggagctgtccccactcacagccacagtctgtggagcattta

SEQ ID NO: 27692 - DNA, 997 bp, Artificial sequence
  DNA replication origin
cgcctggccgggggctccaagggctctaggcagaccctgcgcccgcgggtcctccccacctgctgctccccgtgcaatacctgctgggcctcctgcccgcgcgggaggggagggcgccccgggaccagggatggggcagcgcacaggcccgggcccagcacagaactgcccatcgggacgcccggccagccgctcgggcgcagcacaagggacaggggaccaaggtcagggcccccctgccccaccgcacccccagaatataagctatcaagagtattaatttattgggaatgagctgaggcggatttccccagagaaacaaaaaggtataactttaacaaatatatatttaaagaaagaaatattattgattctatagaaaaccatttaccaactgaaaggacacgaagtctagctccggacaaaagctgttagaggcccaggctgtctgcctgcggtccttcctccggccagagtggaggccccaggctgctagcacaggtggaaggctggggcccgggggcgggtgctctgccgggggctcctccgtgcttctctcctaagttctctgcgccccaagaactcgaggttgtgccttgctctcggcggccgtgtcctcctcctggcgtggctgcgtcccagggcgcgggtgggtttggtgaatgtgggtgtgtcagcgtggcagccacgtggaagcagggcatgtagcaggccaggccacgggcttgcagctcctctgagggtgtgcctggccccctctccaggggctgtgcaggcagcccatccaccccagtggagttcccacggacgcttctgctcatggtccaaggctgtgttgtgtggtcattctcgccctcccttttcctctctcctcctgccccctccaagaagtactgactggtctcctctatcgtgtttgctgatccacagtgttgggcacaactttgacgtttcttaaaaaaaaaatttaaaaaatgccgaaaaccagcgattgtgg

SEQ ID NO: 27693 - DNA, 785 bp, Artificial sequence
  DNA replication origin
cctccgcccgccaggccccgccccgcacctaccgcgggccctgcgcgtcctcctgccggatcttctcctccaccgcctgcagcgccgcggccaggcacgcgcttgtctcctccagtttctgccgggcgctgtcccctggcgaggcgccttcgggcggggcggggggcgcggcggcggcggcggcggcggcggcggcggctcgcgggggcttggcgggcacgtgcagcgcgggcgcgccgggggacgggggcttggcggggctggcgcccagcgagggcggcgtaccgggcggcttggcgagggcggcgggcggctgtcgcgcgggcgagggtgcgggtgaagggccggcgctgcccgaaggcagccccgcgaccgccttgacgggcttgggcgctgtgggcggcggcggcggcttgggagacacgggcggtggcgtgccgtgggcgcgcttcacctctgcggggaggaccacgctggcaccgagcgggcacgagttccgccgccgcgccccctgccccagcctcccgcggcttcctccccagcggaccgggaaagaccctgctcaccttgcccccagccctggatggatgagagggtctggggacacgttcccaccccacctgggcttccatcaaacccaagaaaaggaaaacccctcagaccaccgagtaaggaggtggagcagggtcctgttgccccttcaccccaccctggctggcctacctgggctgccagggcctggcagcggcaccttcttggaggtgggtgtgggcgagccctggagc

SEQ ID NO: 27694 - DNA, 1812 bp, Artificial sequence
  DNA replication origin
aggccgaggtaggtggatcacgaggtcaagagatcgagaccatcctggctaacacggtgaaacccagtctctactaaaaccaaaaattggccaggcgtggtggcgggtgcctatagtcccagctacttgggagtctgaggcaggagaatggcatgaacccgggaggcggagcttgcagtgagccgagattgcgccactgcactccagcctgggcgacagagcgaggctccgtctcaaacaaagcaaaacaacagggaggtgcctgtgcagtgggatgggttccgggcctgaagaaggtgggcccaggcctagcccaactgaagcggactctctgggcctcacactgagctctgggctcccaacgggagaggcgatcggtggctgtcaaaagccacctggcgcgtgggtctgcactcaccctgccttgcctcactcaattggtggctcggggatcctcctaggggtcaggtccgggtcccacgggccttgccgcgcacctgggggtggctgagtgttcaagagcagttgcatgagtgaattccagctggaagtgtggacgcctgaatgccgctcggggagtgatcgggtgtttctcggtgcagattgctgtgggtgttggcacgtgtgtgtgttgtggctgtgtggcatgtgtgtggccctgtgatgtgggtgagaggtcagagtgtgaaacgggatggggtgctggtgcctgtgcacggctgggagcgcagcgtgcaaatcatgtgcgtgttcctgtaccaggtgtggccccatgcgtctgtgtccatgactcgggtgtgtctccccatggtgctgtactcgtggctgcctggccgggtgggaaagtgccttcttctgcccccccgacaagggtgtcctgtggatgtgggcagccgtgcgtgtgtgcgcatgtgtgcgatatgcggcatgcagtgtccggtgcctgagccgaggctctgcctacatttctggtgccaatacctcggcctatccgtttgtcctcctgtctgtctgtgccctgctggcccggtgacccttcctcctccagctccaggtagatgggcagggtgcgggcagccagcccaggtggctcctctgtgtgtctgctctgtaggctaacctggccgtgtggctgtccatgatcggcctggcccagtactacaaggtgttggtggacaatggctacgagaacattgatttcatcaccgacatcacctgggaggacctgcaggagatcggcatcaccaagctgggtgaggccccagccccagccctcgtccccagcccaaccctcagcccaagccccagccaccagccaccagcccagccccagccccgccccagccccaagctgggccccaagcccagcccagccccgcccctagcccggcccctgcccctccgcctcctggtccacctgacctgccccctgcgccccactcagggcaccagaagaagctgatgctcgctgtgaggaagctggcagagctgcagaaggctgaatacgccaagtatgaggggggccccctgcgccggaaggcgccccagtctcttgaagtgatggccatcgagtcgccgcccccgcctgagcccacaccggccgactgccagtcccctaaaatgaccaccttccaggacagcgagctcagtgacgagctgcaggctgccatgactggcccggctgaggtggggcccaccactgagaagccctccagccacctgccacccaccccgagggccaccacgcggcaggactccagcctgggtggtcgggcacggcacatgagcagctcgcaggagctgctgggagat

SEQ ID NO: 27695 - DNA, 1625 bp, Artificial sequence
  DNA replication origin
cacatgccacacagccacaacacacacacgtgccaacacccacagcaatctgcaccgagaaacacccgatcactccccgagcggcattcaggcgtccacacttccagctggaattcactcatgcaactgctcttgaacactcagccacccccaggtgcgcggcaaggcccgtgggacccggacctgacccctaggaggatccccgagccaccaattgagtgaggcaaggcagggtgagtgcagacccacgcgccaggtggcttttgacagccaccgatcgcctctcccgttgggagcccagagctcagtgtgaggcccagagagtccgcttcagttgggctaggcctgggcccaccttcttcaggcccggaacccatcccactgcacaggcacctccctgttgttttgctttgtttgagacggagcctcgctctgtcgcccaggctggagtgcagtggcgcaatctcggctcactgcaagctccgcctcccgggttcatgccattctcctgcctcagactcccaagtagctgggactataggcacccgccaccacgcctggccaatttttggttttagtagagactgggtttcaccgtgttagccaggatggtctcgatctcttgacctcgtgatccacctacctcggcctcccaaagtgctgggattacaggcgtgagccaccgcgcccggccgcacctccgtgttaatgacgattggccatggcgtgtgcaggtatcgctgagaatgggggtgtcagctattggtgagggccacacgtgcggtggagcatgtgtgcacgcacacaagctggtggatgcctgcagggtgttccatgcacacctgccaggcgtgtggctggcacgtacctgggtgcctgtgagcaaaggccgtaagcatggccccctacagtctgcatgtgagtggcagtgcttggaggcttggtggctgggggtccctgtggggcagcctgcatgtggagggagtcctggtgagagcatggacgtggggaggggactctcctggcttcaggctccctcagcaacgacgacccctggacagcatcaccttgcccctgccccagtgacaaaacaggggctgatcgggaggctccctgctagcagggcatcctccactctcctctccctcaagcccctgagggcgggtgggagttgtggccagggaggcaggttctctgtctgtctgtctgtctgcccgtcctgggcccagcccctgggatgcaggtggccttacgggtttgtgctcaggcagccagtcagggatgcttaggccgctgatctctgccgcgatcttcttccggtggcccggcttggtgacaccaatggccgtgaggtcctaggcagtggggaggcttgtcagctaggggctgggcccatctgtgggacgcagctggcgctggcggcgcatggaaagctcacctcgggagtcatgcggctgatggtgggcaggtcgtagccggcgctgatgaagttgggggcgtagagctgcagctggaacgcggtgagccactggctcacggcctcagagctctggaagacacaaggcacccactgcaggctcgcctgcccggccgcgccctgccaccacagtgccgcctcctctgct

SEQ ID NO: 27696 - DNA, 1409 bp, Artificial sequence
  DNA replication origin
tggccccctgcccacaggaccccagggccaccggcaggatgcctaggcttggctgtctctgcctctctcctgctctaaacgtctggggtgggaggggtcttccgaggggctatcagctccctggagacaatggtgggcagagaggacccccggctgtggctgcgccagtctctgtcctgcctcccctgcgtcagtacccgccatcgctggcccaggacttaggaggctttgcttgacccacaggttcccgagcaggcactgaaccaagcctgccccagggaagcagctcatcgggaccctctgcacccccagaggagatctgggtgctgaggaagccttttgcaggtaggctgggtccctgaagggcagaggtggcaggacttccacaaggcaccaccgtggggccaggcaggggccggcactggcctcatcttgctcccttgtgctggcaggtggggaccgaagcggcagcattagcggcatggctggcggccggggcagcgggggtcacgccctacacgcgggctctgaaggcgtcaaggtaggtggggtagtggccagggccagggtggccagggctgggagcaggtgacaagccggggtttctgggttgcagctcctggcaacggtgctttcccagaagtccgtctctgagtccggcccgggggacagccccgccaagcctccggaaggctctgcaggtaagagcaagggtgctgccacgcagcccgatggaggaaagcagcccgacagcccttgtcccccacccactctcgtcctcaggtgtggcccggtcccagcctccagtggcccacgccgggcaggtctatggggagcagccgcccaagaagctggagccagcatcggagggcaaggtacagggcttgggggtgttctcagcgtgggctccggggagaggctgtaaggccgatgggctgatgggtgcttacacggcctgcctggcctggcagcggcggggtcgggggcattgccaggccagaccctctcctctgtctgtcagtctgtgtgttgtgtgtgtgtctgcctgtgtgtacgggtgtcgtcattgtgcaggctgtgcgtgtgggccaacctgtgcctctgtgtgtgcgtgtgtgtgtgtgatggtgggactgcgagctgggcacgcgtgtctgtgtacaggtggaaggggatgggtatgagatggtgcagcgtgtgcatgggcacggcgtatggtgtgtgagtgcactcgtgtgccggagagctgtaagctgctggctgagtcctgcacggtggaggaggcaaggtgcccctgcctgtgggcacagagcccaccttccggtccagcccgaggcccctttcccagagccccctcccaaggggccataccacctgcatccccaagatggcgtggggcgtccctggtg

SEQ ID NO: 27697 - DNA, 2011 bp, Artificial sequence
  DNA replication origin
cagagcctcatctctcacatgtgcagagcgggatcaatgcccacgtgaggaacacctacagccagacagccctggacatcgtgcaccagttcaccacgtcccaggccagcagggagatcaagcagctgttgcgaggtgggcccaggcagggcagaggggcagtggctggggctggggctgggccagatcagcccgcaggacttcgggggccccctcctgtatccccagaggcctcagcggccctgcaggtccgggcgaccaaggattattgcaacaattacgacctgaccagcctcaacgtgaaggcaggggacatcatcacagtaagcatggccccaggggccatctcagcagggagggggcggcacctgggcgtgcgcaccccagaacaccctcccgccgcaactggggggcactgggcaggagactctgcgaaagggggcatctccctgagcgccccccaccttactggccaggtcctcgagcagcatccggatggccggtggaagggctgcatccatgacaaccggacgggcaatgaccgggtgggctacttcccgtcctccctgggcgaggccattgtcaagcgagcaggcaagttccaccccaccctggggggcaggcaggagcccctgggcttgggggctggaagcagcgagtgtgctgagggtgtgggggcccagcagggctgggtttctgggtgccagcgtggggttgagtggggagcatcagggtgccccagcggccgtctcctcgtccgttcccacacctattcctttatgcgttctaccaagcactgtgtgctgccatgtctggttctgaaccggccactagaacagatggggacccaactcccaaggagctcgtcctggggcaggagagggcaggggacagcgaagtaaacatgaaaggacatgtgacccggagcacagggagggcctgcttgagatgaggcagtcagagaaggccagagaatgctctgagaggcaggtgggttccaggtggcaggagccgtgcgttaaaagccggcggcgccaggcgtggtggctcatgcctgtcatcccaacactttgggaggccgaggctagaggattgtttgagcccaggagttcgagatcagcctgggcaacatagtgagattccatgtctacaaaaaataaaattagccaagcatggtgttgtgcgcctatggccccagcgacttgggaggctgaggtgggaggattgcttgagcctgggaagtggaggctacagtgagcgaagattgcaccagcctgagtgacagagcaagaccctgtctcaaaaaaaaataatgattaaaacaaaggcactcaagtgtttgctcttggtgaagaaaaaaggaaaaaaccaaaggcgctgaggcaggcaagagctgggtacatctgagtaacaggaggctgaggagagggactaggccaggggcccaggctgtgaagccccatgtggcagctgcaagggaccaggggcccgtttactgctgatggaggacctggaggttgacaggcagggccagcccccgaccatggccatctagctcctgagtgggagccttggctctagcttgtggggggcttcttgcctgccccccactccccagtacagagactttcataccgtccagcaatctctggccccctgcccacaggaccccagggccaccggcaggatgcctaggcttggctgtctctgcctctctcctgctctaaacgtctggggtgggaggggtcttccgaggggctatcagctccctggagacaatggtgggcagagaggacccccggctgtggctgcgccagtctctgtcctgcctcccctgcgtcagtacccgccatcgctggcccaggacttaggaggctttgcttgacccacaggttcccgagcaggcactgaaccaagcctgccccagggaagcagctcatcgggaccctctgcacccccagaggagatctgggtgctgaggaagccttttgcaggtaggctgggtccctga

SEQ ID NO: 27698 - DNA, 1186 bp, Artificial sequence
  DNA replication origin
tggggtcaggggtcagctcccagcattccccccacctcccagggttggccttgggggtcaagggtcagctcccagcattcccacctcccagggttgggcttggggtcagaggtcaactcccagcaaacccccgcccccaaccccaagggttgggcttggtgtcagaagtcagctcctagcgccctcccaccccccagggttggacttggggtcaggggtcaggtcccagcacccccctatcctccagggttgggtttggggtcaagggtcagctcccagcatcccctcgccccccaggcatgcggccgctgcactatgcggcctggcagggccggaaggagcccatgaagctggtgctgaaggcgggctcggccgtgaacatcccgtctgatgagggccacatccccctgcacctggcggcccagcatggtcactatgatgtggtgaggcccgagcgggggcggggcagcgggggcggggcagcgcggcctgaggatgtgcggacctgactgcgcccttggcccccagtctgagatgctgctacagcaccagtctaacccgtgcatggtggacaactcggggaagacgcccctggacctggcctgcgagttcggccgcgttggggtgagtctcctgtggagccctgtggggtggggctggggagccccacatcaggacccccctaccctgacccctccttcaaggtggtccagctgctcctcagcagcaatatgtgtgcggcgctgctggagccccggccgggagacgccaccgaccccaacggcaccagccctttgcacctcgcagctaaaaacggccacatcgacatcatcaggtagagccggtagcagggagggcctcagccttagggtccccagggttcagcagcagcctggggctcagggcaccagcttctggcttggggatagggcgggagcaggcagggtcccaggtccctggtcaggcctctggcatggcctccagggcccatgtacaggatgagctgcaggggctgggaagggggcttctgcgacgtctctgtcccagccccaccgctcctgggtgtgctcgaggaggtgctgaacttccctgagcctcactttcccatccgtaaagtggggttcacagcagcgcctacactagcatcagacaagataacagctgggaagtcttagcacagggaggg

SEQ ID NO: 27699 - DNA, 975 bp, Artificial sequence
  DNA replication origin
gagagcaaagcaggagccccacgtacggccactgtccagtctcagcctcccctcctagcacagccactgtccgttgtcggcctcccctcccagtgagaccagtgctgccagggggtcttcaggagaggcgtggcaagatctgattcatgttctctctcctttttttttttttgagacagggtcttgctctgtcacccaggttggaatgcagtgagtggtgcgaccccggctcactgcagcttcaacctcctgggctcaagcgatcctcccgcctcagcctcccaagtagcagggaccacaggcacacccctccgtgcccagctactttttttttcctttattttttgtagagacaaggtcttgctatgttggccaggctggtcttgaactcctggctgcaagtgatcctcccacctcagcctcccaatgtgctggggttacaggcgtgagccacggcacagagcctgactcatgttttcccagggaaccccgacggggtgggtgtggaggttggaccgagggatgtgggaagaccttagcgacaccagtggggaggggatggcacttatcctgccagagatgccggcctggaccaggttggtgacagtggctgtggggagaagggctagggttccaagtgtgctctggggatgtctgggaggcagagctgacggacaagctataggtgtgcaggaaaggccccaggcctggctccaaggttttggcctgggccatggtcaggaaggatggcattgccactaaccaagagggacactggtgccagcagtgtctgagcagagggggaggggccggtgaggctggagacgactttgcttgccagaagaaacccctggctggagagagctgggggtgggattcctgtacggctaatattagtaatcgccatgcaccgagtcctgacttgtgccaggccgcgcacgctttatgtctgggaatgctctcacacctccggga

SEQ ID NO: 27700 - DNA, 2375 bp, Artificial sequence
  DNA replication origin
cttcccaggctgcgggctgacagctggaggtctctgctggggccttcaaagggcgaggcggatgccccccccacccaccacacgcaccgggaagacagggagggggcccctgcggcgaggggcgacccgggaggtgacagtccctagcagaccccctcccgccccacgtttaataacacgctttgcagggaaggtgggggcaggaccacgctgggggtgtggctgccctggcatggccggtggggtgccatttactgatgggagagcagaggcccaaggtcgcccagcccagggcaggctggactccaggcagggccggcctgggcgcaagggcttggggccctgctcaggcaggctccagcagagccgggtctccagcttccctgctgggaaaggaggccatgagggagtgggggaccaccactggccatccccagcttgccctatggccggccccaggaaagggctgggagcttggagccctggtcccagcactcatcctggctcagcgcgtagcctccctgggggccgccggagatggatggatgggcgtgtggaccagccgcgtgtgcggctgcgcacgtatagccgtgtcagtgtgtcagggcacctgtgcgggcacggacagggctctgcaggtcggcacgtggggtctgggcgtcctccctcctccctccacccccacagactgtaagccagagagtccccctccccttcctccagggggatgccgagaactgggactggcttctgggagattgttgggggcacctaggagtcccaggaggaccccctcccccgtacttcaccagcagcccatgactggctagctcctgtccactctgtgcagtaagagagagggggcaccggtgccttgcaggctggccccgagctgatttcaggtccgggggctcagaaagggagagcttgtgggcagaggcagcctcagctgagcctggagagcaggtgtagggattgagggaaggcaaggtaaaggtttccacctagtggccgcatgaccttggacacagacaactccagctcagtggacctcagtctcctcgtctgtaggatgggatgtcagcctcacggtggggtcctaagaccagtgagcctgggcacttgcagcccaggcattcagtaagtgctcagtaaatgccagcaatgaccgcagtcttggacggcccagggccaggggctggggaagtgggggcttcagctctggggaggttcctcctcccttctattgtggccattctggggaggtgtgggggcttccactctcacctgggtctctgcctgtcttgcctggcctctgggacaggagagacacctgccctggccccggctcctgctctctgactcacaggggcgggtgtaataaatcagaggagaaatccctccatgaattagctccgtcgtcatggcaacgctggcctgctttggagtaagatgtattttgattcagtaaagtacagctgagtttgggccacgaggtggggggtgtccagcagtatcctccagggccccgtgagcccagggctgtccccatgagctttgcttccatggtcccctctggttgcccagtcccttccctccagcccctgctccagagtcaccccaggctcagccagcccccgactcgccctgccctgaagggagcctcccgtgcccgcacgcacacacttagcagctgtccttgaggggaagaggagcctgttctgggggagatgccggtgcaggggctggcctcctgctggccaggagggacccactcttccctctgacccggaccctatccatggaggccccctgtccatggaggcaggcccaagaatgccgtggaggacacccctgagcaccgagggccagctccccatccccctctcaccttctaatagcccactagtagctcccttctagcctgggatatggactggaccccagaggtggggacaggctcaggatagcagtgagagggctggtcgggggtaaggcctttactgtcatagagtcacagggcttagggacctcgtggagagggaggggggctcctggactttcatcctggccccggccccctccagccatgctctgctcctgcttcatccagagaacccgtttccaggtgaaaacagcccccagccccaggcccttctcagttctgggaccttcctgggtacccactgtccccccacaggaatgggggttagtgtgtcccaagacctcaagttgctgccatccaatttcagccagtttcccccttgaggagaccataagtggggagagggacgagatggctttagtaaggcacccctcctcacatgggggtggtccccttcctgagggagacaccctcccccactggcagatgt

SEQ ID NO: 27701 - DNA, 2821 bp, Artificial sequence
  DNA replication origin
cctcctcgccgcccgccgccccttcgccctcctcgggctccggcttgggctcgggctcccggcgcggagggggcggggagcgcgtcacgggcggggggcggcccgggggcgggggcgcgcggcgggcgcggggcgggggcgcggcacctggcgccgcctcccggacgccggggtccgctcccgggccgccgacctccgtcagcccgcgccggccgcgcgcccgggcccgtggctccgccctccccgcgcccgccccgggacgccccctccccacgtgcgcgcagcgcgctcaggccaggcctctgcggacgcgggcggcctggggctgctagccgggctggggacgcggccgccgggggtgcactgggagccccgacgcggcggcggcgcggggctgagcccagagaggcttccagaggctgcgggacccgcgggggacggttccgaggcagcgggcgggcggggaccgggcgccgagagacccgggcgccagtgcccctggagccggcccgccaggctgtcaggcgttcctggcccagggttcccgtgggaggtgtcgagggattgtgaagaggaatctcccaataatgaattcggtgtcagggaacccgcacccccaacccccaagcatcctcctgctcctctccgcaaataatgcgggcgccacagcttcccccagcctcagtccgaagcctgaccccaaggtagcccccaccacccccactgagggagctcaactccccactccccgcaccgactgggggtcgcctccatctccatccacaggggctggaacctcccgccggcaccaaccgacccccggcccacgtctgcccactctccagcctgcagcccaggcaggcgagtcctgcttcctgggtgctggaggccccgacttgtgaccctctgagctcctggctgaaggcttgggccaccctgcgcctcaggccctctcccgtcaggcctgcagcattctagaggcagatcagtgggggtctgagtcccgactcaggctccgtttccctcatcacccaagcgggcaaggccgtttggagaatttggggagggtcgcacccattctatgaggcatggcctggcaccccactctgtgtggccccagaccattgagcaggtccagggggacagaggaggtcagacagcagggacagggaaggtgacaggcaccggggtcccggcatcctgtgggcagctggccgttcccgttccctccgtggggtctcctgttaggttcaggtagcagcccttggtcttccagcactcctgggaggggtccccaaatgctagggcctttcctcttgccctttccaatgaccagttgagtacccgctgggtcaggcactgtgctggtcacctcctagatgaggttggactcactgtccccattttacagatgaagaaactgaggctcagagaagccaaggggctcacctggggtcccagagtcttgaggttgtaagtctgggctttgcacccgcacctctggatgtgtcctattccccctcttagtggtttgtgaccatgagctggtcactttgtcattcttttttctgagacagggtctcgctctgtcgtccaggctggggtgcagtgacgccatcatagctcactgcagcctcaacatcccaggctcaagcagtcctcccgcctcagcctcctgagtagcgcccggctaattttttttgatttttaatagagatgaggtctcagtatgttacctagactggtctcgaactcctggcctcaagcagtcctcccacctcaacctcccaaagtgctgggattgcagacgtgagctaccacacccagcccactgcctaagtgtctgtgcccctctgtaaaatgaggatatgcatgctacctccccttaggttactggaggataaattgtgatactatccacaaagcatttcacggcaggacttagtaagtgctcaaaaaaatggctgctgtagatattgtgatattcttgggcctctctgcctgtgcagcaactgtgttttgtgcatctttgtatctacgctaccttgcagtgtgaagagcacataggaagaactaaaaataaaaataagatagctgctggcattactattacttttatgttttggacatgttaaggcaaaccaccctgacctgtgcttaacacacaaacagaagcccacacaccaaatgttcaaatatttaaacgctacaaatcacgccagtcacctgttaagtatgttctattctcctaccttgacaaatataccttcatcatggcctgaaagcccaagttcgaattgagaattctcagattcctcgggtgatgaactggcccccgtttgtagctacctcacctgttctctgctcagctccagcactgtccacaccccataaacaggcacccccttagtcgctcctcagagctagggtgggcaccctgctgcgtggcccaccttcaggaggacagactgggcagagggctgtgccgatcctggaagtgggcttggggctgtttgggcaggaaactccagggtcctacgtgctcagagtgtggtctagaaggggcacctaggctccaggtggattgctgctcaggacctcagagattcctcaccccatggggtgcagtgtggcaggaggggaccagagccttctgctaggtgaggataagcccaggagggactgggaagcgttggatctgatgctgtaaccagtaactttgggtgagtccccgatgctcagctgcctcatctgtgaaatgggccagcagctccgcctgcagcttagggctgacgggaaggtccccatgaaaacagatgtg

SEQ ID NO: 27702 - DNA, 2167 bp, Artificial sequence
  DNA replication origin
ctatattgttcaggatggtcttgaacttctgggctcgagtgatcctcctgcctcagccttcgaaagtgctgggattacaggcatgaatcactgtgctgggctcagactgaggtttttaaaaggccactctggccgggcgcgatggctcacgcctgtaaacctagcactttgagaagctgaggtgggtgggtcacttgaggttaggaattcaagaccagcctgaccaacatggagaaaccctgtctctactaaaaatacaaaattagctgggatggtggtgcatgcctgtaatcccagctactcaggagactgaggaacccaggaggtggaggttgcagcgagtcgagatcgcgccattgcactccagcctgggcaacaagagtgaaaatccgtctcaaaaataaataaataaataaataaataaataaataaataaataaaaggccattctgcactgtggtggacagtttggaagggggccagagtggctggggcaaggaaggaggcttttatgggggatgggggtggtgagctagaaccagggcagtggaaaggacaggaaggtatatcacaggtaaaatcggtggctgaagggaagggaagggtgagggaggggaggtgtcggatcttgcccagctgtaatacaaggtgggcactgcccacagaaggggagctactcagggatgggttgtcttggccctggaatatggtggaccctgcggggcattcaagggacagtgtcttaacagggagctgaggccatcagagctggagacagggtggaaggggcccaggacagggacagcattggaagctccagagctagcagtcatcagccccctggtatctcgtggggtgcacagagtgaatgctgaagggcctgagtccttgcgggcaggcagggaaagagactaaatgtcggggacaggagctaggagaaggcagcctttcaggcatggtgccgtcaaccatggctcagatgcgtcaagaagtgggagggggccgggcgcagtggctcacgcctgtaatcccagcactttgggaggctgaggggggcggatcacgaggtcacgagatcaagaccatccaccatcctggccaacatggtgaaaagtctgtctctactaaaaatagaaaaattaactgggtgtggtggcatgcacctgtaatcccagctacccgggaggctgaggcaggagaatagcttgaacccgggaggtggagattgtggagagccgagatcgcaccactgcactccagcctggcaacaaagcgagactccgtctcaataaaaaaaaaaaaaaaaagaaagaagaagtgggaagaggccgggcgcagtggctcacgcctgtaatcccagcactttgggaggctgaggtaggcggatcacttgaggtcaggagtttgagaccagccttgcgaacatggtgaaatcccgtctccactaaaaatacaaaaatcagccaggtgtggtggtgcgtgcctgtaatcccagctactcgggaggctgaggcaggaaaatcgcttgaacctgggaggcagaggttttgcagtgagtcgagattgcaccactgcactccagcctgggcgagaaagcgagactctgtctcgagagaaaaaaaaaaaaaaggtgggaagaaggaaaagtatccactggatttagcaaagtgagattgtcagtgaccttgaggaatttccactggagagctagagagctgggggtaaaaggcagatgactggggttgcggaatgagtgggaggtgaggacgtggaactagaaaaatggtgaggaccgctctttgaagaagataatttgggattgttttatggtgtttttttaaaggctaaccggcaggaaggagaggaggtgaaggtataggaaggaaggctccatgggaactatggcctggtcaagggacaagatgcaccccctctgcggccagaggaaggggtgcagccaggtctgtaagagcagcaggaaaaaaccatgcgacagcctgtctcaagggtgagggcaccggcgtggagctcacagagctggaatgagggcctgtggttttgagggggaccctgggctcagtgggatgtcctgagggtcaggctggggctggggtgccagatctagcaagtaaaactacaggatacccaataaaatttttttagcata

SEQ ID NO: 27703 - DNA, 1145 bp, Artificial sequence
  DNA replication origin
gggctgagtgccaagctgcccgcacccagcacctgccaccaggactcacggtgctattgacagctgccatgtagctggcgtcgggatcgatgtgggcggacgtgatggagacctcgggctcagggatcagctgctcgttgtggtctgttttcaagtcccagatgtggatagccccgctctggtcacccacgatgagctctgcctggggtgcaggggtggtgaggcagggcccaagcccagccctccaaagtcccagggtgcctggccccatgagcacccctcacctggttggggtgcaggcacacgcagttaatgggtgcgttcacctggaagatccgctggcactgcaggttccgggacctgcgggccgggccggggcacatgctgtccatctgggcttgttggtgccctacccagatggcctcggcctggccattcctcccctccctctgctgaaggacctgcctcttgggaaatacttgggacgcagggccctctgctccagcagggagcctaagccagtggctggtggaaggggaataacaagctggctccgggctcaaggcaggactcgcgctctgatgcaattcactctcctcctgtcctcacttctctcagtaagtcgcccacaggaagctccctgtctcagcctctgcttgaagagaacccaacctaaaacggtctcccagagcagcccaccccagccccgggcagcacgccccctccccaccgcacctgaggtcccagatcctggctgtgcagtcctcgccgcccgtgtacatccagcggccgtcttcgtggaagcccacagacgcgatgttcttgttgacgccgtcgtagctgatgatggggttagggttattggagttgagatcatacatgcggatgtgctggtaacctagggacacaggctgaactgaagcttggctgtgctgaggtcgacccaccagagctcaggagtttagagatcaaggatcacagatacctgcagcagcaatcatgctgcggtccggtgtgacctccaaggcattcacctgctgggactgttaaggaggatgacgggaaggtagccctgaggccagggccccccaggcctccaccatctggccttcacacaggctgtggtccccacacgaggcatcccc

SEQ ID NO: 27704 - DNA, 1314 bp, Artificial sequence
  DNA replication origin
caggtggcgaggagcctagtgggtgggcatggggcgtgtccagcagcagccactccatccagcagcccctcccctctccagcccccagcccaggcaggtcccctcccgggccagcaggccctgcacgcacgtggagtcggggctgaagcgacactgcagggcgtagcgcgtgtgggcagggatcttagtcttggggatgagctgggtcacctcgtcaccaatgccccccgtcagattccagacatagcagtttccctagaggtcaggaggaccgtcacggagggcccaaggcctcaggtctgagacacagggaaggatgccctgggggccaacactgggggccaactgtgcatggggaccccgggtgaggggcaggcaggcccctctggtcctgcctgcagaaggcacctgggaagcctggccccaagcaagggccacacctggcaagccaagaacaggaggccacgcctggccaaggactcaaattctccttcctggaggatgccgatggccaacggaagtagacaggagaagggcaccagctagagagacagcatgacaaaggccagcagaagggaaatccgggggcaagaggtacaagtgatgcactgggattaaatgaagttaatgaaaaaaaatgaggctggagagaagagcaggggccacgccacagcagcctacgggcgaggccagcagccccgggtctcctcaggggaatgacgccacctggctgatactgaccaggcaccactagaagcatccaagagagaacgtgtcaggggccaggggaggtcagggagggggaaaggaagcctcagagagtgtgtcagccgtcaccagaaacaagggtgactgggaccaggaggcaacagagtgaaaagagggaagtggatcgacttgggagagactccagaaagcggagtgaccgacctgcagacaggactaagccatcgggagcgacactaaggcttctggctttgctggcaaggtgggtgttagtgcccgggatggggaaagcaggagggggccgctaagggacatccaggaataagcccacctgcagaggctgagggctgagtgccaagctgcccgcacccagcacctgccaccaggactcacggtgctattgacagctgccatgtagctggcgtcgggatcgatgtgggcggacgtgatggagacctcgggctcagggatcagctgctcgttgtggtctgttttcaagtcccagatgtggatagccccgctctggtcacccacgatgagctctgcctggggtgcaggggtggtgaggcagggcccaagcccagccct

SEQ ID NO: 27705 - DNA, 1393 bp, Artificial sequence
  DNA replication origin
cacaggcgctgcaccaaagcccccgcctgggcggggtccacttcgaggctcccctgcactgccagcagctcctgggtgtggtgggtgtcctggctggggacccaagcctcttggacctgttgagaaggctctggtgggcggtgggacagggctgctccctgctcctggcttggcagggccgggtaccctccaacccccagtgatgtccccaccctcagctcttgtcagcagcctgggcttagggcggagagagcttcctgttccctgaaaccacagctccagcctgtcccgtactgggctgcacacaggaccctttgtctagcccctggcccgggcctgcgcccagcaggacggctcaccttggaggtatccaccagcagccgcagggtctcccgatcactgtcctccatcaggcggaggaagcagacctggtgctcctcagggcggtaacagatgcagccctggggaggcaggggggtgaggcggggccccccagaccgacacctgccagggtgacccctccctgcccactcacgctctgcccgtcgaacagcaccgcccagctgtggttgctctgaggtggggtcactgtgatggtcgccgcgttccgggccacgtccaccaggatggtttggttgggccggggcatgtgggggctcgggagggtcattcgcagcgtctgcagccttggctggcagtgggagttggagttcagccgggcagctgtgcaaccccagcacagcctccagctctgggctgcaggactcctgacacccctgagtgggcccttccaccccttggtcctctggctgtctgctcctaggtggtgtcactgcctgctccgcacccttgctctgctggaggctgggatatgccagcttcccttctccctttccactgtccatgtccctggtgctgaggaggggctcaccttgggagggccctgagcagagccaagaagccctccagccacaacccccacagcggccagcaccagcagcagcagcagcaggagcaggctcacggctctccagcccccgcaggagggcttggtcttcacctgggcgtgcatcagggtcagaagggtcatgagggttagacatcagggagcaagtgggctggggaagggaggggctgggtggcctggggcaccccctgggtccttgctgcaggagtaacgggaggcactcacccctgtaggcccaggtttggggcgctcagcacagcagcttgctggttccatcctgcagcccctgctcacaatgtgccgattgtctgcgtcccttgtctgcagccttggccaggggaaactcagaacagaacccctcccctcctgaccctgcgcctccccctcagctctggatctgatatccaggtcagagccaggacagcc

SEQ ID NO: 27706 - DNA, 1599 bp, Artificial sequence
  DNA replication origin
gactgacaggcattccttggccaacacatgcttgagccgcgctgctggctgcagggcacctggatgacaggcattccttggccaacacatgcttcagccgcgctgccggctgcagggcacagaggctccttcagtggaattttgcctacgacacagagcacagctattaatacacttaaaattcaaatccattgcctgacacagttgttcaaagttaaaaactggtagcagcactgctctgagctccctgcactgcagcccggagttcagtgaaggcgtccacgccatggtagctgctccgtccaaatcacctgggtataaatgcacacttgagacagcagagctttagctgggctgcgtttacagaactgggcagcagccctgggtatctgaaacggaacagacactcagttgtgacatcagagtggttttcaaggaagtaagggaggtgggagagtggtgagggcagcactttgcacccaagggcagggagatgccacctgggagcagccgcctcctccactcccaccctgctgggaggcacagggacacagaaggctccgctggactttcagtcatactgatggggctctggtccatgcaagcctctcccaacagtcagaataatcagtccctctgccccctgaggggctggatccctgaatgagtttttcaataaaatacaggacacacacccctagacccgcctcagtcccatcggcaggccctggttacctgaatcccggacaggtgcagagcctgcccctgccaaccccacccaaggcccagaacccagcccacaacgccttccaagcctaaaagtgcatcttcgattacaagcatctgtaaacaaaatcgtcccccaaacgtgtacttacaaggttaacaatgaatgcctttgcttaactccaattacactctttgaagccacttagccgagcagatgcttaagccccacctattaatttgggtaactggttttcaatttctttttttttattctgcagattaaagacactcaatctttaaccttgaagggcaggcaaaaggtcggctatgctgtcaacatagaagtcagggaccattttcttcttagacacgcagtcactttcctgattattcttcacatcccctagagtggagactccggtgagggtcaggatggtcttcaggccacaggtggcgcctaggaggatgtctgtgtccaggcggtctcccaccatgacggtgcgctcggggttgatgccgtattcctgggacacgcagtcgaaaatgaagcggctgggcttcccgatgatgtcggcctggcgctgggcggccatctccacggctcggaccagacacccggtacctgcggggcacaggggaccgggtcaaagggcagggagggggcccgccgcccgccccccagcctcccgccccagggcgcacggacccgcgatgaagcggccgttctcaagcggaagccggttgtccatgttggtgcccacgagcaggcagccgggctgctgcaggtagcgcagggccttggtgagcttcatgtagctgaagtgcgggtcaaagcccaccaccaccgcgcgcacgtcgggctccagcggc

SEQ ID NO: 27707 - DNA, 852 bp, Artificial sequence
  DNA replication origin
cactgagagccagaatgggtggtctctgagtggggcaaacagaacgaagagcaggttggagcttttggagcttgagggttctggggagctgctggggaggaggaccaggagacaggtgggtgaggtgaagccatggaggaggtgagtgcagagccccaaaagacctccattcatggtgtgctgaggagtaactgagaagccggtatccaggggatttaggggtatggatgggatgattgtcccctctaaactcatgctgaaactttatccccaatgtaacagcattaagaggtgaggccttcagccgccccatccgggagggaggtgggggggtcagccccccgcccagccagccgccccgtccgggaggtgaggggcgcctctgcccggccacccctactgggaagtgaggaacccctctgcccggccaccaccccgtctgggaggtgtgcccaacagctcatttagaacgggccaggatgacaatggcggctttgtagaataggaaggcgggaaaggtggggaaaagattgagaaatcggatggttgccgtgtctgtgtagaaagaggtagacatgggagacttttcattttgttctgtactaagaaaaattcttctgccttgggatcctgttgatctgtgaccttatccccaaccctgtgctctctgaaacatgtgctgtgtccactcagggttgaatggattaagggcggtgcaagatgtgctttgttaaacagatgcttgaaggcagcatgctccttaagagtcatcaccactccctaatctcaagtacccagggacacaaacactgcggaaggctgcagggtcctctgcctaggaaaaccagagac

SEQ ID NO: 27708 - DNA, 1147 bp, Artificial sequence
  DNA replication origin
ccagaaccttcaaggtggagtgagggagtgaagatccctcacacaccccagtggcggctgcgtccacagccagcccccaggaccaggcagctgcccgcaccatgctgacctgcacgtgcgtcctctttgctgacaaccacgtccttgctcacactgaagcggattttctctgtgcagggggtgagagacttgaggtgccgggtcagtgcacccgactcccggaagctctttccacacttggagcacttgtaggggcgctcatctgcagagagaacctagtcagccccgggcagccccagcaggctggcgacaaggtgacaaggcgaaggcaggcaggggcccccgcctcatcccccaaagctggggaatgcgaggctggggcaccccagggccaaccatcggggtgctaccgggctccagcccgaggtgcggccagctcacccgtgtgccgccggtggtgccggatgagtgagcccttggtgcggaaggaggccccacagagcttgcactcgtggtccttgcggctgctgtgagtgaccatgtgggccttgaggatgctgccctgtgggggagggcgtggcagctcagggccctcctgggggaacaggagggggcctgccacccacacactggctccccgcacgccggctcaccgtcttgaaggtcttgtggcacagcgcacacacatagcggccatccttgttcaccagtagcttcacctgggcctgctcaccctcccctgcgagccccagcccctgctggcgggggctgcccggggcctcggccatctcaccgtctcccagctccgcctcagcagccacgatgacctctttgatgtgcccaccacctaggagaagcatctgggcctaagccccaggacctgcccctgtccagagaccccagagactgctggctccaggggaggggacctgctgctctgagccacaccctggacccaacctgcactgagccctcaacacacaggtccgagcaacagccaaggtcccattcacctctccaggtcagagtgagaggtggagagacacctcccgactctgtcaggctgcccagagatgctccagggcccctaaatgtgtccacagggagacccaccatggagcacagatgccccatccccaaagccagg

SEQ ID NO: 27709 - DNA, 1384 bp, Artificial sequence
  DNA replication origin
tgagccaggcaggcgagggctgggcttcccacagggagagcagggccagtgggagcgccatgggggtctgagggtttgcacaaggctcctggcgtgcgtctgccccatggggtgggtgctggatgccaggctgcctggccagcctcctctctctgcctcccctgcagccccccgtctcccaggagctcccctgctccagcgagggcagccgtgagaacctgctgcaccaggccatgcagaactccggcatcgtccttgagcgcgctgctggggaggagggtgccctggagccagctcctgctgccgggtccagtccccagcccctggcagtggcagccccgcagctgccggtactggaagtgcagccgctggagacagtaggtgccagcaccacctgcgggctcctcccagggctggatcccaggggctgtccccacgctggccttcgcctccctgaagtggctttctgcagtgactttgtccattgatctgtttactgccttccctggggccacaagggagcctgccagggtggggcccatggttgtgttcttggtactgccagggcacagcctgccccgggtgctggagaccttcctgtggttccccagcaggtggccagcgaggcctcagcggtgcccaggacccacccatgtcctcagtgcagtgagaccttcccgacagcagccaccctggaggcccacaagaggggccacaccggtaggtgatgggtgggtgtgtggcccatggcagtggatgggctataggtggccggggtgcttctgggtgtccagggtgggtccatagacagcagggagccaggggatctgtgggcaggtggcaggcggcctggcgggcccgcgggtgatgggcttggcctgatgctgtgtgtggctgcagggccgaggccgttcgcctgcgcgcagtgtggcaaggccttccccaaggcctacctgctcaagaagcaccaggaggtgcacgtgcgtgagcgccgcttccgctgtggcgactgcgggaagctctacaagaccattgcccatgtgcgtggccaccggcgcgtccactcagacgagcggccctacccttgtcccaagtgtggcaagcgctacaagactaaggtgggtctctggccgcaggaccctggcgcctgatccccccatcctgctccctggccgtggcccaggtgcacccccttccctgcctccaccatgctcagtcttgacccagcccctcccttgggccacaggcgggaggggagagctgtagtctgttgtggccaaggccaggctggcactgacaggtgtctccacagaacgcacagcaggtgcacttcaggacacacctggaggagaagccgcacgtgtgccagttctgcagccgtggc

SEQ ID NO: 27710 - DNA, 1481 bp, Artificial sequence
  DNA replication origin
tcagacgagcggccctacccttgtcccaagtgtggcaagcgctacaagactaaggtgggtctctggccgcaggaccctggcgcctgatccccccatcctgctccctggccgtggcccaggtgcacccccttccctgcctccaccatgctcagtcttgacccagcccctcccttgggccacaggcgggaggggagagctgtagtctgttgtggccaaggccaggctggcactgacaggtgtctccacagaacgcacagcaggtgcacttcaggacacacctggaggagaagccgcacgtgtgccagttctgcagccgtggcttccgagagaagggctcactggtgcggcacgtgcgacaccacacaggcgagaagccgttcaagtgctacaagtgcggccgtggcttcgccgagcacggcacgctgaaccggcacctgcgcaccaaaggtctgggccggtggaggtgggagggggaggggagggggccggggcttgcctagccctgaccgagtccccacccacagggggctgcctgctggaggtggaggagttgctggtgtctgaggacagccccgcggcagccaccaccgtcctcacggaagacccgcacacagtgttggtggagttctcgtccgtggtagctgacacccaggagtatatcatcgaggtgggtgtggggccctggggccgtgctgggacccaggggcagccaaggctgacctctgtccttctgcccatctgcccaggccactgcggacgatgcggagaccagtgaggccacggagatcatcgagggcacccagacagaggtgaggggtagggcaggcgggggcggggaggctccctggcacagccgctcttgctgagccgtggccctgcaggtggacagccacatcatgaaggtggtgcagcagatcgtgcaccaggctagcgccggccaccagatcatcgtgcagaacgtcaccatggacgaggagacggcgctgggcccagaggcggctgccgccgacaccatcaccatcgccacccccgagagcctgacagagcaggtggccatgacgctggcctcggccatcagcgagggcactgtgcttgccgcccgggcagggacaagtggcactgaacaggccactgtgaccatggtgtcatcagaggacatcgagatcctggagcatgcaggcgagctggtcatcgcctcgccggagggccagctggaggtgcagacggtcatcgtctagcatgaggtctgcggggtcctggccgggcagggacagggcagaggactctgagcgccccacccatgcctgcctggcctggtagagaagatggcacaggatggaggcgccccaagacggacagtgtacataagagtttcttgttgctttacaataaaacatgagaacctgcagcttgtgatgttgtggcagtggcagcctccgcggctggtgccaccacctttgcccaggcccccgcagcagcac

SEQ ID NO: 27711 - DNA, 1179 bp, Artificial sequence
  DNA replication origin
ggtgtcatcagaggacatcgagatcctggagcatgcaggcgagctggtcatcgcctcgccggagggccagctggaggtgcagacggtcatcgtctagcatgaggtctgcggggtcctggccgggcagggacagggcagaggactctgagcgccccacccatgcctgcctggcctggtagagaagatggcacaggatggaggcgccccaagacggacagtgtacataagagtttcttgttgctttacaataaaacatgagaacctgcagcttgtgatgttgtggcagtggcagcctccgcggctggtgccaccacctttgcccaggcccccgcagcagcacctgcctcccaggccactcctagactcacgtgcctggccgccccacccaggggcttctgccagccctggcggcgccttggtgctgtgtgggtgtcattggcatgttgaccaacagcctcctgccctgcccagctggagctgtgcccccagctgcgctgcctgaggcctgtgggtgggtgggaggaccagggacggggacagggagatctgggagcctcggcctccaccgcagggtgagcaggtggagcagcagcaggagatgctgggtagggagtgtggctggtcctacctgcgctgccttgctttccctgaagggattctgctcagggaggcagagtctaggcgacctaatttctaggggcgaggacaagaacacagccgcaccgggatgtggctgaccgtctacctccctcctagggggctggcaggggcttctgggacggttttgggacaggtctggggcaccagaaccggctcaggcaggtctcccaccccttaccctgggggtctccatgggaatgaaagccaggagttcatcaggcacccagctgagtcgagggggcgggacccagtgcagcccggcccctccctggcccaggacctcaaataccggcccctgccttggtgccagagctactgccagagggagtcagtgcagtcctgtgtcggacacgcccgcagcctggacccgggatccccatccccctaggatctctgagcctcgggcctctgcacccacatccaaggtgagtctctcggctgccctgagctggggctggatgggccggaccctccattccggctgcagcttcccgcgcagtgagaaggcagcggtccctg

SEQ ID NO: 27712 - DNA, 1241 bp, Artificial sequence
  DNA replication origin
tgttgagatatattcaaatatgctacagaaatgatcccttcagaaactcagtttttacaaaaattagtgggcatagtggtgggtccctgtaatcccagctatttgggaggctgaggagggagaatcgcttgaacccaggaggcacaggttgcagtgatcggagattgcgccactgcactccagtctggcgactggagagcaagactacatctccaaaaaaaaaaaaaaaaaaaaaaaaagtcagtttgaagttggtcttagtttgtccctctcaagtttgtagagagagcccaggcagctccctcagcccagacagagaggacggaaccaagttcagaggcaccaggagcctggagtcctgaagctgtgcaaagttgggcacagccctgagtctggggggttggggagggcaggggctgtgacttacttgcggagggggagggcctcctctcaggagccacagcagggactgctgcaccgggaggtccaggtcagcatgtcctggaagcagaactgctggcgcctaggcgtgccctctcggtgccctcagctcggcctcctgtctggagggagcgcacaggcttctcttccaaaagtactttttctatcctttccagtgggttttaccaagggttctgacgggcgggtaggtacgaggttctgtgccacatgggagtgttaacaaacgtaattttattccaaaagattccaattcttttccacttccaattgaataacttagataacagctcatatccccgccaactttatttttatttatttatttattttgagacggaatcttgctctgtggcccaagctggagtgcagtggcacaatctcggctcactgcagcctccacctcccagattccagcgattcttctgcctcagcctcccaggcataggcacgcaccaccacgcccagctaatttttttcttttgtatttttcagtacagatagggtttcatcatgttggccaggctgatctcgaactcctgacctcaggtgatccgcccgcctctgcctcttaaagtgctaggattacaggcgtgagccaccgcgcccggcctccgccaactttaaaaacagaaacttttatctcatgacgaacgaacccaggtagagcggcaaggttctgtttcgaaacttgggttctaaacacaaaccgagcgtcgacagacgtggttctccgacagcaccccgcgagcgcggacccccgcgggtcctgaccccacgcc

SEQ ID NO: 27713 - DNA, 1799 bp, Artificial sequence
  DNA replication origin
ccctgcgaaggcagcgtgggggagcccgttagttcccggtcctggccccggccccggcccgatccctgcccaccccgggtttcgcacccgcgcggagcagaacgcgcgccgggactcgcacagaagccaccagcgccatcttgaccgcaacgcgcgggataaaggtcgcgggctgagctcgcctcctggggagggggcggagcccccccaactaggtcccgccccgttcccagaggctggtcaacgcctccacctaccggccgaaacagccgctcgccgccctccggcttcaccccgggcagccgcgcgcttccggggcaggcacctggatctgggccagggctggcctacaaggaggcgcaggcccactgctgaagcagccacgaccagctcagcgccagggcaggctcttctacagcgcgggacactgtaggcaagaggctgccggtgttcgtgaccgcgagctctcggccgggcccagctactgcagtatcggcgctggaaaggcgatcaaagcacggaacccctcccgagggggccgtcagggaggccaggggctgcctggggtgagcccggcctcctgcccctttgggaacaggatcagagctgcaggtttagtcaccgaaatgggggtgggggcagcagaacccagcggtaagaacaggccacccgccttgctcagcacaagggcaagtgcacaaaggccggaccgcagtggcacctttttatttgcagagaaatgccgaaagataagaatacagtctgttcccgctgggccgtaagcggcagctcgggagtgggcctttgtactgtctggtgtggggttttggtcagaccactgggagcactgggcagtaaggtcccagctgtgttgggtggtctcaacttttgttctcatcttaagcatttccaattcttccttgtgtcccaaaccaatttttgaggtggaaaaatggccacttaacggaggaggaagcaagcctggcatggtgacacacacctgtaaccccagtgactcaggaccagctgggtaacatagcaacaacttgttgctacaaaaaattcttaaaaattagctcctgctgctgggcgcggtggctcatgcctgtaatcccagcactttgggggccaaggtgggcaaatcatgaggtcaggagtttgagaccagccgggccaatatgatgaaacgccgtctctactagaaatacaaaaaattagctgggcatggtggcaggtgcctgtaattccagctactcaggaggctgaggcaggaaaatcacttgaacccaggaggcagaggttgtagtgagccaatattgcgccactgcactccaacccaggcaacagagactgtctcaaaaaaaaaattaaaaaattaaaaaaaaattagcccctgctactctggacactgaagaaggagttggaggctgtaatgagctatgatcgcaccatggtacatactccagcctgggtgacagagcgagagtctgtctgaaaacacacacacattccaaggtggcgataaaaccatctccttctatttgtccaccctaggagcaacctggtccccacagcacacaaaccctaggttctcctggctgaaagcatcggaggtgccactgcggatggtgaggaacagaaagttactaggggcgaggggacaagtgagaaggcagtgaacccagaactagatttgcattccgatcttgggtttattcaacacaattcttccactctacacaacaaagtacaaacacaatgtcatctaaaatgctacaaaggtataaaactcaaaagag

SEQ ID NO: 27714 - DNA, 1271 bp, Artificial sequence
  DNA replication origin
gcctggggcagctccctttccaaaaggacactgcccagcaacagcaagggcacggcctggccaccatcccaggtcatcggggaagggaaaagtgtgctcccaggtaagcagggtcaaaccacccccaagagcctcacttttccctggtggctctgccactgaactgactcttagaaaccggaaacggatgagctttctagccagaaaaccggagggaatcttgacaggcacacagcatccaaaccaacagcacttctgcagccggggcccggctggcagaggggtgctgcctgctgcctgcaaatcctgccagagtcaagggtttgctttcctactggtcttcctttggctagaaaagtgacaaaactgagctgggtggggtataagttacaggggcgagagcttcagtggcctgtttatcgggaggagttggagctggagcggctcctgtggcggcggcggcccggggaccgtgatctccggcgcacgggggacctgcgcctcggggagcgggacctgcgggaagaggagaaaccacatcagagtagctcaggctgtaggggcaagctagcttctttctgggcaattccccatagttttactttttgagatggaatatcactctgtctccaggccagagtgcagtggcacgatctcagctcactgcaacctctgcctccagggttcaagcgattctcctgcctcagcctcccatgcaactgggactacaggcgcgcgccaccacgcccagctaatttttgtgtgtgtatatatttattttgagatggggtctcactctgttgcccaggctgagtgcagaggcgcaatctcggcctcccaggttcatgccattctcctgcctcagcctcccgagtaactgggactacaggcacacgccaccacgcacagctaattttgttttgttttttttagtagtgacggggtttcaccgtgttagccaggatggtctcgatctcctgacctcgtgttccgcccacctcggcctcccaaagtgctgggattacaggcgtgagccaccatgctaggcctaatttttatattttttgtacggatggggtttcaccatgttggccaggatggtctcgacctcctgaccttgtgatccacccacctcagcctcccaaagtgctgggattacaggcgattgctaccacacgtggcaaagttttacctttttttttttttttttttgagatggagtctcactctgttgcccaggctggagtgcagtggcatgatcttggctcact

SEQ ID NO: 27715 - DNA, 941 bp, Artificial sequence
  DNA replication origin
actgcatccgtgtttcgggggctgcccggcaggcccggcaggacgcctcgtgaagccggtccactcctcagccccgcagtgcggcggtggcctggcagcgcggtgcgggctccgagaagaaagagtgtggcccggggcgggcggagtgggaggtgtcgaggccgtggcccggaagtggtcggggccgctgcggacggaagggcgcctgtgcttcgtccgctcggcggtggcccagccaggcccgcgggactcagaccagcggggagcgcggcctccgcccttggggccctcccgccgggccggagacccaagcccccaacgccaggccctgccctggaagcgctcgcggcccggcgcctggacgggggagttgtgagtgaacgcggacgggtagcggcgaggtcggcgtgtcgggccggtgtcggcgggcgcggagtttctttgtgggatgcggtggaaggtcggccgatccccccttcggagtcattaattcaaacgtgtactccgcgaacgtttcccggactcccgtgtgcaattatcggcgctaggccgtggggatacggcccactatggaccgagcacggtggccgagctcagtttgatgggttaccccagaggggcggatacgggaaggttaagtttgttggaggagaaacgtggagtaggctttttgtcttgattccgcatgaactgtgcctgaaatgtacttttaaatggggaaggtgctctgaagatttgtgccgaaacgccctctcctcgagatttaactaattgttctctcctctctctggctgttggacgcgcacctttccggaggatgggggaggtaaccgaggtcctgagccggtacctgaacttgggtgaacagagaacctcaacttttgctttctagcactcgaccgcacccagcaaggcgtccgcttactcagtggttcttagtg

SEQ ID NO: 27716 - DNA, 1745 bp, Artificial sequence
  DNA replication origin
cggtggaggcggggctccgggccgggctgtgctgaggccggcggggtggtagcacaggaggggttcgcaggctctgcggccgtgcgtggcggggcgtgggggcccgcagggcggaagtagctcggagagacgggctggggcagggcgtgcgttcgtgcggtcaaaatccactggtggcgtttggggtgttcccgtggacgcggcctcccggcaggcggacctccaccgggtgggcgcggcaggcgggctgtgcgggcaggaagagcgacgagcttgagagtgggagatggggtgcaacggcgggcctctccggggaggtgacactgccgctgagacccgaatggaagggcgcgcccggcgggggaacagcaggcgccgaggttcgctggaagcagggaagggaggcccgggtaccggctcgcaggcccgcgcgagcttcgcggcagcggcacggagcgtgtgaacggcgcagcgccgaggcttcatccatcggccggtgcagggtccgggcagggagcactgtcgaccagggtccgaccctgggagagtccagaggtggcgcctctggcagggacagaggagggggtgacgctgtaggggtgcaggcaggaggctccgcgtcaactccccacactgacggggcggatttttttttttttttgacagagtctcgcactgttgcccaggctggagtgcagcggcgcgatctcggctcactgcaacctccgcctcccgggttcaagcgattctcctgcctcagcctcccgagtagctgggattacaggcgcacactaccacacccggctaattttttttgtatttttctggtagagacagggtttcactatgttggccagactggtcgagaactcctgacctcgtgatccgctcctaggttcgccttggcctcccaaagtgctcgctcctgggcgtcccaaagtgctgggattacaggcgtgagccaccgcccccggccgagggcgggttttgttctctgctgtgcctgtcaggcagtcgttgccctgtggttatttgtggagggattgacggtgcgctgagcttcagactttgtctgaacagcttcgtggcagcaaggaagggagaagggaacagatccaagccgatctttgggaggagagaaccagcatgacttggagactttagatgtcagagcaaaggacagggtgcagcttggtgacccggagtgggtgggtgggtgaatggatggatagatagtggggatgtggtctgccatcactgccctcttccctgtgtgggaagccagctcttggtgacttcctgccgagacccactccctctggccctgtccgagggtgtcaagtgtgcccttgacccttcaccctgggctaagggatgtccaaggagttggggacaaaggcagctaggaggaggagctacctcccgagtctgctgcagtaagtcaccagtgtgttcctgtgggtggaggctggcaggcccatcagtctggtttgggtacccgttggatttgggtttgatgacatgtaaagtgagttagagtctctgcattactgtcacacctgctgtgcccaggcatggaagattaagtggaacagaggggccgcccccctgctgaaggggccccagagtcggcgctaggggagggggcagcctcggtggtccaggcaggcataggcggaattctctgaggtggcattggagtccagtggtcagaggtgctaaaaggccccaaacctagagcccat

SEQ ID NO: 27717 - DNA, 864 bp, Artificial sequence
  DNA replication origin
tcccgcgtgaaggcacgcacgtcgaaggccttaaacaccacctgcggcggcacagggaggcgctgctgtgcatgccaagctgagaggagctcacgggtagggaaggggtgagaggagcatttggaggtcctcagacccctcccggtcagctggcccatgtccatcagccccacaggccacgtctggcccccgcggtggctttcagccccaggaccctctctgtcccagtttcccctcgtccccttgcacccggagctgtaaccaggatggctgctccgggtgctgcccatgcatggagggtaaaggctgagggtgcagggaggaggcgagggggcagccgccaggggattccagctgtcctccctgagtcgggccgagctgccggcctaggggctgcccagctggttccggttctgcacaggggtcccagggcaagccctctgcggtctgcaggggaacggatccagcaccctccggcgctcaccagcagcagcagactggggatgaggaaggagatgaggtcccacagcagagcagagagccagaaactggccacgtggactccactcacaaactgcacatgcttggcctgcacggccctctcgctgaccgccaggatggagaacgtgctggccaagaatgccatggcgaagagcaggttgagggcaatgtcgaatcccttccggcccctgcgggggacagagaaggtcagggacggagcacagcacgtctgggtggcaggagaggtcgggttctcggttatgaccgcccaaggcatgcagggcagcagcccaaccactaaaggggcttatgggagagcacaagcaccatggttccataccgggaacatctgcccccaccgga

SEQ ID NO: 27718 - DNA, 1595 bp, Artificial sequence
  DNA replication origin
gagtgccgccgggacccgccgctcgcgcgctcgttcccggggcttgcggtccccacccgggtccgcccttcccaccctcgccggccagctcgggcctcgggccccccccagctccggcctggcctgcgggcccctcccgcgaccccgcatcccctccggccgcgcccgcgcccgcccctcctgccgcggcctcggctccgggcgctccctgcaggtgccgctccctcagcgtcggctcccatccgagccttgggcgtgtcccgcactgcgggcagtgcctgagcccgcgccgcgcggggaagctcgaccctgcggagactcggcacggcccgggccctctgtgtgcgcccagaaggtggatatgtagcgaccgacagccccggccccgagggatgcaggcgtccgccgcgcacttgcggagatggcgccgctttccggccgcagggatgccgggcgcgcggtggcaaagccgcccgggttggattccgcctgctcccaccctctggttccgaggagcctccaaatccgaatccaaggcccacggtccgcggcgggcgtttgctgcgccctccactgtgtgggaacgggaaaggggagccgctagtccaggcggaggggcttgtggcagtcgccggaggccgcgttctcggcgccctcggtcaggacgcctgtgtgcatcgcgtccgtgtgtcttggctctgttccaagccggctccacgcttcagaagggccgggacggccttatggtcaggggcgtggggaaggcgcttggtgtctgtcgcacagatgaagccatgtcctcagggggtaattgccgcttgttctccgggttacgtcctggactgtgcactccgggaaggcgtcgattggatcttgttggggtttgtgttcctggaactccagaaatgcccgctgagtgagtagccgagaccccgcgacagcatggagcccaggcagggagcacgtgggagaggttcactcttctcctgggcatcccgtcattttattcagatagtctgggcgctgccttttgtaaacttgaaaagactaagactgttttagaaagtttgcctcatgagaaatgtaagagaaagggaaaaatagataaaaatggatgtcatgggaatctcccccacactttcatttttaacttcttagataatttttcttttaaattgaacctttgctaactctacctgaaaaacaggacgacgtctctcccttcctaaagtgacttaccaccattctgaccagacaggcttttggaacaggagagggtagcacgagttgtttctaaaaagatgttagccttccatctgcatgagccaggcagtctcatgggagcccattttgacgtagtctcaactgggaaggcccaggtaagatccctagtttgccatttcttccccagccctgcttccggagactgtggaatctattgaggggaagcattctggaactttggggacggctctgacggggaaggccttgtgcacaatggaaagatgaattggaagccgggctaagtggctcacacctgtaatcccagcactttgggaggcagaggcgggcggatcacttgagttcaggagttc

SEQ ID NO: 27719 - DNA, 792 bp, Artificial sequence
  DNA replication origin
cctcacggagcgagcggaacggggtcacctggagggagtgtccagggcgggggccctgcagggagtcgcctgcagggagggtcccgggcgtgtcacattaggcggtcccagggacgggtcgcggtctaacgggacgggagtggggaggtgggtcggggtgtccctgggccggaccgggtcgtgggactgggtcgccccaggcaggagagcctgggaggggcgggcccccttggcgtggcagggagaggtggagtgagggactcccgggctccagcatgagggcgggcgccgcgcggggccgacagttgccgcgggccggggccaatgggtccccgagcgccgccagcggccggaccacagtgaggtgcgtccgtggtcccggcgccccgggtgagggagggctgctgccggtcctgccgctgggagccgcctgcgacccgcaccgccagccccgcgcccagccagccgccggcaccacgacccgacggccccgacctaatgcaacgccccgggccgggggcggaaatcgcccacccccaagagtcctgatggagtagggtttgagcggctcgttccccattttactgtgtacatagcacctttcactctgatgatgttctggatagcccattccgcgagcaaagggacttcgtcaggttcatgcctagatccagggtcctagagtgcctggggcggaggaggctcatgctaaataatttgttcagtggaatcacagagacctggcttcagatcttgacccaccaattaatgtagacatgtcattttatcttt

SEQ ID NO: 27720 - DNA, 916 bp, Artificial sequence
  DNA replication origin
cgtctgggaagtgaggagcgtctccgcctggccgcccatcatctgggatgtgaggagcccctctgcctggctgcccagtctggaaagtgaggagcgtctctgcccagccgccatcccatctaggaagtgaggagcgcctcttcccggccgccatcccatctaggaagtgaggagcgtctctgcccggccgcccattgtctgagatgtggggagcacctctgccctgccacctcgtccgggatgtgaggagcatctctgcccggccgccccgtctgagaagtgaggagaccctctgcctggcaaccgccccgtccgagaagtgaggagcccctccgcccagcagccaccccgtctgggaagtgaggagtgtctccgcccggcagccacctcgtccgggagggaggtgggggggtcagccccccgcccggccagccgccccgtccgggaggtgaggggcgcctctgcccggctggccctactgggaagtgaggagcccctctgcccggccaccaccccgtctgggagatgtacccaagagctcattgagaacgggccatgatgacaatggcggttttgtggaatagaaaggcgggaaaggtggggaaaagattgagaaatcggatggttgccgtgtctgtgtagaaagaggtagacatgggagacttttcattttgttctgtactaagaaaaattcttctgccttgggatcctgttgatctgtgaccttacccccaaccctgtgctcgctgaaacatgtgctgtgtccactcagggttgaatggattaagggcggtgcaagatgtgctttgttaaacagatgcttgaaggcagcatgctccttaagagtcatcaccactccctaatctcaagtacccagggacacaaacactgcggaaggccgcagggtcctctgcct

SEQ ID NO: 27721 - DNA, 1259 bp, Artificial sequence
  DNA replication origin
aggagcatgctgccttcaagcatctgtttaacaaagcacatcttgcaccgcccttaatccattcaaccctgagtggacacagcacatgtttcagcgagcacagggttgggggtaaggtcacagatcaacaggatcccaaggcagaagaatttttcttagtacagaacaaaatgaaaagtctcccatgtctacctctttctacacagacacggcaaccatccgatttctcaatcttttccccacctttcccgcctttctattccacaaaaccgccattgtcatcatggcccgttctcaatgagctcttgggtacatctcccagacggggtggtggccgggcagaggggctcctcacttcccagtagggccagccgggcagaggcgcccctcacctcccggacggggcggctggccgggcggggggctgacccccccacctccctcccggacgaggtggctgccgggcggagacactcctcacttcccagacggggtggctgctgggcggaggggctcctcacttctcggacggggcggttgccaggcagagggtctcctcacttctcagacggggcggccgggcagagatgctcctcacatcccggacgaggtggcagggcagaggtgctccccacatctcagacaatgggcggccgggcagagacgctcctcacttcctagatgggatggcggccgggaagaggcgctcctcacttcctagatgggatggcggctgggcagagacgctcctcactttccagactgggcagccaggcagaggggctcctcacatcccagatgatgggcggccaggcggagacgctcctcacttcccagacggggtggcggccgggcagaggctgcaatctcggcactttggggggccaaggcaggcggctgggaggtggagattgtagcgagctgagatcacgccactgcactccagcctgggcaccactgagcactgagtgaaccagactccgtctgcaatcccggcacctcgggaggccgaggctggcggatcactcccggttaggagctggagaccagcccggccaacacagcgaaaccccgtctccaccaaaaaaatacgaaaacccgtcaggcatggcggcgcgcgcctgcaatcgcaggcactcggcaggctgaggcaggagaaccaggcagggaggttgcagtgagccgagatggcagcagtacagtccagcttcggctcggcatgagagggagaccctggaaagagagggagagggagaccg

SEQ ID NO: 27722 - DNA, 1387 bp, Artificial sequence
  DNA replication origin
ggcaggcggctgggaggtggagattgtagcgagctgagatcacgccactgcactccagcctgggcaccactgagcactgagtgaaccagactccgtctgcaatcccggcacctcgggaggccgaggctggcggatcactcccggttaggagctggagaccagcccggccaacacagcgaaaccccgtctccaccaaaaaaatacgaaaacccgtcaggcatggcggcgcgcgcctgcaatcgcaggcactcggcaggctgaggcaggagaaccaggcagggaggttgcagtgagccgagatggcagcagtacagtccagcttcggctcggcatgagagggagaccctggaaagagagggagagggagaccgtggggagggggaggaggagggagagggagagggagagggagagcgagagcgagagcgagagctcaacccctacattttacagatgggaaaactgagaccctattctgtttgttgaagattgttttgggtattgtagatccttgacattatcatgtaaattttaaaataaacttatcaatttcttaaaaaaaaaaaaaaaagaacctgatggaaatgctgtttcatttgtaacgatgtaccaccctaatgcaagatgttaaaaacagggaaatggggctgggcactgtggctcacacctgtaataacagcattttgggaggccgaggcgggcagatcacctgaggtcaagaaattgagaccatcctggccaacatggtgaaaccctgtctctattaaaaatacaaaaattagctgggcgtggtgtctcacgcgtgtaatcctagctactcaggaggctgaggcaggagaatcgcttgaacccaggaggcggaggttgcagtgagccaaaattgcaccattgcactccagcctggcaacagagagagactccgtctaaaaaagaaaaaaaaaaaatagggaaatgagggtgggagatgtgtatataggaaactctctgaactttctgctcatggaggtagatgccccagccccagtcaagccttcaagggactgcagccctggctaatagcttaaccgcagcctcatgagaaatcttaatatagaaacacctagctaagccactctcaaattctagacccccagaaactgtgtgagataataacttttactgttgttttaagctactaacttttgggataatctgtgtcacagcattagataacaaatacaccatgttttacagaaccatactgaaggaaaaaagtcaatttcctgggttattttggtgtgacaaattcttagtagaatgatggcccaaagcctttgactagaaatagtttcctggcacattgacactttgctgccaaccaaacacatctttttgcctagagcagggg

SEQ ID NO: 27723 - DNA, 1467 bp, Artificial sequence
  DNA replication origin
ccgccgccggccccgcccatgtcccgccctgtgctcgcctcatttaccgccctccacgccctccccgcctgctccgggacccgccattggccgcgccaggacgcgaattcgaacattggccgctgattggtggaacccgcgtggccgccccgcctccccaacggggctggggtcccgtaggagcgcttcccggccggcgggcaggggtttgtgggcgtcccctcccggccgcatgggttcgggcttcgccgctgaccccggcgaccggcatctgcggtgccagatgggctgcgaaggcgcacgcctgcggccaggggaaagaggactccttggcgtccctcgcagtcgcggccgtgatccagcctgggacagcctcgacgtggcgcttctaagacgaggccgtgccctgcccgggtcccggggtcgctcctgggcccgcgaccctcacccccagcttgcacggccttcccttccgccgcctgcttcaggtggagacccttgggtttgtggctgagccgctgctgggcggggatgctggccgggatcgtggtagagaaagaggaggtcggagctgacgctgggaagtctcccccgcggaacgctgaccccttcttcccgcgaaacgtggcgcaccctggacgcctcagtgctccagccccggggcaagccctccccatcactttggccagatgctgccccctgtctggcctcctcggctgctacctggagctgctcgccgcgggaagtgtcgtatctgctcactcttgtcttgggcagtgcccatctgagctgtccttcaggagtcagccacaccgcaccccttttacggcacaggctgtcaaggggaagactcgcagcctcctgactgtctggtggaggacagagggggcttttcctggggaaggcaggggcctgggccaaggctgcccacccctccctcacgcttccctcagtctgcacccttccatccttccgggtccccatagaactccttcaagtactgggcctgccctgggcacacagacaggagccctggcgtgcaggcttcagccggcctggggcaagagacagagtaaacaggtgatcacagcacagggtacagaagagtccgtggccccagagagggtctggaagttgggaatattccctgtcccggaatcaggaagcgggtgaaggagggtgaagagaggacaggctgagcgagtttggggcctgctccccagatgtcccatgttctcagcccccagatttattatccccttatctcacttttgtcctcctgggttactgtttcctactttgtcactgttacctgtctccccctagggcagaggtgcactttcagggttagcttccatagcatcttgaagggattaatcaactagagccagccatgagcacattagccacaccagctgcctctagaatctagaacagcatccttggtccctaggttgttgtttagct

SEQ ID NO: 27724 - DNA, 1313 bp, Artificial sequence
  DNA replication origin
gagggctacgcgcgctccggccggggcgcgggcgcgctctcaggcgggctccggcggcagcgacgcgagcgcggcgatggggagcggcggcggtgagtgcggggcgatgtccgctggtttctgccccacaccccttctgcctgccctgcggggcggacggtgggtcccgcgggaggggaggccctggcggcctgaagagggctggctcgagctctttaacccggggcggatgtcgcgtcccgcgcagggagccccggcggccgggcgcgcggtttaaatgcccggcgggcgcccgagcccctcggagccttcccccgcggcgacgttttccggccctttcctggggcaacgatcgggtcccggggcagcgatccggcgatcgggtcccggggcggcgatcgggtctcggggagccaaacaccagcgcctcctggtcggggaaagggctgcggagcgcgtgggggcgaagcgatcccgcagcccggccgggccctgaccgagcctcagtccagcggggccgtggacctagctctgtggaaagcagcgttcggccccgcgcgcgttgaggcacaggaaacacgaactgtggtttcagctattatcatagtatctgtcctggagccggagaatgaggaatattttatggagaggtctatagaatctttgagaattcgtcgccctggaatacgtttggcttttgcagctgatttaattgctaacaggaagaccccggtcaagagaggggagccgggagcaatcgctaggaagtcctagcaaggcggggagggatttgggcccacagaggggagtggcgcttcctttcaggactggaaggaaggatggatagaaaggtagatttgtagatggggaggcaggatcctgaggttcctgtctgagggcttctgtttccctgtgaaataagggctaaggtcatctgcttagagtgaggaaggggttgctggagtaggagttggaaaatccggctgtgggaagaggagagagcacatctgagaagcatgtccgggctgcctgcctggtgggtggaatgcccgtctcacctttaatgattgcatctgtacacaaacctacaggtctaggtttgtgttgggacctgagcaacaaccttactgcgtagctgtcaactccgcattctacaatagagggcacactgagactctgcagagctgagacttggacgcacactgccccggcctccaagtctgtggcttctctccagggccgacccttctaatttggacttgaaaaccagactcttcaagcccacagatctttattgaacattatgcaccttg

SEQ ID NO: 27725 - DNA, 1531 bp, Artificial sequence
  DNA replication origin
gctgcagttgggatcagccaggacacggcccccgactgctctgctcttctgcctcttggtcacctcagatgttacagaggacttgaagttttttctggctagcctatctgggaaaattctttttgcataaagtgtgtcaggatggcattgaggggctggagtaagatttttgttttgcaggtgaacctaaataatggtgggaatctcttgtttttttaataccttctgttttaagtttttcttttgttttcatcttggaagaaggaaatttagaaataagacaggaaaagaatggcccagaaattcagcacaaagagaggtgttcacattgacgccatctgtgggtcacatacgaacgcctctgggacagagctctaaaacgagtcacgtgtcgtagggagtgggcctgtggccaaggcagtcctcgcagtgtgcagggacgcaggcccccttaccatggaagccccacccagaaggaagtgggtgccccatgcaggccgaggtggatgaggggacagtggtgtgctcacagctgtcagctccccactgaagccccaaaccagcagatgtgggcaggggctcaagtggtgtctgactacccaggtcacacgtgccttaagcgtgaaagctgtcagctcccggcacggggctctggtggggctgggaacaccaggacacacatgggctgaagcttccagagacagtgagacacggaagggacagagaggtgccctccacacagtgtggccaactgcttccaggctaaactttccaaagagagggatctgagctcttcaccctcatttcaacattctgatggcttgcacgggactcccgcggagacagaaacttggtggccgcaagtcatcctctctgctctctgcgcaaaggcctccatggtctatgcagcgttcctatgctatgctcccacccttcgcctccagccccctcagtacacatccactgcggcaaatgtgctgacacacttacagcctcacaaggcccaggttcatgtcctcctcctcactgtgtatgcataggtttatccgcttcacctgttgctggggaacactgctctccgggggacttgggggacgacactgtaaacatgacttcctggcctgatggtggcagggctgtgtgtgcgagtcactgtccagggacagcactgaggtaggttggggcagggcccccaagccaccgtccacggagcttgtgggacttgcggtgctgacggaggagtaccctgaggtcgtgacgtccttccctggctcccggctggtgcggaccaggggtttgggtccaggggttgcagggatctgggtgtccagcgccagtgcctgtgggtcctggggtcccttgtcctctggacaagcctcctcatcactggattcctggcagcaatgctgttctgggttcaggtagaccacggtgacatcgaggatgccgctgggagctgtcactgcaggaaggttggtggggagggaagtcatgtcacacccaagcatcaggggagaccccctgccaggtc

SEQ ID NO: 27726 - DNA, 921 bp, Artificial sequence
  DNA replication origin
gtcacaggccaagtgctgctgaggcctcggcggtgtacacagcacagcaggggggcgggggtacagggccttcggtgatgcgggggacacctgagggaggaagtgaggaaggcagcagggccccatgtagttggtgttaacaagaataaacaattagggggcaagaaatcccaggcggtagctgaaagaaaaacagagcctggggttgctgtttaaagatgggacaggtgagtccattccatagtcgttaatgggaaggtgccatcgcagaggggaaggagggcacaaagggagttgtcagggaggttgggacccaggcagctctggcccagcgctccgggtgggcccctccatcagcggtgggggagggtgacggtggccctgcctccctggagattctctgtgaaggaggaggcagggaaatgctcagtcagcaggtgggtgatgcaggaacccacccaccacaggcaggcggggccaggtccccctggagtggtttcctccttcaggtgcaagctgggagaaagcagagaactgactccatgcagagttgggattaagagcccctggacaaggggccgaggcagtgaaggacgtccatcactcatctgccactatcctcctcacatttaatcctcacaacacccctgtgaggtaggtatcattgccccccttacagatgaggaaactgaggctcacacatgcccaggggcacacagtcgacaggacgggtctacagttccaacgcttgggttctcaccccgaccacaccccacccagggtggccagaattcccttatagtagcaaaaagacagctgccgcggacatgaacacacatagcaccagcacacataaaagcagcagctcagtgagcatctcccatccctgggtttccggttcaagagcatttgggggccagg

SEQ ID NO: 27727 - DNA, 1211 bp, Artificial sequence
  DNA replication origin
gtccggggtccgcgtaccaggcatgcagcagccgacggcaaacgcgcaggctctgctccaattgcaattgtcgctgtgcgcaggcgtccagggcgccctgcagctcggccaccagcctgggggacgcaccggcggctcagcacctcggccagcgtcgggcctcgggccccgcgcctggctaccggcccgcccgcatcctcccaccccctcctgccgcgcaggcctcaccggcgcgagcagcccgccggcagcatgaaggcggcggcgtctccttgcaatttgccgcctctgaagagccacgccccttccgggagggaaggccgccccttcccggccgggctgcccaatcctgaaccggggctcaggggccgcccccgaagctttctctccctccttgcgggcaagcctcaagccccgcccactcctgcctcccaggtctgacggggactccggctcggagctgggcccccgaggccgccagggaggtgactgcgggcgacgccgggattttggtttgggtaactgggtagatgggggcgccattatcgcgcttctcttgcagggggccggtgaaggttatacgagaggctccatctgtccttattgaaagtgctcttaacgcagggaccagccgtcttgctgacgcctgggccaccgagcacagggacaggacggggttgctggaggtgaggattccgcgtgtcaggggcggggatgaaggaggagaaagtgttcacttttggacatgtgacgtgatagcactgggcagaggggaggaagctcagaccttggagcagtgggccaggcgaggtggcccctggtggggcaggggacgggtagggacagatcacggggcccacgcaatggccagggaggtggaggagcagtaggacagtgtcacagaggcaacaggaggctgtcacgggagggagtgggtcacaggccaagtgctgctgaggcctcggcggtgtacacagcacagcaggggggcgggggtacagggccttcggtgatgcgggggacacctgagggaggaagtgaggaaggcagcagggccccatgtagttggtgttaacaagaataaacaattagggggcaagaaatcccaggcggtagctgaaagaaaaacagagcctggggttgctgtttaaagatgggacaggtgagtccattccatagtcgttaatgggaaggtgccatcgcagagggga

SEQ ID NO: 27728 - DNA, 950 bp, Artificial sequence
  DNA replication origin
ggggccctgtgagcggggccctgtgagcagatcccacgccctccagagcccatctggagcctctggcctgggcaaataaggggacagccacagagaagagaggaggacaggctccagtacttccctgacctgatggtgccaacctggacaccaccacacagctgcttcattctgccagcttctgagcatgagcctcaggggtatgccacagggctcgatgccctgccttccctgtcaccccaaatcccaggctccttgctagccagggtctgaggaggcagagacagaagtccctccagtgagggtccgggaaacctaccccttctccttgagtgtgaaggcttctggggcctgaggagcagcggatggggccatttgctggtccctgaggcccgccccaggcctgggggttcgggctcccatcccaacacgggtcccatcccccactgacagcagccggcgctcagggtggcccttggcaggcaccgtggtctggcggaggcccttggtgggtctcgtgtctgaagcatggccaccagcttggcctggggaatgcggtggggcggaggctgtcgtgccagaagaggtgacaatggacctagatttcaggctgggggccttgtctctctctccggccttagtgatgcctcttcgaactcgtacagccttctccagtgcctgggtcagaaactccaactctttgaggtcttgtggactgggtgtgcatgctgtgaaagccaagaattatgcagggatctctccccactgtcccccaggagggttcctcacaactgcacgccagcagacaggccagagcagcacctggagaaggcgggtggtggaggtttacctggaagggggtcctctccattagtttctggccctggaggtggcttcaaagcccgggtcccagttggttccctgcaaagacacgggcagccgtcgcacgg

SEQ ID NO: 27729 - DNA, 1299 bp, Artificial sequence
  DNA replication origin
cctgcactggccctccacactcctcctgatacagacccaggacccactgacctgccgagagctcctccctcatgcgcagtctcagcagcgagcaggccttccgcaggcgccccgcctccgcctccacctccacagcactgagcctgggctggggcccgcctgactggatatgggtcaggaaaacttccctgcagccaaagcccctctgctcccaccaagaacggggcctggggagtggccctggccatcccacgccagcccctcctggggctgctctgcaaacctgccaggttcagagctagaggcccccagggctcccacaagcccagcaaggatacagctgtctgcatgttctggaggaactgggttttggcagcggcggcatccgtggaatcactggtctgtgtggaactgagctgggcccacaggctggggtgcacacgtggggtgcacagaggaaccacagagggacacggttattccagccagtaagctgggccttgggaggtaggcaagggccagggtggggaccccaggctgggcgtctggctctgctgaatgccaggaggggcctccagaggccgcagggaaccaagaggacactgactaggacaaggggacaaagctgaccggctggcagatttttaacatcgacagtgatcccactcagcaaagaggacaaagagacccactggaaagtatctcgaacctgtccccgagctggtgatgcctcccggttctcccctacccccgtccagccaaagacctcagcctcacctcgagttctgggaagctgctttcctgaatgccgcaggcagccgcagcaggtgcctgtcggagaagcccgtgttcagaggagcatcgccttgctctggggtctacaagtcccacttcctgctcagagcccaatcagggatgaggcttcttgcccctctcccacacccgaccccaccaaggatgagcccccttggatagggcttccagagtggccataggagaagcatcgtccagtgctgccccattagagagaagagggggccctgtgagcggggccctgtgagcagatcccacgccctccagagcccatctggagcctctggcctgggcaaataaggggacagccacagagaagagaggaggacaggctccagtacttccctgacctgatggtgccaacctggacaccaccacacagctgcttcattctgccagcttctgagcatgagcctcaggggtatgccacagggctcgatgccctgccttccctgtcaccccaaatcccaggctccttgctagcca

SEQ ID NO: 27730 - DNA, 1051 bp, Artificial sequence
  DNA replication origin
ctgcggcctctggaggcccctcctggcattcagcagagccagacgcccagcctggggtccccaccctggcccttgcctacctcccaaggcccagcttactggctggaataaccgtgtccctctgtggttcctctgtgcaccccacgtgtgcaccccagcctgtgggcccagctcagttccacacagaccagtgattccacggatgccgccgctgccaaaacccagttcctccagaacatgcagacagctgtatccttgctgggcttgtgggagccctgggggcctctagctctgaacctggcaggtttgcagagcagccccaggaggggctggcgtgggatggccagggccactccccaggccccgttcttggtgggagcagaggggctttggctgcagggaagttttcctgacccatatccagtcaggcgggccccagcccaggctcagtgctgtggaggtggaggcggaggcggggcgcctgcggaaggcctgctcgctgctgagactgcgcatgagggaggagctctcggcaggtcagtgggtcctgggtctgtatcaggaggagtgtggagggccagtgcagggagggtttccagactgccacgggccccacctgctctccctgactcttctgcagcccccatggactggatgcaggagtaccgctgcctgctcacgctggaggggctgcaggccatggtgggccagtgtctgcacaggctgcaggagctgcgtgcaggtgagaccccgcccccaccctgccacctgcactgaggtctgggccggggacagggtgctttagccaggcttgtctgcgcctcagggaagggtgagcagcccagggaccagatgcaagttggtgggcccctccacccctcccacgccactccccagtgtgctgggtcctcaccagtcgtcctatgggagcagtcagccttcctctcctcctcagggcagctctcccacctcgctgctccccgcacacagaacctcattgctctgagcagttgcttattcacccagttgttgaaaaactagcatgtgaggg

SEQ ID NO: 27731 - DNA, 1428 bp, Artificial sequence
  DNA replication origin
gcttggcactgcgcccgcccggccggggcgaggttggagggaggggcggccggctcgcggtgacctcgatgggagggggcctcgcccgcggctcagggcgcccccggctccctgcgcccggcccttcgcctccgccgagcgcgccagcacaggaaggcggcggtcagaagccccaggcccgcactgagcgcggccagcgacgagccctgggccaggtccaggcggggtccccgcagcgagaaggtgatggccgtggcagccgcaccagccagcacggccacggcaccgaacggcagaatgcagcgaggccacgagcccccagcgccgccggtggccaagagcagggcgcgcagggccccggggggttccgggtgcgccagacccggcccggggggcgaggcgggcgccgctgggggaggctcgagcgcgctcatgccgccaacgcggtggccgcgctcggtgggtggtgtggacgcccgcgcagtcccagtggcgttccaggctcgccacgtcagagcccattggctccagaggcggtgacgccagccgggagcccgaggagtcagctgctacctctgggttttggcggggaatcggggtgggcgggcgttagtccgaggaggcggcttgtctttcccgccctggactcctgtgttggggcctcctcaggacccccacaaagctatctaggccgcctccctgctccaggacaccactgtcctctgggttggcccccgggattggtggatcattgagtcagtgcacatctggctcccatcagggcctggccggggtaggggggatagcacccctgtcctcctgaggcagacatccagtaggcatgggggatgagccatgagccaagtcagccagtgaaataacgtcaggtagagaccacctgctctggaaagccacgggggtgtacggtcgcagcgtggttgggggtttcaaatgagtcagtggctcctgcagatagaggcacctgggcataagcctggaggcagcaatggggttgccgggaggggcgaggctggctgatctgcacaaggggtgcgaccctggggctgctgccaggctgcggtggcagggggtggagctgccctgtccctggaggcgccccctcaatgcaacgaggaccatggtttttggtttcctgtcttggtctctgtcatctggtccccagcagccctcaacttgggactctgggtccgagcgtgtttctggcccgctggactataaggccctttacaagcacgacctacctgcgacgctccatctggttctcagaagacccggctttctccaggtgtcatccacctcctgtcctgctgccctgtccagggggggcaccttggtgaagaggccggtcatcttccctgtcgcaggtccctgcccagagcagcgcttggtggagctccggcactgtcc

SEQ ID NO: 27732 - DNA, 3105 bp, Artificial sequence
  DNA replication origin
gacctggcccagggctcgtcgctggccgcgctcagtgcgggcctggggcttctgaccgccgccttcctgtgctggcgcgctcggcggaggcgaagggccgggcgcagggagccgggggcgccctgagccgcgggcgaggccccctcccatcgaggtcaccgcgagccggccgcccctccctccaacctcgccccggccgggcgggcgcagtgccaagcgtggtcgcagaggccgccccccacaccccatccccaaatcgtttcttctggaaccctttgggcagagaaggccaccggccgtttccctccctccctctctgctttccctctcttccctcctccgtccaacgtcgcatttcagcttttgacttggcgcgcagagctggcgcgaccgcagagcggcctggctgggcagcggtctgcgaggctgggggatcgacccggcgcgagggtgctgggtgcagggcagcgcgacgcgggctcggccacaccacccgccgttgggagccggcgctgtgtctgctcctgggctgtctgccttcggagctcggttggaaaccccccgaggcataataggcgctcgataaatgtgcaataggtgaacatgtggtggcttgcaggcgtctggggggagacagcaggttctgggctgggcagggaattattggatcaacgggcatcttacaggaaagactctcagctccctgccgcctaggactgtccagcccatctatgccctctccccagcctgtgccccaaagctggagctgccactctaggggtgaggggtggggtggggagggggaggcgaagcactgcggcctgagttgcaggtggggggaggggaggcggagcttctttgttgcagaaggtgccaggagggggcagggccagtggagaggtgggaggtgggagaggccccagccaggggctgggacaggtggctgggtccctggggagcaataagtcccgcttgggcgctgtggggaggcccttcctaactcccaaacaccatctgtgagggctgggggtgggggcagagtagcgtgtgcagaggactgttcctggggagaggccctgtgaccagcggcctcctccctggggagctggcggtacaatggccctctgggcccacggcctcccgccgctgctgctgacccagatgaacaattggggcagggctgagccccaggcacctactttcccccaccccagaagccaccagacgttctgcagaccccagtcctggctcacagggaagctgagctggagacaaagccagcccctctgatgagggtggaagaggctgctggccactgtccctcttgcagcctggctggcagccagtctggcagtggccctgacgtccagagacagcttgggtttccccagaggcttgtctctggccagtgggacccctctgtcaggcctgggcttttctctccactgtcccagaatgatgatctcagcccccatagtccccccagggttcctcccacccttagggtggggtgtcggggggtgggggttgggagccagaaggaccttgaagagggtggttgggacgtttcaggttctaagcttgacccacagagcggagcgtgagccccgtcaggttgaggtccctcaacttgtaaaggacacaattcccattctctttatcaggaagctgaggggcaggggccctgtggcagagagagagccccttagccctctctgttcagtcctccggtgcccccatccctgtgcatctgtggctgtcacatgcagatgtgtggcaaggagaaggtgcccaccagccagtgtcagttgctccaggagccaagccaggtgccctatcaccctgtcttcccgttcctcccctccatggtcaggccctcctgctccctcctctggtccttcagtttcccctaggaggcttccgtgtcctcctgcccctcctctccccaacagcgggatgcgtctacctctccattctcttcctcctggtccttgctcatctctggtcgtgtccagggtagcacccacgtggcctcctccaccagctgcaggcctggcctcccatctgaaacggggcattcaggcctcgatgctggccctgcacggaacttgttccctgcccctccctgggatgcttggcctcctctgtcaaggacctgaaagtcggaggggaggaggtttctctgaccagagctgttcctggaccctctttggtggtgtcgctcccaggcacagctaccccatccccagctagtccccaggccacccagctgggcttctgcctcagtttccctgcccaaacgtgctgtgacgtagggcagtgggctccgggttgcgaccagccccttcccatgattaaaccctactccctgcccctgcagaggggtcctcaacagctaaccaagcccccgaaccccaagaagccaccccatcccaccctccagcttccatgtcctccctgccagctgggcccgtggcagaggtgcccctagaaacttgcagacccagggagctttgggatcagaatctggcctggtgcaggggatgctggcctcatgtcttagcccagctcaggcccatgggggtgccccccttcctcaacatgggcaggagacactccaatttgtgcagctctcgacttgggcctgatgccacttgagactcatcaaatccaacagcttcagagcgcgtgctgagtaacaggcatctggcaggtgaggaaacaggagcccaagacatgcagccagaaatggggcagttggattcaaaattagacctgaccgaatcctgggttccttctactcgagtagatgctgctttggggatgacccttcaactggtggttacttggcttccctacctggggaacatccagggcctctgctgtcagacccggggccttgcctgcctgatggtcttcagggaggaggcgacccagacccccgtccagcacgtggcacagccccaggagcagtaaagacctggctgtgggcccaggaccctgctgggtggtcccccacgggctgcgaaggctgagctgcccccctccagacccctcccgccagcgcattcctggctccccggcccctcccctggctcccgggcc

SEQ ID NO: 27733 - DNA, 1838 bp, Artificial sequence
  DNA replication origin
cgacgcgagcaaggactccttggcaggcgaaggcacagggtgaacgtgcgcctagatgtgggagcagcggccgccctgcccagccggcgggctcaggcggcgctgcagcgcccccgccgttcgcgtcgctgcagcctccgcaggcgccgcgtccacgcgtccctccagggtagcacgaggcttccgcgggcggcgatgagcccgggcccccggccccccgcgcccccagccgcggctccaggcccgccccccagcaggaggtagcggcggccggggagcaggcgcgggcagccgcaggccgcatccccggcgggcacccacagcgcgctactcccgcgccgcgcgcgctcctctccgctccggaacacggcgagcaccgccaccgggaagcgtgtccacgcgccgcgcgcctcgccgcgcgcacccaccgccacctgcaccgctgcggggagagcgagagggggcggggtcaggaaggggcggcctgcccgcggtagggggaggcacggggaggacaccaggagggcagtgggggctgaaggggcggggtcgctgcccgtggaggacctgagggatgaggatgggccttggggcccagcaagggtcaaggcgttccaaggggaagctggcggaggagggaaggtagggagaggaggaaggtgggaaggtccgcgggaggcctgagggcacctaccatagtccttcttgcagaacttctttaggctgatgcggtagctgccacgggcaggtttgcagtgcgagtcacagtctgggtagaaggtgggaggctggcacagactccctttccccaccctctcctcccagagccccctcccccaaagtcatgccagtctggggccctgtcctgtgtccactcaccctggggctgcacagggctgctgtcctcagtgggtccagggataggggtctctgcagagagggagggagaatggcctgcgatggaggggcagagagatctgcagggctcggggaatagacgggacaacagcagggagctggggtggccttggcttggtggctgaggcggggcagggtcactcactaacacagggcgccactggggagcggctttgctggaagccaggcgcgcagcggttgcaggtgaggccagtgacgccatccttgcagggacactggcctgtggtctggttgcaggtcttgccagcagcaccaaccgggtgacagtcgcaggctgaggacagaggtgggaagggcctggtcagaagcctgtctggggatctgggaagtcagagggtgagggcctgcaggtggccggtggtggctcacccctgcaagcccgacggtcactcagggcacggccagggtctcgatagaagccctcccggcagtagtggcagtggcggccggcggtgttgtgccggcagttgagacagacacccccgctgcggcggccggacagtcggtacagctccatgttgaagcggcagcggcgggcatggccgttgcaggagcaagctgcagggagggatgggtcaggggcaggctggttgtgtccaaggtccccaggccaccctccaaggcctcaccgaggcaggcgtgggattcccgggcagtggcccgctgccatggcctgtcgcagtagaagggcttgcagcggccgcagtcagggccctcggtgccatgccgacagtcgcagatcaggtggccctgtgtgtccagcaggcaccgtgaggcatgtccattgcacttgcagcgcccgcccacctggaggtcggtggctgcgtaggagtaagggacgacggcctccatgtccctggggtcacctgccgtgctaggccttgtgagcactacacgga

SEQ ID NO: 27734 - DNA, 1227 bp, Artificial sequence
  DNA replication origin
cgggaccccctgggcgcgaggcccgatccccgcccggtcgctggcccgcggcccggcccagggcatggtgtcgtctggaagagtgactgtgtcactgtttccttggggcgctttccgtctccgcagggtcggaaatcctcttgggggctcggtgagattgcaacagattctgatacgccctgccctgtggacctgcagcggccccgggccccgccccgccccgcccagggatgacacacgcccccaccgaccacccgcttgggggtccgccagcccccggccctgtccagtggggggcccctctgggtgcgccgtgccaggcggccgctgtccttcgggccctgggaggtggaagccagggactcccagccctgagccagcacagcggaggggagagccggccccacctgggctgggctgcacctgttcccgccccctccaggcgggagtccccgcggcctggccacaggccttctttgatggccgtgccccgcagggaaacgcgctgtggcccccgggttactgcttgcgggggtgatattaaaggtcaaaggttgtctaaaagccacctgggtggtgtggaggtgcaggtgggctgttaggttggtggctgtggttgtgaagccgatgtcactgtctttacccagcagcttattccagaaagggggcgtcagcctgcccttccagtgccgatagaagcactagcgggtgatttttccctgttttgctgtgtttgctctggagtcaccaggtgacttccaggcagtgtgcagaaggaaccgtcccattatttggcacgtgggccgtttcctccacccgaggtccagggctccgtcttcacagtctgtcctcagcacacagtaggcacctgtagatggcacacgtggcgtttcctccgcccgagggccagggctctgtcttcagcacacagtaggcacctgtaaatgtttgctcagttgcggcgaagacaagcagtcaggttcttttcattttaaggaacacacactgggaaaaaaaaccaatccagattagagaagatcagaaaatcttacgaagattttacagttactgttcctagcctgtggcgtgacccctgcgtgcaccgccttttattctgagggttgatcctcatctaatctgaacactcagatagaggctttacatggaggacttattggggagtgcttgctctacttagaagcctgtctttccctgtgaagagggcgg

SEQ ID NO: 27735 - DNA, 1506 bp, Artificial sequence
  DNA replication origin
aggggacaggtgtctcctgccactctgaacagtgacattcccacagtgtagtgtggggactgcagttggcactgtgtggccagggctccggaagctgttgtccgaggggcagggaggggctgggtcctgaagggcgggggacaccaggagagggtttcgggtggagaacggtgaccgggtgaagccctgagtgggcaggaggctgggagtgggagctgaattgcgctggagtcacatggagtgtgaatgttgtgactgtaccggagacacctgggaagcagctggagggacaggtctggacctcaaagaaggattctaggctcaggagagggtgggctccattggagagacaggcacgggcggtggaggagcagccgcggagaggtgaggggatgcctggcagggaggcaggcgggatgaggcccaaggcagctgggagatctggcggccagcgcggccagcggcgggagggccggaagctgggtgtcatctgctcttgccagccacttggctcagaaggaaaacggagaagaggtggagctggagtggagcctcaggccctgtggtttgctgtgtttggggcctgctgtcacagcactgggagccttggagagagatggggagctgggatccccaggaggtgagagccaggactgagggggggccttggtctgtggtgggaatgcagagagctgggaagctcacgcctgacaagccccctttcttggggtagagtgggtgggacggggcagctgtgagctggagaggagagggtgtcggtgaggagtgctgcgaaggatgccaggtggcaccgggggctgggccactggaaaccgctgagcaggcggcaggacttctccctctcccctcggccgttctcgtgcctcgggctcacttcctcgtgcagtttatccatatggctgagacaggagcgtggggttggcgggcgggagttggggcttggcaagacggtccaggctgagctggcaagagagaaaagccagagtggctggtggatgcggggagtcacagctccgagtgggaggagggcgctgagggctctaggagagggtatgggcaggtgtatgaatgtgcagcctctggagtgggtagagtggttttctggaatgcccggggactggataaaaaggtagagatgtaaaggcttttaaagttctagaggccacggagctttccagccaggacggtgaacttggccctcaagggagggcagcacagagaggaaggccctgagctggagagagaggaggcgggtggtgatggggagagcccggctgctgctcggcccagaggaggaagggtacgttcgggagaggatgaagacttgggagtggtgtgtttgctgtagacaatttccagagcaagaaggcaggctgggagcaggggccgggggtaaaaggcagatagcaaggtaaggaggtgtgggggaagaccagcggctgtgctcaccgtggttagtgacactgtcaccatccagccccggtc

SEQ ID NO: 27736 - DNA, 1585 bp, Artificial sequence
  DNA replication origin
ctgtgaacggtgctgggtgggggctggaccagctctgcctgcctcacccccaggtcaccccaggcccaacccagagctcccacggccacatgctgtccaaggctggagggaggctccctggctgcacctggcagcaccaccctggagggcagcatgccccaggcccccgacagagcaccatgtggatgacagggtggggagcgagcacagccaggacctgccgcccacatggtcccccaaccaagacaatgctgtgagctccaaggtggggatcctgcctcccaggcgtcttcacgacgcctgcatggccccaagctgtggcacgcctgccatgacccccaaagtctgggtggtgtggggaggacagagcccagaaagggaccctgattcttaggccccacaggaagaagcagggcctcaccaggtgccgaggtttgaggcccatttccagcctctgtgggcaggacacgtggctgggcggctctgccgcccgctctggccccttggggtgttacctggccaggctgtacccgtgctgcagggaggagaacagcagaaggggctggcacagggcaaagcgctcggggacccaggaccagatgtctctcatctccctcacgctgacgatctccgagcggaagttctctgcatggacggccaagtgtacaaactgcctgaggggagcgagcaggggtcagagcccgaaggcacgtctggggccaggccatgccccccgaggtatgccccagagcctctttggaagtaaacccagagggaacttctcgcctgcttgccccggccccggtttagggccgggttctaggtgcccaacggggagaaagttcccaggagccccacctcccacccattacagaagggaaagtgcccagcttggatggggacaatgcaacttttctctaagaaatcaggacagagagcaactgctctggcaagacaaggcttcagggtgagccaaacaccagcagatagcatgacagaggcagacaggcagggaggcaggcagacagacagacagaaggcgcctgagcatcagtccggctcagaggcagcgctgctgaagctggcccacgagagcagccctgagacccagagcaagcagctggcctagagtcagcctggtggaaagacagaggccaggtgtgcagatacagtttcagacctaccttttagaaagtgacacactgaaaaacaggagaaagcaacggacatggagaagaaaaataaaacagacaaagagaggttagtgtgagtaccgatcccccgacaggcctttgctggcccagaagaaagagggctgcacgccaacaggccgcagcgtggcaccatcacagcgctggctgccaaatccacataggacagacaccatgaactcctgaccctgctcccctggggctgtgctccaggcggggaggccacgcccagcagccacagcagagaccagccacggagcccagagccggaggggtggagcagaggctgccctgaaatgaccctgggagtgggcctggcctcccacgatgccttgcgaccccatggccagcatcagctttcatctcagccgtgg

SEQ ID NO: 27737 - DNA, 1668 bp, Artificial sequence
  DNA replication origin
gtgtgcagggtgacagctggcatgcgtgtctctacgccaggttctacttccagtgtgaaggacatgagcctaccctcttgctcatcaagaccacgcagaaggaggtgagcaggggccctggagccagggctggctctgatgggctccagggctggctctgatgggctccagggctggctctgatgggcttcagggcctaggcctcctgggccagatccagagtcagagcgtgggtatggccagcacatggggctcatcccacactcagggccacaaggggaaatgagactatccccaacacagcccccgcccaccctcattgccagccccaagccaggggcagggtgcacacacctgcaacactgcctttcccacaccactcctgccctggggtgggggtgggagacggcaatgcctgcacccccacctgtgacctgggacaggcccgtcagtagtctggagcacagggacgctcctgggggcctgcgggcacagcctcacccagacctttcccccaggtgtgtggtgcttacctgtccacagactggagtgagagaaataagtttggaggcaaactgggcttctttgggaccggagaatgctttgtgtttagggtgagtggggccaagtgtccccaaacccccacgcagaccctgtagctgcatccctccaggagcacccgcctgccctggggacactgttgggtgtcgccatggcagtcacccagcagcgtcatcgccctgtgtgcttccgggtttgatcattcagccgtgcgctgctccggggcagggggcttcatctgctcgagccaccagctccccagcccctggctcgggctgcacccaccttgggctctgggtgcagattcacgggatgaaacgggttgtggctctggggcagaggggcctgcgaacgcccgcgccagctcctcacactccccttccaccccagctgcagcctgaggtgcagcgctacgagtgggtggtgatcaagcaccccgagctgaccaagcccccacccttgatggctgccgagcccaccgccccactcagccactccgcctcctcagaccccgctgaccgcctctcgcccttcctggccgctcgccacttcaacctgccctccaagaccgagtccatgttcatggcggggggcagcgactgcctcatcgtcggtgagcgccagcagacggggctctgggatgagggtgtggggtccgggcagctgaagctgctgcacccagccctccctgaccggggtggcagagaagaggccctgggtgtcagggtggaccaggcatgatgggtgggagggggctggaagggagagaccagcctggacagctggtcctgggggctatggagggtcaacggtctgtgcggtttcagagaggcccgtgcagggcaggacagctgggacagcaggtgaggtgcctgggtcagtgctgatagggcagtcaggccgccactgacctgagcatcctgcagggggaggaggcggccaggcgctctacatcgatggggacctgaaccggggccgcacaagccactgcgacaccttcaacaaccagcccctctgctccgagaacttcctcattgctgccgtggaggcctggggcttccaggaccctgacacccagtgacggcctgtgccacggtgactgagccg

SEQ ID NO: 27738 - DNA, 2069 bp, Artificial sequence
  DNA replication origin
acgaggtcagaagatcgagaccatcccggctaacacggtgaaaccccatctctactaaaaatacaaaaaattagccgggcgtggtggccggcgcctgtagtcccagctactccagaggctgaggcaggagaatcgcttgaacccgggaggtggaggttgcagtgagccaagatcgcgccactgcactccagcctgggtgacagagtgagacgccatctcaaaaaaaaaaaaaaaaaaatcacagagtgtgaggggagcatccagagaggcctgaagggggtgtctgaggaggaagaaggaggggaaggaaagtgggggcttcctggaggaggtggtgttctaaatactgagacccatttctttttttttttttttgagacagagtctcactctgtcgcccaggctggaatgcagtgaggctgtctcagctcactgcaacctccgcctcccgggttcaagcgattctcctgcctcagcctctgcagtagctgggattacaggtgtgtgccaccacgcccagctaattttttgtatttttagtagagacagggtttaactgtgttagccaggaggtctccatctcctgactcgtgatccacccgcctcggcctcccaaaatgttgggattataggcaccccgccaactgaggtgcatttcttaagtagggagtgaggaagagagttggtgcagacacaggtgatgcagacacgttggggggctggtgatgagaagcgggaggggaccagggagggctcttgaggggccgaaggattccaggatggaaagtgccctttggaaagaacctgtggctttaaggtgaagactcggttgattgggggtaggcgatgagaagacctaggccaggcagcggcaggggcaggggcgcgggcgcggacacaagctggggaggcaggatctcgggatcctgagtaatacagagtggggagggagcagtggcgtgacgtcaggctgcggggggatgggcgtgccttctgcgggaatggaaatagcccagtggaaggtggtggtgaaggggtgggggcgagctcagcttcagacacgccagcttgaagtgtcaggagccacactggagacccggtgtgacctctcacactagaacttaggcagaaaatgaatgggtaagaggccagtgagcacagctgacccactccctgctcctgcaagagggaagtctctccacgtccccatgtccccagtcctggtgtttcagccacaatggagttaggtgctctttgcccaccctacaatgttttgtttgagacgaggtctcactttgttgcccaggctggtcttaaactcctgggatcaagcaatcctcctgcctcggcctcccacagtgctgggattacaggcgggagccaccgtgcccagcccacccctgagcttggactgtgctgtttctccatggtgggctgctctgcgccacctttccttggtctgaattcggccccaggcacagccttcctggcctaggctttcctggagggcttggagttatgggggcaggcactggtgttgctctcactcagagggcggtcggggctggaatggtgcaggtgagggacaagacggcgtaagatgggggacaaagccagggaaaggatgggatcaagcaggggaagggcagagctaggggtagccctgggtatgccaggacctgcagcaaaattggggctacagggccttgtgactccaggaagaatgagggcgtctgagatttaggaagtccgcaggagagaggagagtgtgtggagagggtggcaggccacgcagcacagaggtccacttggacagcctgacagatgtccttctgcttagagaaatggcggtcaccagtgaccttggcaagggcaaggagctggagagggaagggcaggtgaggaggtggagacagagtgaagattcgtcttctcagaaacaagggccgggcaagaaagagggaggagcagaaagggcctctggccgtatctgttgcctcctctcctttgaaccaggacagacttagggactttcacgggctgcaagttccaagagtggcagacccagg

SEQ ID NO: 27739 - DNA, 1210 bp, Artificial sequence
  DNA replication origin
acagatgtccttctgcttagagaaatggcggtcaccagtgaccttggcaagggcaaggagctggagagggaagggcaggtgaggaggtggagacagagtgaagattcgtcttctcagaaacaagggccgggcaagaaagagggaggagcagaaagggcctctggccgtatctgttgcctcctctcctttgaaccaggacagacttagggactttcacgggctgcaagttccaagagtggcagacccaggctagcctggggaaggggcttgagggaggctcctgctggggaaggtggggctgagtccagcaggagggccagaccaggggccatgaccccattgcctacatagagaaggtgatgagccagcatccaggctactcagggagagctctaacccaggatgaggccttagagctcaaaggacactcaggcctggtggcagctgcccagggcccctgaaagggggaatggagatcaggcagagggggtgccagggactgccacacaggatcagtagggcagcgccagccctggctgggctgctttcacggctgcgggaaccgctccaactgctccagaaagacagaaagatggccctgaaggtgcaggctttgcgtgagtgggtggctgcaaggacaggtgggaggaccaggacgccagaacgtgcagagcccggggggcctccagaggtcgcagttccgacagggcttccaccagtcatgcctacatcttgaggggcagagacacaccccactaatgtttgggtccctgatgcaaaggcagagacaggtgcggggagggggtcctttttctccgaagcgagaggtgaagtcaccaactgctgggtcagaggcagtaggtctgggtctggaggagactggggacagggtggagggaggtgaccgcagccacgggctgggacttcacaggtgtgggctgggggcttttccggacgctgtggcagaggaggcccgcgcgccgcacatctgctgggacccttagctcgcccaggattggtagggagatcctggaagaccagcgcccggaggggtgaggccccgtcttgggggcaaggccgcgaaaccacggcctgcagcttcacgccaggggtacaaagaaaagcgtcgccgggaacccaacacctgcagacgacgcgcagccgcagaggaggcggggcgtccgaggccccgccccgtatgctaatgaag

SEQ ID NO: 27740 - DNA, 3343 bp, Artificial sequence
  DNA replication origin
cctcggccgccatggtcttcagcggtgagcgcggcggcgggagggactcgggggcgggggcgcgcgcgttgctcatgcccgcagctcgccggggtccggtgtgtgacgtcactctgacgtaatcccgagctgtcgggggcgcccgggcctcgtgtgacagcgggcgggggtcggcgccccgagggctgcggggagccgccgggggtccggggcgcagggcgtgcgggcctggccggggtgtgagtctcgggggtccgggccggcggccctgccagccgggtcgtgcggttgcgggggtggggcggcggcgccgctgccatattagccccgggagcggcgagagggaggctggggtgggggcgcgaggggggcggcgcgaggggggccgattctgcgggcaggtgacatcacacctcgaaggccccagtgcgcgggcggcggcgcgggtccggcccaggaacgcccagccggtcgctggagctttccggctggtggggagcccatgtcccccacgggaggtcctcagccctcgcccttatggcggccggccccgagggtcaggtgggtctcacccacaggcaggtacttccggttggagctggttacagttgcccaatacccgtgtcgctgtgtgggctgtttgggaaagctgggctgagggcttggttcggagagcccgcggagacccgggtgggagtgtgtggaagtggagggagcggggagacagcagcatcggcgctggcggggctgtgtagcttgcagagggtctgtgctctgaggtgggtgagagggtggcatgggtgtccgagtttatgggatccagtcgttgccctcaggactgaggcttccagttgtggtcctaatgaatggaggggtgaatgaatgaccttcctttccctccctgaggcctgaagttgggaggggcttccctgggcttggagaaggggccttctagggttcttggtggcaccctgcttttgaaattgggccttgacaggtcctgggcgtccaatttagtgacaattggtctccctgggagaatggcacttgggctagggctaggcccaggaatgtgggtccgacgagttaagttctggcccagtctcagcctccgtggactggcctggcctggtctgatttccgcctccgtggttaggtctggttttagctttgatgaccgtgccctgccccaccctgcctggtggcctggggaggctcctagtgcagatatgtggagggtttgaactccaaacagtctctgctgactgtaaacacctgtggggtgggggcttggagctctctgttctcttgcgggcctccttctgcctgggcctgtctgccattcgtgagtgagccctggccttcccgtcgtgtgcaagtaaggggtcatttgtggtggaagaagtggtctagacttctccttccccctaggcaccgcctgctctttccacagactcaaggcttctcccaacaggctgccgagcccttccccccagcctcctctgttctttgccctcagaatgccttcagagattccattttgcctggccacctgtggggtattagcttgtggctgtcactcattcatccaaacaatcttgattgagcgcttactatgtgccaggtactggtaggacagcagtgaacaaaatgggatccccgcccatgtggaacttaaattctagctgttgctgcttgcccttgaagccctgagtttgtccaccaagccctttttctgcacccagctcctttcctctctctccgtcaagacctacacaggtctttgggcagcctgaccagcaggtgtctggaaattgagaacacggtattgctggcctaggcctttcctgcttatccctggctcttcgggataaacgtggcttactgtggctctccaggagctgacctctgacttcacttggccaattcagacaactgcttttttttttttttttttttttctcccctcctcaagacagggtcttgctctgtttcccaggctggagtgcagtggtgtggtcatggctcactacagcctcaacctcccaggctcaagcaatcctcctgcctcagcctcctgaataactaggactacaggcacaggctaccatgcccagctaattttttttttttagagacagggtctcgccatgtggctcaggctggtctcaaactccttgttgcctcaaacgatccacctgcttctgcctcgtaaagggctgggattataggcatgagccaccatgactggctcaacttctgacttcatttctgccttctcagcatgctttcctccaggacctggcttcacctgctgtgccgacctaaacaagccccctgccctccagtggcctctgctgttgccacaacgccaacctccagctgtgtccccagctcctggcccttggcctgcctggcactgacggattggtcttaaaccgaatgaggtccacaaacctcttgcaggcccccgtcccagcttccccttttttttctcatgacaaatgtcctgttctttcttcatcatgtccttcaagaagttgtcatttgctccttttctgtatttcctgtgacttcctccctgctggcgagtgccttgtattttatgcttgtgtttctgcaactgctttctggccccccactctttctgtggctgctgagcctagtgccgctcacaggtctgccttctgcagtctggtcaggcttggcctccggactggagtccagggtgctcatggtattccgctcctggtggccatccctttcttccctgtgctcctcttggtgcctcctccccctgccagccacatgattcttcctgctgccctctgtagaaaagggcctggctcacttcctgcctctggtggactactggcctcacagggtccactacttgggttgctgagttccctgtattcagtctcctgccaacgtgtctgccatgctctggtctcttgtgcatacatgatgcagttggatgtggtcctgggcctgcagtgggagccccctaaaatgcactgtaattgctctatatgcttgccagggaaaaaatgcactgtaaccaggagttcaggacaggcgctgggacaggccctgggccccagtctgcaggtgcactgggtgttggcatggcatgtctgggcacctccaaggtggcgtggaggaggccgtgtggctccctggcccaggtcccagcctccttcctccctctatagtcactccctggatacccagcaccgtcgtcttgggtgcctctgcaggtgctatccagagcccttgtcttattgccttgtttttctgtgactcctctctcccgccaacttgggatacttgtctgtgaagc

SEQ ID NO: 27741 - DNA, 2343 bp, Artificial sequence
  DNA replication origin
taaaatgcactgtaattgctctatatgcttgccagggaaaaaatgcactgtaaccaggagttcaggacaggcgctgggacaggccctgggccccagtctgcaggtgcactgggtgttggcatggcatgtctgggcacctccaaggtggcgtggaggaggccgtgtggctccctggcccaggtcccagcctccttcctccctctatagtcactccctggatacccagcaccgtcgtcttgggtgcctctgcaggtgctatccagagcccttgtcttattgccttgtttttctgtgactcctctctcccgccaacttgggatacttgtctgtgaagcccttccccagcacccccttctccgctctcctggagcatgtctctgtgcctggaggtcaccgcgcctgtgtcctcacccctgctgagtgctgggacacagggtaggcaagttttgtggcccaaatatatcaataaaatatgaagaggaatggtaggggtagtcctggtcccttccacctctgacatatgtagtcttctgcaggtcaggctgtttgtgtgtgtgtgtgtgtgtgtgtgtgtgtgtgtgtgtgtgtctgtcagagattcactcttgttgtttgtttgagacggagtctctctgtgtcgcccaggctggagtgcagtggcgtgatcttgactcactgcaacctccactcctgggttcaggcgattctcctgcctcagcctccctagtaactgggatgacaggcatgcgccaccactcctggctaatttttgtatttttagtagagacgaggtttcaccatgttacccaggctaatctcgaacttctgacaccaggtgatccgcccgccttggcctcctaaagtgctgggattacaggcgtgagccactgcgcctggccaagtcaggctggttattgatctgctcccctaaaagaccatggcatgagttctgtgggcagagagggggcagggagttgccagtgcagtccccacaagcagctcagtaggcccctgtggtggccctggagggcagctggcagaagtcagaaaggcaaatgagcccccgtgacactgctgtgtccacagaattctccactttgagaatagggcccaggagaggggaactgaaaagaaaggcaacattctcttgggagaggaaggagggacagctctggaggagacaggccaccctggagcccagcccaccagcactgttgcggtgggaggcttgggccctctggccaggctcctgtgtgcttggagccaccccgtgtgcaggggagacctctctgggaggtcagctgaggcctcgtagttggactgttgatgatccccgtcgtcttctctgcccccatcctcttcttggctcaccctgtctcctgtctggtagagaagattctccaatctgtcaagggttcaggcctgctgtgtggctgagggtgctgagagctgccctttctggcagaatgtttggccctcctaggttaatatttggggctgggagcgttggggagcttggcctgggcagtgagtcaagggagctctggcctgggtgacaagagtggccaggtcagctgcttctgaccctccggtcacaccctgtagcagtggctttgccatccccaagacctttggtggcttttccagcatgttgtcctgggcagtagccccaagggtcgactgaccctgaccccacatgggggctgctgaggctgcactgaggctccctggggtgacaggtgggttcactgcagagccaggagccccagatgggtcacgccgccccaagagctgctgctggaggaagagctggactctgagggtgggggcctcacgtagaggaaggaggagtggctgtcctggcctccttttgcttgcccgtggctgttcctcctgggtcctcttgccctgggctggatgccttcttcggctccccctctgcatgtgataacttggggtggcccttggagctgtgccaaagctacacctcggggtcctagtctcaactggcctgcgtactgctgtgggctcaccccgccttcctcccacagccctgggcgctgcctatggcacagccaagagcggtaccggcattgcggccatgtctgtcatgcggccggagcagatcatgaagtccatcatcccagtggtcatggctggcatcatcgccatctacggcctggtggtggcagtcctcatcgccaactccctgaatgacgacatcagcctctacaagtgagcactggggtcaggcccctgcccagggctggaggactgcagggaggggggcggttcacctgtgggtggtgacccggacccttgtctccccctggttggcaggct

SEQ ID NO: 27742 - DNA, 791 bp, Artificial sequence
  DNA replication origin
cggcggccaaatcccgcgcccagtgacgaaccccagccgagagctgagaccgcgcccacgtgaccttcagctgactgaagcggcgcgccacgtgaccgccgcgcccacgtgatcgagccagcccacgtgaccggcagcgcccggcgcccgcccgcccgcccgcccgcccccgcccccaacaagctgagcagacacaggcccgtcacatccaagaactttattggacacagctccgcgcagggccacgggcccggcggtgagggcggctccatccaggaagtctcagcaacaggaacccacaaggcgacactctagctaaggttatagatagctgggagacaagggccgctccgcagacgcaggaacaggccagatctttataaataaacatccagtaaagagaaatgacaattctaaatcatccgcatacacagagcactctagggggtggggcgccgggggcctggaggggcgatgagtgggcccagatgtccacggcacggggcgggcgggggcaaggccggggaaacagacgatgggcactaggacactgcgcatgtacaagaccaactactgggggcggcggccccgtgcgtatgtgtcaggctgttcgttctggaatgaggaggggtggtctttacataatattctgtggctggtgggctcggagagggtctactttgtggagaggatgagggcgacgatgagaccgtagaggccgagcacctcggcgaagatgagaatcaggatcatgcccacgaatagtcggggctgctgggcggtgccccgca

SEQ ID NO: 27743 - DNA, 1432 bp, Artificial sequence
  DNA replication origin
ggcgccgggcgctgccggtcacgtgggctggctcgatcacgtgggcgcggcggtcacgtggcgcgccgcttcagtcagctgaaggtcacgtgggcgcggtctcagctctcggctggggttcgtcactgggcgcgggatttggccgccgcggggctccggagccgctcgctcccgacacggctcacgatgcgcggcgagcagggcgcggcgggggcccgcgtgctccagttcactaactgccggatcctgcgcggagggaaactgctcaggtgggcgcgggccggggactgcggggctggggaccgggcggggtgcagggtgcggggccggggaccgggcggggtgcagggtgcggggccggggacagggcggggtgcagggtgcggggccggggaccgggcggggtgcagggtgcggggccggggaccgggcggggtgcagggtgcggggccgaggtcaggcccgcgatgcgagcgcccacccactgcgtccccagggaggatctgtgggtgcgcggaggccgcatcttggacccagagaagctgttctttgaggagcggcgcgtggccgacgagcggcgggactgcgggggccgcatcttggctcccggattcatcgacgtgcagatcaacggtgcggcccggggccggcaggggaacccaggggaggagctctgagctccatgcgacacttccttttctgtggctgcaggtggatttggtgttgacttctctcaagccacggaggacgtgggttcgggggttgccctcgtggcccggaggatcctgtcgcacggcgtcacctccttctgccccaccctggtcacttccccaccggaggtttatcacaaggtgaggtgaggctccctggctgaggtggagggggctcccggagcaaccagcgccctcattttcaaactcacgccccaccccccacccccagcacgtattccatggtcctgagtctggcctcctttgatgaccggatctgggcctgggtcccgcccctgtgcttctttatcagttgtcgctctgcctggcctccctagaccctctgtcctccgcagctgtctccacactgctggctcagcaccgtctgagccataggccgtccccaccccctgcactgcactctggctgcctccaggcttcagaaaccatccccttaaccaaggccgcaggggattctgtgattggcacagcgatagtccctggtcaggctcttcctccctaacctgtctgatgtgtgactcagtggaacacgccttccagaagagactccccctgctcctgtactgcttgccccacgcttccattttctttcctgcccggaagaaatttggttgtccttggtctttttttattttaatttttacttaggttctacagggttaactttttgctgtatgttactactattcaggctcctcttg

SEQ ID NO: 27744 - DNA, 849 bp, Artificial sequence
  DNA replication origin
ggtccctgccccacccagcccttatcacctgccctccccaccagctgggcatctggaggggtgggggctgccaacaggtcccgcaggagcctcccagggtgggggcggggaggaggtcagccactcaccgaggacccctgccccatggggaccaccactcttcacagggatctgaggaacaacctggggggaaccagctgttaaagccctgtcccccacagcccattcccagaggccacagcctagccaaggccagagatctcaggtcagagttcagagcccagcacccagcccagccccggccgcctgtcccctcacaggggtcagggaaagcacagccggcagaattgaaggacccatggcaggagcaggaagaaatgataggtgtgtgggatgccagcggtccctggccatgtgggcaggcttgtgggcactgagggtggccctgggcacagcagcccagggagcagggctgggaggcaggaggctcctgggagcagcagggaccctggggcagagctcagtgtgggcatggccagggctcagcactgtgtgtggtccacaccatggccggagctggacgccatcaggaagaccgagtgtgtcagggaacggggggacacgggctcacaccacacatctcagaggctaacaggtgggcaggcagtccagtgcacactccctctctccaacacaggcatgggctgggggagccttcccagagagaagagcttcaggtgaggatggtggctggattgtaccctcccctgaactccccaacccacacaacagtaacactttttttgtttttttggaatggagtttccctcttgtcgcccaggctggagt

SEQ ID NO: 27745 - DNA, 1588 bp, Artificial sequence
  DNA replication origin
tggtctgtgagtggtgggtccccaaggggctggaccgggtgcccggactgtagcccaagctctgcccacaggagctcctgggcattgggtacttggtgactcaggcccagggtgacaggcagaccagcagggtccttgttagcctgctgcagagtccctgagacagggagtgctggtgtggttgggggctgttggcaaagccatgtgggcttggggactgtcacctagctgtgtcccccaagcaggctgcagcatggagtcggccctggaggctgcatccctgcaccccgcccagttgctggggctggagaagagtaaggggaccctggactttggtgctgacgcaggtgagggcctgtcgcagggtcaccgggcagcctggccctgcctgtagactctgttgttcctggggcggcctggacagggccagggagggtgggtcctccctagctccctcctctcaggtgggctgccggctgccagcctcagttgtagccccgtgttgccatcaggccgggctttctggtgttgcagacaaggccaggcaaggggttgcagggagcattgtccagtacctctgtccatctgtgatgggtcagggtgtcttgcactagtcgtgtccctgggcctcagtttccccaccagcgtcgggttgttggggagcagctctggggtaggtgggcggccccactcctgccccctactcattgcccggctctgtcccagacttcgtggtgctcgacgactcccttcacgtccaggccacctacatctcgggtgagctggtgtggcaggcggacgcagctaggcagtgacaaggacctcggctgagaggacacctggccgcagcgggatgccatcagggccgggtggttggggagctggtctccagggagtgagtcgggagccctgctggattgatgcccagggcctgtgcggccgccctggaggcggtggctgggataaacgtgcacccagcaggactcgccttggctccgggttttgcttgtgctcacatgtggcaccatccttggttgccctcctggagaaggcattcacggcctggggtgggatggctgggctgtagtttagcctgggccttgggccccagtgggggacagggcctgtctgcatgaagtggaccggagacctgcagaccccaggaaagtgtcactatgggagggaggggcaggcagtcagtggctggtgccatggggtgaagccaccatgggctgggggtgaagagccggcaggaaggggaccagtcacagggagtgtggacagtcaggggtttgctttctgctcctgagttggggtgtgcagcgtggagcccacagcctggttctgggccagggcacagtgccaggggctccgctctgacctccaggagggagactgggcccgggacccctgttttctgctccctggactgcctagccctgagtgccacggatgaccagcgttctgttttctcttctcaataaccctatctcttcacacatccccaggcccagtgcttgccggctgtggtgaccctgcctggtgctggagggcagtatgggaggcaccagtgtgccctgctcacccc

SEQ ID NO: 27746 - DNA, 1024 bp, Artificial sequence
  DNA replication origin
gcctggggcagggcacaaggggttgatctcagcccacaagccccaggggcagcccaggaaagcaggcgacggatgtggatcctgacctcctgagaggtgtgaggtgcagggatacccacctctgccttgacggccgcgcaccccttaggaagtggctgtccagcgcctgcctgtgctgggcctgggagaggagctgtcttgccagggctcccaggcagggagaggcaggtgaggttctcagccgatgtgttagaggttgagcatcgcctgtgcccagcttgctggctgtcagtgcttgatgtgcccatcctcagctaaaacccagagctggcatgttggtcatccccacctcagacgggacgcccagtccagagctggtgagccctgggccagcctttgggcctggcctgccccattcaccggccagcgccccacctccctggctggagggtcggggaggggctggcagagatggttggtccacagggctagccctgggtggtgggagaggggcccagggtcagggtgagagagagctgggccagggagctgctgcaggatgattttgaggtgtgggggaagcactcttggttggttttggtttgctttttaaaaattgtggtaaaatacataacaaaagtaactatcgtaacctgagcagttctgtgacatgaagtgaattcactgctttgtgtgaccttggccaccatcattccccaccactcactcccgctgggctcccagccctgccccaccattccgctccctctacagctatgggttttacaaagaaggatgcagggcgccctgactgcggggtgaggggcaggcctgcccgcggtgtgggcattcgctgaagggggacgcccaggtgtctgcctgagttacgggttggggggtcgggcatgtggggagggatggagttggaggtgcatgctctcagagctggtaggggtggcccgtttcgtcccgtgtgtgaactggagatgagacccggcgcctgcgatcccgcagaccgcgcccg

SEQ ID NO: 27747 - DNA, 1405 bp, Artificial sequence
  DNA replication origin
gagaggttcagtgagtttgcagtcagctgaggtagcatcactgcactccagcctggacgacagagtgagactctgtctcaaaaaaaaccaaacaaacaaaaaaaactgggcgtggtggctcacaccagtaatcccagcactttgggaagccgaggcacgcacatcacgtgaggtcaggagttcgagactagcctggctaacatggtaaaaccctgtctctactaaaaaaaaaaaaaaaaaaaaaaaaaaaaaaaatctgggcgtgttggtgcatgcctgtaatcccagctactgggaaggctgaggcaggagaatcacttgaacccaggaggctgaggttgcagtgagccaggatcgcgccgggctgggcaacagaatgagactccgtgttaaaaaaaaaaaaaaaaaaaggctgggcacagtggctcacgcctgtaatcccagcactttcagaggcctaggcgggcgaatcaattgaggtcaggaattcaagaccagcctggccaacatagtgaaaccctgtctctaccaaaaatacaaaaaaattagtcaggtgtggtggcgtgcgcctgtaatcccagctactaagggggctgaggcggagaatcgcttgaacccgggaggcggaagctgcagtgagcagagatcgcaccactgcactccagcctgcgcaacacagccaggctccgtcacacacacacaaaccgaactgcaaagtaatagcaaaagtgtaaacccatttagaaaaaacgtgtgtgacataaatgtgataaaaggaacagggccagtctgggagggagtacccggacgctccggagctgtcccagactccaggggcggaaaagccgggctgaagaggtgcccttcctccacgcttctggtgccaatctcccctgctgcgcccaccctgggtccctagcctgggctccaaaccaactccgagctagggaagctccgagccagggtgcttctagagtgtccggcccacccctccgcttcatttcccaagacagtgagggcggggctagaggccaggtgcggaggtgcgggacaggagccaagctgggtcgtagtgggatccacctgtgcgtgatacgtaacagaagggagaggcgaggcgcggggaggtccgcagggatgtgggagacgcgacggggaggactgggacgaaacaaactaggtccgcaagggtataaggggagcagctcggagggttggggcgaggcggggtctacaggggtgtggggggcttggcagggagcgctggggcgacgcggagctccgcagcgttggcggggagcgttgtggggagacggggtctgcaggaatgtgagggcgcggtggggagcgtagcggggtatgcaaggttgtgagggttgtggatgggagggctggggcgaggcgg

SEQ ID NO: 27748 - DNA, 1100 bp, Artificial sequence
  DNA replication origin
ggcagggtaacaaaccggcgcgtccagtccgccgccgcgcgctcaccagctggctggtggtcctggccatgggccccgcgtcggcgcgggcgcctcccccgcagcgctgcgcggctcggcgcctcctcagcgtcctcctccccgaagcggagccccagcaatggccgccctcatcctgcgcccgccccgtcgcccgccgccccccgcccccggcgccgccccgcccccgcgcggcgccgggcaggacttccgtcgcgccgcagccgacgcccgcgcccattggccgcgcccatcgtcgctccgccgcggccttagtgggctccgcctccgctccagctgcatttccgggttggggcctggcgggcgggagaggcccgaccccgcctggggagggggacctcgcgcgaaccaatcccagggcctgcggggcggggctgggcggggctgggcggggcagggggcgagctgtcattccggcatcccagaccgggaaactgaggctcagaggggaccaggctccggccaaggtcacgcccgaggtagcggcggagctgtgctcgaacccggaactcggattccggagccggctctgcgtaaactcagaggcgcaactttgctagtttcacaactaacaagcgttcacggaaggaaatctgggctatcaagtcacattcacggccgggcacggtggctcactttgggaggcggaggtcgaggcgggcggatcacttgaggtgaggagttcgaggccagcctgccaacatggagaaaccctgtctctactaaaaatatacaattagccgggcgccttgtagttgttaatgtcgataatgtttttttgtgtttttttgttttgggtttttggtttttttgagatggaaatttgctctgttgcccaggctggagtgcagtggctcgatctctgctcactgcaacctccgcctcccgggttgaagcgattctcctgcctcagcctcccgagtagctgggactacaggcatgtgccaccacacacaggcaaatgtttgtatttttttgtagagacagggtttcaccatgttggccaggggctggtctccaactccagtgatctgtctgtc

SEQ ID NO: 27749 - DNA, 1212 bp, Artificial sequence
  DNA replication origin
cgtcggctgcggcgcgacggaagtcctgcccggcgccgcgcgggggcggggcggcgccgggggcggggggcggcgggcgacggggcgggcgcaggatgagggcggccattgctggggctccgcttcggggaggaggacgctgaggaggcgccgagccgcgcagcgctgcgggggaggcgcccgcgccgacgcggggcccatggccaggaccaccagccagctggtgagcgcgcggcggcggactggacgcgccggtttgttaccctgccgggtccggcggccgcccgggtccggcgaggcggggcggcccggggtcccgagggccgggtgcctccttacctgcagccgggcggccgggccggggatggcgggcgccggccgagggcgctgcttggctgcggcggggagaccgggcctgggttgcggcgggcggcggcctggccgggggcgctgacagacgcgcggagggcgggggaggccgggaggtgtcacccggcccagcggggtggaagtgcctggaaagtttgttttcggcttggcgcagcctggagccgagcctccagggttacctttcggttctgtctgtagaggaaccgccctgggcttccacctggaacggggtccttggcgcctccgcctgcgagagaagcagaaggtgcaagttcttgctgaaagcacctgatgctcctgggcccccttttccagattcttgatgacagtggtcgggaaaactcgcctttcacggcccggccaaggggcatttgggtgcttttgctgcccgtggctgtgctcagcgttgtgggaagcccctgggaggccgaatgtgcaggatcaccgaggggaaagtgagcttgacaggtaggagggattttaggggaaggaccaaaacaaaccacttgttgggtgaaatgttttgctaaaagtgtcgctggtgtttctatattttctctctatcgctaaaagtatccctcgtgtttttatgttttccatatgctaagttctacagtctggggacgacggtttaaaaatttatgccttgtatgcgatgtgcagtgggtgatggaagaacgtctacatggctttaacatttgatttaaaaggcaaatattttaaatgaaggaaaacccaagaaatttaattgatcccgtgtcttccaggatgcggcttttttttttttttttttttgatggagtctccctctcgacgcgcagg

SEQ ID NO: 27750 - DNA, 1143 bp, Artificial sequence
  DNA replication origin
gctgtgctcagcgttgtgggaagcccctgggaggccgaatgtgcaggatcaccgaggggaaagtgagcttgacaggtaggagggattttaggggaaggaccaaaacaaaccacttgttgggtgaaatgttttgctaaaagtgtcgctggtgtttctatattttctctctatcgctaaaagtatccctcgtgtttttatgttttccatatgctaagttctacagtctggggacgacggtttaaaaatttatgccttgtatgcgatgtgcagtgggtgatggaagaacgtctacatggctttaacatttgatttaaaaggcaaatattttaaatgaaggaaaacccaagaaatttaattgatcccgtgtcttccaggatgcggcttttttttttttttttttttgatggagtctccctctcgacgcgcaggctggagtgcagtgatgcgatctcagctcactgcaacctccatctcccgggttcaagcgattctcctgccacagcctcctgagtagctgggattacaggcgtatgccaccatgcccggctaatttttgtatttttagtagagaaggtgtttcgccatgttggccaggctggtctggaactcctgacctcaagtgatctgcccgcctcgtcctcccaaagtgctaggattacaggcgtgagccaccacgcccggcagatgtggctttttgataggcgttcttgatctttttttttgtggggcggggagtggggggttgtgagtctgtttgagaacctgaggaaaggtatgggccctcttctgagaaaaaggcagagtgacgctgaattttgtaactacgtcaggaggctcttgaactttctgcagctcactcgtggactttgtagagatgcgtgttaaggaagaaggttcagctgagaaaaatgttgaagggatgcctttcgctatttcgacatgtgtggctgtacaccagagtggcccgggtaacataaaaacatgaattaggcggattggccaggctcagtggaggctggggccgagagttatgtcgaagtttgtgaggttaacctgcacccagtgacagtcatggcgaaatttgtgaggttaactcgcacccagtaacgctgttccaatgcaaggtgtgtatttggtgtcatc

SEQ ID NO: 27751 - DNA, 1070 bp, Artificial sequence
  DNA replication origin
atttgttggcagccgcctgttagatggcccatccttagctctgcacagctgtgtggtttgaaagccttggagtgggtccaggcagggagctcccaggccagacctcacacggggacagtgagtgagtcttggcaaacggtgtcaagcatggaaggagacttcagggctgtacctcctccctccctgcagggccgcaccccctccttcatggggaatgggcactgggcgtccccttcagccagggaggttggccatggtacctgcccttgggccaaggcaggagagcaggtgcttcgttggctcctgctctcctgaggtcctgtaagtgccggggcagtgtgaccattgggcagtgttggagacaagcaggctgggcaggcccacaccccgtggaggggtcggcgtggaggggccggcgtggaggggccggcagcgtcgggcgtttccaccatgcccgttggcgagcaccttgctccagcccagctgggtgcgaggctttagggctgtgaggcggggctgtggtgcagctgtaggagtgtgaacacatgggggacgctgcatgtgtggatggttgcgtggggcagcagccagggcctgcgtctggaggcacggaggacgtggaagggcatgccgcactcttatcctagccattgctcgtggcaccttttctttccccttgtccttggcctccacagagctcagatgtggggcctgcagccggggaggtggcttcccttgcccagggactctctggccttggcagtgccaggagcgtgttagtgcacaggctgtgtccgcttggcacgtttatgagtgagtttccgttgtcgacactagcttgtctttttcctagagtaacaggcagcgttatctacagtaagtttagtttatctttgctgggattaagaggaatgtcttttaaacaattgaatgtgtttagtcaaatcaaaatatttagcatctaccacagactcagactcctaagacacctggggcccaacaaggtcttgcacggaggccctgtctgccagcctgtgtgatggatctgccaccaggcctccttgggcccc

SEQ ID NO: 27752 - DNA, 2113 bp, Artificial sequence
  DNA replication origin
ggggcagctgcctcgccctttccgacatcccagacgcccacactagtggctcagtcctgagggggcaggggacaccctgtgcttgtttttcagtttggtggtgactgggggtggtggtcatcagcctgtgtagttgcttactgcttgtgtgaataaccgtcacacccacgtgctttcaggactcggaatggctggtcgcaggcagctcaccaggttggggtgggggttttggtgggactccctggagaacactaaacggcttctgtcttcgcagcctaacaggacgtattatctgatggaccccagcgggaacgcacacaagtggtgcaggaagatccaggaggtttggaggcagcgataccagagccacccggacgccgctgtgcagtgacgtggcctgcggccgggctgcccttcgctgccaggacacctgccccagcgcggcttggccgccatccgggacgcttccagaccacctgccagccatcacaaggggaacgcagaggcggaaaccttgcagcatttttatttaaaagaaaagaagaaaaaaaacacccaaccacacaaagaacaaaaccagtaacaaacacaaaggaattcagggtcgctttgcttgctctctgtgctccgtggaggcctccgtgtgccctcgttgccgtggggacccagctccatgcacgtcaacccagtcccgcccagactagtggacagacctggtgtcaccagtttttcctagcatcagtccgaaccatgcgcccgccctgccccaactgtgtgctggtcctgctgtggccgaggggaccgggtgtgtttggctctttatgcccctcccgctgtggtcctggaactcttcaccagggagggagccctgcgggggccgcagctttgtggagggagccgccgtgcttctgtcacctgctccctttcttgcgtctccctgtgatgggcccttaggcctggctgggcccattacatatccctgtggtggctctggtggcagctttctgtggcccctgctgtgttggcaggcaggtttgcgtggtgaggagcgggaggggttggagtggtgcgggagcaggctgccgagtggagggtgccatcgagggctccggatcccttatcctacttagcagtgttggtctctggggctggaagccgagcgcatgctgggagcggtactgtcagaagtgagcccagttagtaccccgctggctcactgcacgagagagtcctgccccgagccctaggtggggccaggaggtgccttggagaagccagccagagcagagagggctgctgacttccgtgtggagcagagaggcctgagggcctcctaaaaggtttaaatgtccacgcctctccagttgctgaagtagggtctgagagaaccctggcatcagcagacccagggtgcttctgtctcctgcagaccacgccagggagtgcagacaccaccgtcacacacgccccttttgtgttttggttcaagtttctcagagcccctcagagcttctacatctgtgcatcagaaatctcacagccttctcatgctgccggctcatctgggcccatagagtgggctttgccagttgctgttgcacaggaggcgagaacagcacacttcaaccccagcttgctggtcggctttcctctagagagagccggttttggggccatttccctttgatgctttggtggccttgccccgctctgcagcacagacaggccagatgcatttgtcctttgcctagctactccccaggtagagagtgctcctggtggcctggcaggtctgggcccttctctccctgcccaggttgtccctggagggcagccctcactccctttgggggagaggcagacattgctgcccacagacctgcctctgactcaactgtgtccaccctccctggtccctacccccaagtcacaggtgactcagcagtgaccctgtgtgccaggccagatccaaactgagagggaaggtgtcgtttttacactgctaatgacgagagtggctctttttagctaggcgagtacagacggggcctgggagggggcagagatgttccccaggccctgcctgtggttcctgcctgggccttggctgctg

SEQ ID NO: 27753 - DNA, 1080 bp, Artificial sequence
  DNA replication origin
cctcagcctcccgagtagctgggactacaggcgcacgccaccacgtccagctgattgttgtatttttggtagagacggggtttcaccatgttggctaggatggtctcgatctcttgagctcgtgatctgccagcctcggccttccaaagtgctggagttacaggcgtgagccaccatgcccagcctgatcgtttctttgggaaaaactattgagtgaggaaagcgtggctgccgtgtgcacagagcccaggcttccttggtgctgtcccccgtcggggtggagggcaggcagcccggccttcgggttgctcggccacacaccagctgcagtgggacagcgtcccgcagagcgcagggaggccctggagggtgcgggtgtgggagggaggaggcgtccagcaggcatgagggtctttgagagacacagctgggtcttggtggcagcctccatagtgaaaaaatgaaaaaaagtgcagatggtacaggggctgcagggccggtgcgggtcaaggaaggggaaagtggagaagcccagccaggggaccaccggcggtgtgggggaggatgtccagggagctgacggcaagggttggtgagaagtctgaggtgctgtctagggtggctgggaggcaggtggcaggctgagaggcagcatcagagtctggagtttcaagtctagggagcagttttgtggaatgagggtggggctggggttcctcctgccccgggccagtcaagtgctgctgagggctggggtcagcttcggctgctggtgctctcttgagtcgacaggaccacaggagtcccatgctgccactctcctgctccgccaggttacaaggggccaccttcctggagtgaagtgagccactctgagagaatgaatgattctggggacggcagttctggatttctgagctggacagcttcaggaaaaactgtgggaggtggggccgtggcacaaacgtgatgggagggtggaaaggctctgagcactcactcagcgtctcggccgtctccaggcgttttcggttttgttgttttaacttttttcaaccagcagatactgagttgtctttt

SEQ ID NO: 27754 - DNA, 1174 bp, Artificial sequence
  DNA replication origin
agctggggcagaggcggggcccactcagaccgcggcgaagggacgatgggcgcggccaatgggcgcgggcggcggcggcggtgcgacggaagtcctgcctggcgtcgcgcgggggcggggcgtcgcggggggcgggggcatcgcggggggcggggcgtcgcgggcacagcgtgagggccgccgttgctggagttcagcttagggaaggaggactctgaggaggccccgagcggcggagcgcttcgggggaggcgcccgcgcagacgcgaggcccatagccaggaccaccacctagctggtgagcgcgcggcgaggcggggcggcccggggtcccgagggtcgggtgccgccttacctgcggccgggcggccgggccggggatggcgggcgccggccgagggcgctgcttggctgcggcggggagaccgggcctgggttgcgtcgggcggcggcctggccgggggcgctgacagacgcgcggagggcgggggaggccgggaggtgtcacccggcccagcggggtggaagtgcctggaaagtttgttttcggcttggcgcagcctggagccgagcctccagggttacctttcggttctgtctgtagaggaaccgccctgggcttccacctggaacggggtccttggcgcctccgcctgcgagagaagcagaaggtgcaagttcttgctgaaagcacctgatgctcctgggcccccttttccagattcttgatgacattggtcgggaaaactcgcctttcacggcccggccaaggggcatttgggtgcttttgctgcccgtggctgtgctcagcgttgtgggaagcccctgggaggccgaatgtgcaggatcaccgaggggaaagtgagcttgacaggtaggagggattttaggggaaggatcaaaacaaaccacttgttgggtgaaatgttttgctaaatgtatcgctggtgtttattttctctctgtcgctaaaagtatccctcgtgtttttatgttttccatatgctaagttctacagtctggggacgacggtttaaaaatttatgccttgcatgcgatgtgcagtgggtgatggaagaacgtctacatggctttaaaattggatttaaaaggcaaatattttaaatgaaggaaaacccaagaagtttacttgattccttatcttccaggatgc

SEQ ID NO: 27755 - DNA, 881 bp, Artificial sequence
  DNA replication origin
aacggcagagctgttggggggtggagtattggagtcaggctgagcagctcaggggacgtggcctccaggagccttcggaacaagcctggggtggcatgcacctctcaccactgccctctctccggtcagtgcggcatggcagtgacctctgggaggctgtgcccggcgagggcgtgggcgttgctgccctacctggtgttgggcagccctcacgtgacacatggagacagctgttgtgggccacgcacagtgaggctggctggctccgaagctctctgctcgggagcgtggggtgatttcccctccacctggtctctggagctgccatggctcattttgggagttcacctcagcagcattggccagcgcctgagcctgtcctcaggggagcccaggccgacttgggggtggcctcagggggttcctggacactggtgagggaagtggggagggtaccttgaggaagagttttgaggagattggagggtggggagggcagggggccgaggggccgtgggctctgcagggctgacgtggtacagatgaggaggggatccccgcagcgtgatctgcacttggggtagggccctctgagggctggtggttgttccatggggcagtcgggaggggccagcacatgaggtgggctggccaggctgaggtgcagggccgagggcttgggtgaggggcatctccaggagggtccgggcgtcggggtgggggtgggggctgcagtgggcatggaggaacagagggagagacttaattggggaggggggactggactgctgagggacccgcgggccgagttgcgcttcatgtctgaggcccaggactgagtgggctgagaggcccaagagtcagcgcctttgggtgggtct

SEQ ID NO: 27756 - DNA, 2420 bp, Artificial sequence
  DNA replication origin
gcagggagcatggagacacagctcctgcagactcccagagagcgagaaggcctgacagtgcgcgcccttctgcaagcaggatcctcaggcttggaaggagcaaggggtcggggggccagggaataaccctcccggtagtgtttgcattttaaagggcacttaattagcacaaattaatgagcagagcatccagggcagactctccatttcccgttgcccctgaccccgcttctgcagggcacccctttgcctgccctgcaccttctccacctcctcctcctgcccatccacagctgccccctcgccgcccgctgccttatcgtccagcaacccccggggtgtctctgcccaccagtggtgttggggagggtgccccccagactgtgaggcagacagaaaggaagaggatgccgtaaaaaccctgggggtgcttgggccctccatggccacttcctgtccccacagcccctcaactccaggggactggttatcttttccgggcagagtgaagacatggtccatagcagctggcccgggcaccggaaggcactgggggttaaggggaagctgagggcctaggtgtggggaggtggctgttctaacccctccccagctacgggcgaatcttgcccccacagaatcagacgcgtggagtgcaggggtggtgagaggactctctcaaggccaggaagttccaggctttgctaccctggggctgtacactatggtcctggctggggtctccaagctggggtagaggctccagtgtttggttaaaggcccagcaagaggccctttgtgtcctggggtgtgggaggcaatggacagcagaaaatatgttcccatccttggttcccccgaacgaccccatatcttgcttctcttccgggcccctcactttatccgctccaaagcccccttgcacagcccagcagggggtcctgggcctcgtctgccaagcctgctgcatgcctgggagaggggtcagctcttgggactctggaatcttgagaaggctgatccctggtggccaatgcagaccactgtaccttctctactcccctgaggccagggagaagcctgtggggctcgggcctcagcctcgggaccaaagtgagacttggggaaggagctcattccggagcagactgtgagagagccctgggcagctcaaatgtagagacagctcccgggcctcttccgctctgagctgttccgggaggaaaggccaaccttacagtgccagggctggaggctggaccctccccagaaacttccagacaaggatgggtgtggagtgtggagggagaggaccctttccaggatgagaaggggacatctagcctggggatcccttcactggcatctcctgaccggctccccatgtggcaaggagcatccacccttgcagataagctgtggcccatgggcctgggcctgagcatacggcagagccagccctgggggggaaactgcaggcccttgggctctccggtgaggtccctctgtggactgtccctctggagtcctcaggagctggggagggtcagtggagaggggctgcagggttggggagggcaggccaggctgcagctggcctggctgatcaccctctcctcacttccagggtctcagagggccaaggcagcaacaggtaagcacccagggccctggggtgggagggacaggagccggctggactgagccagggacactcatggccagagggaatttggaacgcacaggacactggggaattccagaggaggggaaagtgggggctgtgtggaactggagcccagaaaggagaggaggaggaaggtccacacaagagcaggacgggcagcacagagccttgaggcgcggtgcaggatgagggcggcagggtctgaggatcaccctgaaccgtgactggccccctctgggtggctcccttgcagagggcttgacacctgttctatccttccaggcacctgtttgggtcaggccctgggacaagacccttccctgggttatctcagtgcctccgtggcccccaagaggcaggtgttaggttgcctttctcggcgaggagagtgagactttggggggcagctggggagggtctgcctgtatcccagactgccccgaagcccaggcctccgacttccccaaggtcttcgggcaggtcaggggcaggagggccgaggactggagtgtgaggctgagagctgggcctcggccatggaaccagccccagtgagcgcccccacccgctccccatgctcccccagcctgtggtcgccccaggatgctgaaccgaatggtgggcgggcaggacacgcaggagggcgagtggccctggcaagtcagcatccagcgcaacggaagccacttctgcgggggcagcctcatcgcggagcagtgggtcctgacggctg

SEQ ID NO: 27757 - DNA, 1400 bp, Artificial sequence
  DNA replication origin
cccttgctccttccaagcctgaggatcctgcttgcagaagggcgcgcactgtcaggccttctcgctctctgggagtctgcaggagctgtgtctccatgctccctgcctgagcactgccccttcagcgatgcctcctccccatgcagatccttccttcctaaagtagccctgtacttctcatttaggcagagtcttctggtctctgagtgcttgctcccctcaccccacaatctggatgcccttcccccagtctccataagtcctagtcttttttttttttttttttttaagatggagtctcactctgttgcccagcctggagtgcagtggcgcgatctcagctcactgcaagctccgcctcctgggttcacgccattctcctgcctcagcctcccgagtagctgggactacaggggcccgccaccaagcccggctaatttttttgtatttttagtagagaggggtttcaccatgtttgccaggatagtctcgatctcctggccccgtgatccgcccacctcggcctcccaaagtgctggcattacaggcgtgagccaccgctcccagccaagtcctaatcgtgatctagagatcaaggcccaactgaatgctgcctcctccaggaagccttccttgcttgcttgcattgtctaccttggaagccctatactctctcttgagctctctgtcctgatgggagctctgtctacatcaccctggagccagaatcaagtcttatcttagcccaggagctccgagaaggcaagggctgcatctggggggcctgatctcagggaatgtgtggatggacacaagtgtggctgtgggggctgatgggaaatgggggatgtggacagctgagcccttcagggtgggcgccctgtgggggctggaagcaacagccaggggtgccgggggtgtcaggagcattgtttggggcctgggcctgtgattcgctggtagctggtggggatggtgaagcttagtgggtaccaccagccagagacctggtgggagtgccaccctcgggctgggagtgaggacgtgtccaggagtccagcctctggtcacagctgttagtgaaccgactgcaaaactcattgccaaagagttttggcaatgaccttggttcctcaccccgctcaggggcagtcacagccttccacctcctgtgcacatggcttgctcagagggcaccatccttgtgctgggagactgggggcatggggtgggggaggccgggccactgaggggccactggtgccctcccacccaggagaacaaggaagcctggagtactggctaagctgcagcctgggatgacctgacccagccctgggaggtgacttgaggacagggaagtgtggtggctgccagactggctaggctagcccaggaat

SEQ ID NO: 27758 - DNA, 1882 bp, Artificial sequence
  DNA replication origin
gccggagcccggaccatgaggctgggagcgccccttctgcacccctggccgcccgcgccgcgccccgcgcccaccagagggcagcaccacgacgcgcgcggacaaggctgaggcgggaacggccgcacccccagccccgcccggagccgcccggccccgccccgcccgcgagtaccgacccccggcgccggcggggaaacaggtccggcgcccccgaccccacggcccggccccactctgtctctgacgtcagcgccgtgccccaaataacttcctccccgagcctcttccgccgcggcgccgcgcccagagccaggcggggacaccgaaacggtaaccccggcccggccttcccggagccgcttccgccccgcctggtgccaggaagcccccgccccttccaagggatggcagccggggcccgggtcggccgcctgggccgcgctggcgcgcgcctgaggaacttctggggcctgctgtcccgggaggagggtcgctgcggccaactccggaccccgccccatgtcccatcgcctcccctgccctcggccccgcaaacacccctggccttgactttcccaccagcgcggcccagccccactgtgttccatcggcgctcaataaaatactgaatgaggccgggcgcggtggctcacccctgtaatcccagcgctttgggaggccgaggagggcggatcacgaggtcaggagatcgagactagcctggccaacacggttaaaccccgtctctactaaaaatacaaaaaattagccgggcgtggtggcacctgcctgtaatcccagctactcaggaggctgaggcaggagaatggcttgaacctgggagacggagcttgcagtgagccgagattgcgctccagcctgggcgacagagcgagactctgtctcaaaaaattaaaaaaaataataataataataatgaatgaagctggacggacttcgcgtgcaccgcggtcagctcggggtctgctggggggtctgggtcagctcagggtccaggaaccgaggccaacggcaccccgtgctgcgctggggtgaggggtctgccctggggtctcggggttcagggctaggtcacggaggagtcggctctgggcgcttccttcctgaggagaggagctgggcaggccgggccgacgggttgggccgcatagccgggcctgtgctcatctccagcataaaactccacttcatggagcctgcacctcgctcgtgctccaacgcttctgccaccgccgaccacggccctgcgccccagccaggcctgaggacatgaggcggccggcggcggtgccgctcctgctgctgctgtgttttggtgagtcgtgaaggtgcagggtcctggtggtgcagtcccccaccaggctccgctgcactgcctggggctccggctcagccccctactccctgggacaggctggggctgtgggacaggccatcatccctcctgcccctgagcaggtgggaaggctccagatgtgccaagtggggagtccaaagtggggaggcagggtgggaggtgtgcgcacaggccccagaggaccccaccggcataactgggcagcacctcctcccatgcctctccgcgggcactggtgtgccagctctggccaggctccctgcttcctgccacctcggcctctccccccattctctaggtgaggacaggggcctcctacgtgcaggatgtgaactcaggctccaagtgcctggaccatcatactcggggtgggagggtggccgagccgagggctgctgcctgtgcccggaagccccagcaggctggctgcaggctcagtagagagctgggggcagggggtgtaggtggcagagggccctgtctcctgctgacagaggaacc

SEQ ID NO: 27759 - DNA, 1370 bp, Artificial sequence
  DNA replication origin
acccgggccccggctgccatcccttggaaggggcgggggcttcctggcaccaggcggggcggaagcggctccgggaaggccgggccggggttaccgtttcggtgtccccgcctggctctgggcgcggcgccgcggcggaagaggctcggggaggaagttatttggggcacggcgctgacgtcagagacagagtggggccgggccgtggggtcgggggcgccggacctgtttccccgccggcgccgggggtcggtactcgcgggcggggcggggccgggcggctccgggcggggctgggggtgcggccgttcccgcctcagccttgtccgcgcgcgtcgtggtgctgccctctggtgggcgcggggcgcggcgcgggcggccaggggtgcagaaggggcgctcccagcctcatggtccgggctccggctccccgcatcgccctccctagccccgccctcccgcgtctccgcctccgcctccaccgcctcctcccacccttccctccccgtccagtccctggagttcccgggtcgggggtgggaggcgggctgggcagcccctgggggtctggagggaaggagggagggcgaggagtgggaagaggggactccaaacgtattcattcatgtattgatttattcattcagtcagtcagtcatttctgagcagatttgagcccaatactgtccccggtttggggaatacaaaggtgacccaaacagacctcacctcagtgtgagagagagaacatcatttagcagagaaatctctaattataaaccgcgacgggctgggtgcagtggctcacaccgggaatcccagcactttgggaggccaaggcaggcagatcacctgaggtcaggagttcgagaccagcatggccaacatggtgaaaccccgtctctactaaaatacaaaattagccgggcttggtggcgggcacctgtgatcctagctactcaggaggctgaggcaggagaatcacttgaactcgggaggcggagatggcaatgacacgagattgcaacactgcactccagcctgggagacagtgagaccctgtctcaaaaaaaaaaaaaaaaaaaggagaataataattatcaaccacggaaagtgtttcaaagtgtctgggtgaccacatttctccagcaccctatggtcaggtcactgatgggatctcagaggcagtcttagagcctcgcaggtaactatttcctcttggcacctttctgtgtgttccttggtgtctgctccccaaccctccttttaagcccattcctctaagggtgtctctgccttaaaatcaagaaagtgacaaaagtcaagatgcagatcagggccaggtgcagtggctcacgcctgtaatccca

SEQ ID NO: 27760 - DNA, 1448 bp, Artificial sequence
  DNA replication origin
aggtgagccgctccagcagggacagcacaggtggtgcatggtcggggctggacatcggggttagtcggcaaggatgaggagtctctggggatggaggctgaggcttggggttctcaggcaagggcaggcctaggtgcagcagagaattgtttggagggaggaaatcaagctttccttctagaaagggtgacagggaccaaagggagagggcagggacagcccctggaaagggcaggtgaggaaggtgaggctggaggggacccaagaagggatcctggggaggtagtggccaagagcagggtgagggccaggccgcacctttcgctgtacccagctctccctggggtggccctggccctgctctgctgtcccctgcaggacaggtgcctcaggcttgtcccagcttgtcctacagcaggtcctcagcacccacaggtcctgccttgggctctgcagaagcagggagtggtgaggtcaggaccctgggccacagaagaaatggtctgggggacaaggacgggggttgggggactgacagctgttttctgaaggcccggggagtggaggagaggggtgaggggccaaggcttggggctcagtatgggggcagctgcagggggtgagggggccagtggggccagtgaagagggcctagggtctggtatctgcagcaggcactcacagaggacagactgtttgcaaggtaggtcaggtgacagggagccaggggggctgaggaggctcagggcctgactccagggagagcagttgccatcccccaggtccagaggggccctgggaggagtccaggcagggctgaagctggaagaagtaagaggggctggcactcaaggactgcagccactggccaggtggggccaggtcggaccggctgccttccctggtctcagccccagccttctgtggctgcctcccccatcggagccatcagagagcaggatgtgggaggggcaggtgaaggacagcctctgtgatagtccctggtgtgctgcagcctggggtgaggggccttggggatgggaagggctgggagctgggagacgatggctcccagcacttggtcctgaggggccttggagcagcttcccccaggcctgcagaggcaacttctgacactcggggagctgaggccaagggaaggctccccagacacaaggagaaggggctgggggcagccagaaggctttgggctaccctccctggaggctcaggtcccaggtgacccctccagctgtgttccttccaagattgggacctgcaaagattgcagatgtgaggaaaggaaggtgtcttgggcattcttcccagtgtggctgagctgtgcctgtgaggacatgcagacactcagaggacctgtcctcaggggccccagggtgaaggtcaagatctcaccttacaaccagccgggccctgactacttccagcca

SEQ ID NO: 27761 - DNA, 1271 bp, Artificial sequence
  DNA replication origin
cgttgccgaaagactaagcgtcccgttggccagtgcaacgaagaacggaggaagcgacgtaagacaccgcgtattcgtaggccttccgctgcggggaggagcacagggcctagcggcagcaaagcgacgcccgagcgcgtctcgtctcccgctgtcgatgcagagcattctgggagttgtggttcgggcgtgtcgcggagcccggatgtaatttcggctcggggcgtggcggccattttgtctccccatgttgggagacgatatcccagccgcggtggtgctgccgctttcgtgtgactttgggtttcccgagcgagcccgcagctgcacagcagtccgccttcccgtacccgagagaagccgcctcagaccccagccagcgggcacccccggaggccccgagcctggctgcaggccctagacctgcaccaggggcccaaccagttacccgtagcatgggccacgttctcccgctgtagaccgggctgaggcccgacggccacccctgggggaggagttttcttagcttccggtagggcagccaggccggggtcccaccagacccaggacgtgataccggtgaagcggcacatacaggaacaaggcaggaggaaaataataagcaccttaaagtttccacttttcggtaccgtacttcctgttaatgtttctaagcccgtgattctgggcctgataatcagccagccgtcctcacagcagagttgtaagacgctgggctgctcaagcacaagttcatatctagacccaccgctggcgagcagccctggacgtcccgcttagctgtcctaaccaactcaggtggccttgatccgcaacaggacgcggtaccacgtaatgaactgtccatttgagtgcaaggatttatatttgttattacgatttgggggtgtttttaagaggcagggttttgcccaggctgttctcgaatttggggctcaagcgatcctccgacctcagcctcccaagtagctgggactacccgtgcatgacaccctatctggcccttgttttttgttgttgttgttgttctttcttttttcacgtggtttcgcacttgtcacccaggctggagtgcaatggtgtgttgtcggctcactgcaacctgtctctcaggttgaagtgattctcgtgtctcagtcttccgagtagctgggattacaggcgtgtgccaccacgcctggctaatttttgtatttttagtaaagacggggcttcactatattggtcaggctggtctcgatttcctgacc

SEQ ID NO: 27762 - DNA, 945 bp, Artificial sequence
  DNA replication origin
ggggaggggcgggggggggtgaagcccgcgcgcgacaggaacggcgggaagggggaagggaggcgagggcgtccgcgccagcgaagggcgtcgagcgcgcgtgcgcgcggaggagctcggcggcctgggcagttctccgcgcgctttggcctcgcgccggggccgccgcccctcccccacccggctcgctggctccctcaccctctcacccgccgcctccgcccgccgcctccgagggggagaggtcttgccgccgccgctgctcgagctcccgagtccctcgggcctggggccgccgcctcgcctcgccggtccgcccgcctcagccgacgccgacgcctcctcgcttcctcaggggccgcaacgggctccaactgcgccactcgcaccccgcctgggccgcgctgcacgtcagcacgactaactgcgtgcgtcagcacgcaaacgcgcgtcgcggggcctgccgggaactggagtgcgccccgcggccttttgcgcaggcgccgaagccacaccgcgaagtaccgttttttcaggcacaaggaaggtttcaccccgttgccgaaagactaagcgtcccgttggccagtgcaacgaagaacggaggaagcgacgtaagacaccgcgtattcgtaggccttccgctgcggggaggagcacagggcctagcggcagcaaagcgacgcccgagcgcgtctcgtctcccgctgtcgatgcagagcattctgggagttgtggttcgggcgtgtcgcggagcccggatgtaatttcggctcggggcgtggcggccattttgtctccccatgttgggagacgatatcccagccgcggtggtgctgccgctttcgtgtgactttgggtttcccgagcgagcccgcagctgcacagcagtccgccttcccgtacccgagagaagccgcctcagaccccagccagcgggcaccc

SEQ ID NO: 27763 - DNA, 845 bp, Artificial sequence
  DNA replication origin
gtatgggaacggttggaacagaggaggctggtttgatgtgtttaaatagagcagagttgaaaacaggtaatatttgacagctggcaagacagggaggaactgcaaattgttgtaaatcctattgagaggaaggaaattgaaggaataaaatatcaggatagttgataggatctttaaatatttggaatcaaggaaatggcccttacctgggaggtgaagtatatgacgattatccaaggttcatgtgtgtttctgatgtgcatgctggcctttagttggggtgtgaggctgcacattctgaaccaactagtctgctgttcagatacctaggggctgtgtagtttatttcatattcgtatagggtggtctgaaatccttaggtaagtttttgggagagtctttggacatggactagaggccgttgggtgccacagatctgtgtctggtgtttgttgtgaccaggaggctttggttggttaccagaggttaggaattagagtagttggtaaacacaccacttgtgcattttggggccaaaggagaacaaaaagggacagtgtggagagattttagaggaacaagatccttgtttgcctagggtggaaaaagaagaaaatttaggtgtagggagggattatttagaattctgtgcaagggcattgagagaaaggctgtaagaactgggctgtgatttggtagaaaggaaatttggaagggcaaagaagtggttttcttgggagaccaggaggatggtggagcattatacagcgaagacttagtgtgaagatcaatgttgaattagggatgaaggagagcagggacttgggtgtggggcggtaagtggt

SEQ ID NO: 27764 - DNA, 1861 bp, Artificial sequence
  DNA replication origin
ttctgtgcaagggcattgagagaaaggctgtaagaactgggctgtgatttggtagaaaggaaatttggaagggcaaagaagtggttttcttgggagaccaggaggatggtggagcattatacagcgaagacttagtgtgaagatcaatgttgaattagggatgaaggagagcagggacttgggtgtggggcggtaagtggttagtttggggccaggggcctgacccgtgtctccccgctccccctcaggagcggtggtgccccccccgggcacggggccatgtacaacgggatcgggctgccgacgccccggggcagcggcaccaacggctacgtccagcgcaacctgtccctggtgcggggccgccggggtgagcggcctgactacaagggagaggaggaactgcggcgcctggaggctgccctggtgaagcggcctaatcctgacatcctggaccacgagcgcaagcggcgcgtcgagctgcgatgcctcgagctggaggagatgatggaagagcaggggtgagggagagctgggggagagtcaagcactgaatgagtgcagagctgggggtgttaggtgggatgtatagggagcttagggtggttgaaagaggcctggcaaagagttgtggtaggggaggaggcagatgagctctagagaagtgaaaacagttaagggacagtgcagagtgggaaatgagaaggctgtgtgtctggggcatagatgggagcctgaggtactaaatggaggcacgtgggagaagggaggggccattgaggaacaaaaatgtgttttaaggaagagatgggaaagcagagaccaggtagaggagctaggtaagctgataggtgttgtcattggtagaaaagaagaagataaatggatgtaaggattgaggccttggaaagtagcataggcaggaaaagaggaattagaagaatacgtgaagaagtgggaatcatgggctgggaagggaaattttggaaaaggagcccattaaggcagaaaactcttttagagcagtggttttaaacttcagcaatggtgatccttttatacagtatcccttactttggaatcccaggaagtaaaaggcacattcttgttgaagttggggaggagcacttggaaccctgcttgcttaacttttttcttttggtccctgaggtgtagcatatttaaaatccactgttctagagggagtagtaagtagagggaagaaagatgatgggaaaagatcagacagaagggacttttgggtgagcgaaaagttctgtgtgcgcatggagagggaggggccccttttgggaatgagggaaatggaaacctgggactggggaaagtgtcctgtcgagcttaaccctgaagggatttgttcttcaggtacgaggaacagcaaattcaggaaaaagtggcgacctttcgactcatgttgctggagaaggatgtgaaccctgggggcaaggaggagaccccagggcagaggccagcgtgagtgttgcgctctccctcgatgactctggactctactctggctgctggctgctgctgctgtccttttccttacgtgggacttcctccctgctttcgtctgcctttcccatgccttatttggctcctgcttatacttgtgttctgaatatggctctgtcctttatatttccttcagacttttgcccttcttttctctagggtcacggagactcaccagttggcagaattaaatgagaagaagaatgaaagactccgtgctgcctttggcatcagtgattcttacgtagatggcagctcttttgatcctcagcgtcgtgcccgagaagctaaacaaccagctcctgagcctcccaaaccttacagg

SEQ ID NO: 27765 - DNA, 1506 bp, Artificial sequence
  DNA replication origin
aatttatggagacctgcaagagaagatatgggtcaacagggagttcccaccccagccctcaaggccagtttctgggccactcccaaaatggggccgccacccaccaccacaactggctcccggaagggggcatcagccttccaggacacgcacctggaggagcggtgtctcatgggccgagggctaggtgtctccctcctgcgcttgtggctgggggagcggctgtccccacgctggcctctccgggaaccccgctcactgctgctgctgcaacacaggacagacatcaggccacagggtggcaccacctcaggcaccacatagccacaaccgcaaagctttcttctttgtagaaagcagtggcggccagacaggctgggtgctgacacctgcagttggccttacctctgctggtcccgtggtgagggctggggcgagggacggcgacgctccacaggcgagtagctgagggaccgagagtccctgagggagtctattggcttccgggggctgcgggacctggggaacacagtaggacccaatagcaccacaccctttcaagcacacgggccagcactcaggaccacccgcccaggtcctgaccaccaaacctcacaccacacagggccagcctcagacccacctttgtccgctcactcacccatccgcccgcacaccatccaccgagtgcccagtgggcaggcacagggtgcagcgggggatgcaaagataaagacagtccctgcccttgaaggagctcagtggtgaagaaaggcacgcacggccccgtgtgtgggaagcagggctggatgtgcgtggctctggggacccaagggagggggacatggggcaaggcagggaaggggcagggcagtcttctcgaaggtgctgttttgagcggagtcttgcagaacgaggagttcaccaggcggacaaggaaattccaggcagaaggaacagcatgtccaaaggcatgggctctccttagactgcaaggcgctgggtgtggctggagcacagggcatgtgtgggggcgggcaggaggagaacacagggcgggcaaggcccgttggtgaagagcctcacacgccactcccgcagaggtggggctttgtcctgcaggccacagggcgtcccgaaggatttgtggagtggagggaagtagccagatgtgcgttttagaaaggtccctctggctacatgtggaagagaatggcgtggagacggggagacagggaggaggctgtggacagagtcgggagaagatgatggtggccagaccagagccctggcagtagcaacagggagacaaagctagaaccctgggaacaggctatgtgttgagggagggagaggaagaaaccaaggaccccctggtcctggcctgagcgccgctgtggatggcgcagcccttcgccagaacagggtgcaacgagcatggggagaggagagcaagtgcctcctcccccacaaccagatgcccaaggccacgtgagacacccagcg

SEQ ID NO: 27766 - DNA, 1504 bp, Artificial sequence
  DNA replication origin
cgggctgccgggaacggggcggagcgcggctgcgccggcgcgtcgaggggagaggcagcagccgcgatggtgagcgggcgtgggggaggggcggccgggccgggccgggggcggcggggggcggctgggccgcgcggggggcccgggcttcgtgctcacgccggcccgccgcccccaggacgtgttcctcatgatccggcgccacaagaccaccatcttcacggacgccaaggagtccagcacggtgttcgaactgaagcgcatcgtcgagggcatcctcaagcggcctcctgacgagcagcggctgtacaaggtgggtcccgcgggcgggccgaggggagcgggtacccggcgccgggcacggggctgacgcctacgctgtccgcgatgtaaacagtagcggccggcgacgcctgcgggcgcccgagccgcgggactgggacatccgttgtgcgggtgaagcgcgagctgcgctcgccgcggggatctccggtccgggggcgatgtttagacctcgtgccgggccccgggcgccgagggcaccgtggcatgcaacccctgcaacggtatcgcccgcgccgtgcagttgacgaaattgaggttcggcttggtcgcttaaccagccaaaggtcattggcagcgccagggttcgaaccacgaccccttaatccccacccttcttcgcaggcccatcggaatcacgctgtccccccggacactccttcgggtggagggtggggaactcagtgaatgcaaagaaagtcaggtcccactcgttcttcaccaagcaaccgtttgttattacctcccgacctcctgctgatgtcctagaagcccccctttccccttgcaaacgaactgagattattcagtcagaatggcttggggtttggggtctgcattggggagtcagatgcatcagcctctgatttacgtctcccaacattgtgaggttgtcgcccaagtgcattgttcagattctagagctggaaactgggaaactgacttttagctccaggctcagagcctcagctcccatggtctctaaaggcctttcctcactcataactactgggacttagcaaatattaaatgaccgtgcctgtgcatgtcccgtgtgccacatgtctacttagtgctttatgtttcttcctagctcattgaaaccctctggtggccctacgaattgagaattctggtaattcctagtttacagatgaggaaactttgcatcaaaaggctcaactaccagccagccgtggtggcatggtcctgtagtcccagctactctgaaggctgaggcaggagaattgcttgagcccaggagttccaagctggagggggctatgatagcgcttatgttgggtctgtgccactgcatgcctgggcaacatagcgagaccctgtctctaaaataaaaaaatgttcaaatgcctagtccagggtgacagagctgggattgaaagccaggtctgcctatctccagatagctcagtggctcctc

SEQ ID NO: 27767 - DNA, 1815 bp, Artificial sequence
  DNA replication origin
ccgcccgcgggacccaccttgtacagccgctgctcgtcaggaggccgcttgaggatgccctcgacgatgcgcttcagttcgaacaccgtgctggactccttggcgtccgtgaagatggtggtcttgtggcgccggatcatgaggaacacgtcctgggggcggcgggccggcgtgagcacgaagcccgggccccccgcgcggcccagccgccccccgccgcccccggcccggcccggccgcccctcccccacgcccgctcaccatcgcggctgctgcctctcccctcgacgcgccggcgcagccgcgctccgccccgttcccggcagcccgcgcgtggcccagcatgccccgcgccgcgtcccttcccccggcgcagccccgccccgtgccgccccgcagccgccgccattttaagtgatctggaagcgggcggtatcgaggggcgtgcggccgccatcccgacggcgggcatggcctttggaggcggtggcgccgtcttgggactggcagaggggaggtccccgtgttggtgcggtccggcgggctccaagctcgggcacaccgagctcggggccgtcttgtcgcggcgtagtcgtggccgccatcttgggcaggctccgcatttggggtcttctggccgccgtgctggggacagtcacccccgctccctgacccgggctggatgcgaggactgtcgccgctcagaggggcttatgacctgtgaagagccctgggggctgctgttgggcttagggatggcccgggcgaactccttgggctagaagaggaggcacgggagcggttggcgaccgctcttcgcaggaggagggaaggggcagctccttgccccaggagccctgggcgcctgtccgccttcctgcttggctgcatttcggctctgaaaaggcctagagacttgattctcctggctggccgctctttccaccaaggccctgtttcctgaatgctggacactatcctgcatcgccccaagttacatttacatgagagtgagggccccccacttgacctctcccttgcagagacaccccaggctgggtcgtgctgggcgggtgtcggaggcggcgttggagagatgagccagagggtggccctggacgccaaaccgccctgcagtcctccgagctgcgctttgagggctgttgagagaggggtggaaggtggaggtgcgatttttgcctcggcatctagagaggcgaaggagcagccctgggctccgctgctgactgtggccatgggccgttaacctcatcaaagcccagtttcctcctgttgtagatgggagaggaacagtttttgaactgcgtagaacctcggcaagtcttagcgctgcatttgtgttttctaagctgtaattctagttattgctacttttgacttgtggaatgtggctcctccctggggagtcctccaaagtcccttccctcgtgtgacttccttcactgcggttcactgcagcccctacccccgctcccagggtcctcagcatcgcagtccctgcagaacctgtctcttcttcatgacgtgagtcatgaggcattggacaggtaattgctgggaagagctcttggccaggctaaaatttctttctcagtcgcagtgtctggctgggggcggtggctcacgcctgtaatcccagcactttgggaggctgaagggggtggatcacttgagcccagaagttcaagaccagcttggccaacaaggtgaaaccctgtctgtactaaaaatacaaacaaaattaggtgggcacggtggcgcacgcctgtggtcccagctgctcgagaggctgag

SEQ ID NO: 27768 - DNA, 1531 bp, Artificial sequence
  DNA replication origin
ggccagcccacctttcccactgggacaccttcatcacagtggggcaaaatctatattagtttttattgctgtataacaagtcagcacaaatggagcagcttaaagcacacatttattaagtcacaactttgtaggtcaggagtggctcagctaggttctctgcttagggtctctttaggttgaaatgaagggattggccggcggggctcttatctggaggctggggaagaacttacttcccagctccttcagggtgctgccagaatccagtgccttgcggctgtgggtctgagggttccgattccctgccggctgtctctcagctcttagaggccgctcatggctgtggtccccgtgtcctcaaagccagctatggaggatctccctggtgtcaaatctctgtcatgctgtgaatctgactttctccagaaaaagatgggcacacaggccagatgggcagcaattggtttgcccatcactgcgtgccttgcgcccagccctggccagggccaagaaaagtaaatacaagccaggaagggagtggggagtgtgactccctgggactcatggcagattcctggatgagggttggtggagtcagagctggtgatccccaaagaggagaggaggcaggaggtggtgggtggggggtggggtggcctttagcttttttaggcatcttggcctcgaggcagaagggatgtggggtataggcaggtgcctggatgaaccaggaggctgagggaccccagcagctggctccaggtcagcctcaccggctagcattagaagctgacgcgagcctgaatccaggggctatatgtggccacactggtgtagacccctggacggttgggcagggcacaacccttgccccagctcaccacgcccaccaggacccagctcccagactgcaggcaggtcagaggtcccccagaatcaccctgcaggagaaagaggagcctaagtcccagccctcccaggacttcagttctcagggttccagacccctggcgtggtgcctctaggttggaggccaggatcctgagcctgagttgggatgtcctgggtcctggagttcagggagggagggtgctgggcacagggaggggactccggaggctggggaggctgggtgcacacctggcaggcgtccttgtggccctgggggtagccggcacacagactcccaggcagcacaatgcgctcagcctggggcacgtccgcgcccacgtggtagaggccgtcgcaggtgcgcgagtccagcagcggcacccttactccttgtagcggtcgccactctgggaggggcactgggggaagaggagggacctctgagaggaaggcgtggagcgggggccagtgggagaagctgagctctgagtgagaggaggttttgttccctagaagccgcgctgggtcctggattggggcagtgaggggctgggatttccagtcagatggaggaggacgtgggggctcccggatgcctcggagccccgccctcctgccttacctcctgggcggaggc

SEQ ID NO: 27769 - DNA, 1790 bp, Artificial sequence
  DNA replication origin
atgagggagggggtgacgatgggggggtgaaggatggaggaggggtgatgagagaggagtgaggatgagggagggggtgaaggatgagggagggggtgaggatgagacaggggtgaggatgagggagggggtgaggatgagggaggggagtgaggaggagggggctgaggatggaggagggggtgaggatagaggaggggtgaggatgagggaggggtgaggatgagagaggggtgaggatgagaggtgaggatgagggagggggtgaggatgagggaggggagtgaggaggagcaggggtgacgatggaggacggggtgaggatagaggaggaggtgaggatgagggagggggtgaggatgagagagggatgaggatgagggaaggggtgaggataagggaggggagtgaggaggaggggggtgaggatggaggagggagtgaggatgagggagggggtgaggatgagggagggggtgaggatgggggagggggatgagggagggagtgaggatgaccgaggggggttaggctccagggcttctgtcgagaccaaggatgcccaaatatctgggtggtgggtgctgcatacctgggccctgggcagaacgaagggtatacagcctgggccaccaggataagtccagaacccaccaggagctgaggacagacagaaggaccacggagggggtgacgggctggtgtgaggattggtgcccctgggccaggactctcctctcttctccctgctggctccagaccagagtccaagccctaggcagtgccacccttacccagcccagccttgaagacagaatgagaggggtttcctgtctccaggtcctgctccttctggtgctgggtgagtggggacagggactgggggtgagggccgcagacaccttggctcccagttctcccatctcactgctccctgggccgggctccctggagcactcttgggctttctaatcttgattccaagggctcaatcctctctgccactgaccttgacctcaccacacctcgatgtgcttgtcggtgtcatgctcatacgcccttgccccctgcaccttcacagtgctctggggagggttaaataagataacagacggcacgaaagcctggcgcaatgtcagggcaacattgtttcaccctccttcctcatctctggcctcccctccaactccgttatttgacaccaaatctataatctggtcccttccctgcttcctcctccaggagctgctgggactcagggaaggaagtctgcaggtgaggaagcctcggagtccacccgagtcagcccctcctggacctcggccccgtgtctccccaccaacacctgcctcccaggccccaggtcctcagccaaccctcaccgcccctggtccttttctagcctgcgggcagccccgcatgtccagtcggatcgttgggggccgggatggccgggacggagagtggccgtggcaggcgagcatccagcatcgtggggcacacgtgtgcggggggtcgctcatcgccccccagtgggtgctgacagcggcgcactgcttccccaggtcagcgctcaccgagggcccaggcggggtgtgcaaggaaggcaaggcccgcagaggaccgggcgtggcctggcagaggcgttggggtcgaggcgggctggagggggtcgaggacccggtgctggaagtagtcccccgctcctgtcctgcaggagggcactgccagctgagtaccgcgtgcgcctgggggcgctgcgtctgggctccacctcgccccgcacgctc

SEQ ID NO: 27770 - DNA, 1556 bp, Artificial sequence
  DNA replication origin
ccatctcggcttcccaaaatgcagggattacaggcatgagccaccatgcttggccaagaccctgtctctttaaaaaaaaaaagaaagaaaaacaaaaaaaaaaaaaaggaaaaaagtacaactatggcagggctgcaaaggaggcaggaggaggtggcagagcagaaggctgagggataagaggagttcactatgcagagagggacttgagagacttctaggcagcgaacactgtgtatgagcccaagagggaactacagggccctggaccatccgggccccggtcctccacgggcctcgagagaaggggagttcctgtcccctgaccccagcatcttgctctgtctcggccaccccaaaccaaagactgcactggtccccaaggtcaagtctccccctgcctctggtcaagtaaggagtgccaccaactttgaaccagtccctttccacctccagctgctccagaccccggatctggaagggggctggccatgctggggtctctgggtggagctgtctggccaggacttccgtctgagatgggatttctggacagaacaatggagcgcagaagctccagcaacgtgtgctctgcagggagcccaggtcaggtttggagaggagttgccccggatcctgcagagcttccccacctgactgccacccctcccagcacctacccgcaccactgctctccgccagcccccacttctagtaccttggcgcaaggcaggcttcctttgagaaacccattgaccctttcctgccacctctgaagctctgctcaaagcatctttgtttgaggctggtccggtaaagccacagccccgccccggccctgttcattactccttggctgagcctcgcgctctcctggcactttaagcccccaggccctccctcaaccccagtcagcagaaggcgccaggctgtgagggtgagagcaagccaggggctgtgggggctgcaggggcagccagtgggtgaggatgagggtgaggacgaggaggggtgaaggatgggggagggggtgaggatgagggaagtggtgaagatgagggaggggagtgaggaggaagggggtgaggatagaggagggggtgaggatgagggagggggtgacgatgggggggtgaaggatggaggaggggtgatgagagaggagtgaggatgagggagggggtgaaggatgagggagggggtgaggatgagacaggggtgaggatgagggagggggtgaggatgagggaggggagtgaggaggagggggctgaggatggaggagggggtgaggatagaggaggggtgaggatgagggaggggtgaggatgagagaggggtgaggatgagaggtgaggatgagggagggggtgaggatgagggaggggagtgaggaggagcaggggtgacgatggaggacggggtgaggatagaggaggaggtgaggatgagggagggggtgaggatgagagagggatgaggatgagggaaggggtgaggataagggaggggagtgaggaggaggggggtgaggatggaggagggagtgaggatga

SEQ ID NO: 27771 - DNA, 1572 bp, Artificial sequence
  DNA replication origin
tggaggccgcgagggtcacttcttgtgtcctgcagagtcgcaggaggaggagctgttgtcaggtagggcgcccaggacgcgcgatgccagccagggcggctgggccggggtgcacgggggcccatctactgctctctgttccaggtcccgagaacgtgatgctctcaagtaactaatgggtcctaggggtgggaccgtccactgcccaccacgtgggagggtccctagcgtcaccttcttggcgcgcggttccccggggagccccccgctgcgcgcaccccggggcaaagccgggcagggcgggcctgcccaccccaccccacccggcagctcagccgcgtccgtctgtccatcccagaggcctgcggccaccgggaaattcacgcgctggtggcgggcggagtggagtccgcgcgcgggcgctggccatggcaggccagcctgcgcctgaggagacgccaccgatgtggagggagcctgctcagccgccgctgggtgctctcggctgcgcactgcttccaaaagtgagtctggggggcggccggggcctcagacttgctaatggcctccaggatgagcaaacagtagccacccagcagcttggcctcagggactgggcctccagcgtgctcaggcggccagccccctattccaaggctccccgccctctctccttttctgctaggcactactatccctccgagtggacggtccagctgggcgagctgacttccaggccaactccttggaacctgcgggcctacagcagtcgttacaaagtgcaggacatcattgtgaaccctgacgcacttggggttttacgcaatgacattgccctgctgagactggcctcttctgtcacctacaatgcgtacatccagcccatttgcatcgagtcttccaccttcaacttcgtgcaccggccggactgctgggtgaccggctgggggttaatcagccccagtggcagtgaggctggggatagaccgggtggggtgatgggggtgcggggtgagcattaccctctacccctgttcccgctacacaagcacagcagccccctccttggtctggggctgcaacctgcgcccctcctgctctcattctctcctcacttgcttttctgctctcactgccacctgtcagggcagggaccaaacacccagttcttcccccttccagggactgtgggggccagcaggacagtgtgagagggaggccagcttggcctgggcctgaaggagtgagggggagttcgggaggacctggtgacagaagcctcaggcaatgatttttaaaaattgaggcaactcacaaaccataaaattttcaagtgttcagtgttgaaggacacaattcagtgatttgtagcctacagtcatgtgtcacttaatgaccgggatatgttctgagatatgcatcatgaggcactttcatcattgtgtcaacatcatggagtgtagttacacaaacccagatggcagagcctgctacacacccagactgtgtggtctagcccattgctcctgggccacaaacctgtgcagcttgttactgcactaaataccagag

SEQ ID NO: 27772 - DNA, 928 bp, Artificial sequence
  DNA replication origin
taggaagtgaggagcgcctcttcctggccgccatcacatctaggaagtgaggagcgtctctgcccggccgcccatcgtctgagatgtggggagcgcctctgccccgccgccccatctgggatgtgaggagcgcctctgcccggccgcgaccctgtctgggaggtgaggagcgtctctgcccggccaccccgtctgagaagtgaggagaccctctgcctggcaaccactccgtctgagaagtgaggagcctctccgcccggcagccaccccatctgggaagtgaggagcatctccgcccggcagccaccccgtccgggagggaggtggggggggtcagccccacgcccggccagccgccccgtccgggagggaggtgggggggtcagccccccgcccggccagccgccccgtccgggaggtgaggggcgcctctgcccggccgcccctactgggaagtgaggagcccctctgcccggccaccaccccgtctgggaggtgtgcccaacagctcattgagaacaggccatgatgacaatggcggttttgtggaatagaaagcggggaaaggtggggaaaagattgagaaatcggatggttgccgtgtctgtgtagaaagaggtagacatgggagacttttcattttgttctgcactaagaaaaattcttctgccttgggatcctgttgatctgtgaccttacccccaaccctgtgctctctgaaacatgtgctgtgtccactcagggttaaatggattaagggcggtgcaagatgtgctttgttaaacagatgcttgaaggcagcatgctcgttaagagtcattaccaatccctaatctcaagtaatcagggacacaaacactgcggaaggccgcagggtcctctgcctaggaaaaccagagacctttgttcacttgtttatctgctgacc

SEQ ID NO: 27773 - DNA, 1291 bp, Artificial sequence
  DNA replication origin
ctgccttcaagcatctgtttaacaaagcacatcttgcaccgcccttaatccatttaaccctgagtggacacagcacatgtttcagagagcacagggttgggggtaaggtcacagatcaacaggatcccaaggcagaagaatttttcttagtgcagaacaaaatgaaaagtctcccatgtctacctctttctacacagacacggcaaccatccgatttctcaatcttttccccacctttccccgctttctattccacaaaaccgccattgtcatcatggcctgttctcaatgagctgttgggcacacctcccagacggggtggtggccgggcagaggggctcctcacttcccagtaggggcggccgggcagaggcgcccctcacctcccggacggggcggctggccgggcggggggctgacccccccacctccctcccggacggggcggctggccgggcgtggggctgaccccccccacctccctcccggacggggtggctgccgggcggagatgctcctcacttcccagatggggtggctgccgggcggagaggctcctcacttctcagacggagtggttgccaggcagagggtctcctcacttctcagacggggtggccgggcagagacgctcctcacctcccagacagggtcgcggccgggcagaggcgctcctcacatcccagatggggcggcggggcagaggcgctccccacatctcagacgatgggcggccgggcagagacgctcctcacttcctagatgtgatggcggccaggaagaggcgctcctcacttcctagatgggatggcggccgggcggagacgctcctcactttccagactgggcagccaggcagaggggctcctcacatcccagacgatgggcggccaggcagagacactcctcacttcccagacgggatggcggccgggcagaggctgcaatctcggcactttgggaggccaaggcaggcggctgggaggtgtaggttgtagcgagccgagatcacgccactgcactccagcctgggcaccattgagcactgagtgaaccagactccgtctgcaatcccggcacctcgggaggccgaggctggcggatcactcgcggttaggggctggagaccggcccggccaacacagcgaaaccccgtctccaccaaaaccagtcaggcatggcggcgcatgcctgcaatcgcaggcactcggcaggctgaggcaggagaatcaggcagggaggttgcagtgagccgagatggcagcagtacagtccagcttcggctccgcat

SEQ ID NO: 27774 - DNA, 1141 bp, Artificial sequence
  DNA replication origin
tgcacagcctggccttggcctgctgggttggggcaaaggtccctgggcttctgatcctgcccctctcccagccagcaggacgttccctctggttcctgagtcccagggatccgctgaggcccctaggaggtgtcagctcctggttttgcccagggtctcagtcaggccagtcctacccggagatctgagccagggactcaggttcttgcctccagtgaggctgggggcttcccgcagaggccaagcctggcccgggggctgcagggaggccctggctgctgcatgggctgcagatggagactctcttgtctgctgtgcctcaggctgcagagtcacagaggggtcttcccaagccccacacctggagggcagggaggacagggacttgtggtcctaacccgactcctgacacataagggccagccggcccggagccacctctgcgggcaggagaaggcctcattgttcccttctcctggcagaatgaggactggggcgtgcccggggcaggaaataaatgctcagtaaatccctctcttgggagccctgatcccaagggacaaagggcctgtgttgagtctccctgggcacgggctcggggccagcacttgggccatggcagatggagggtgggaggagggtgcctcccaccaggtgggcttcttccccaggtcaggcatgcaggtgaggagcgtcctcgtgtgtgcatgccccctgcgtgcaggagaggctgggcgggtgtgtgtgtctgggtgtatgtgtgtgcatgcatcttcaagtgcacgtgtgtgaacgaccatgtgtgatccccgttctcgtgccatctgaacatcccctccagtgtgcatttgggtgagtcctggcgcccctctggccaggctgctaactatcccttccaccaagtcccctcaacctcagctggtgcttctggagtcctggcccaagtgactctccttctgggcgccaaaccctgtcagcctggagttagaaagaaggcccctgaactgccagcaaaacatggaaagacaggtcgggtgccatggctcaagcctgtaatcccagcactttggggagccgaggcggatggatcacaagttcaggagttcgagaccagcctggccaacatggtgaaatcctgtct

SEQ ID NO: 27775 - DNA, 911 bp, Artificial sequence
  DNA replication origin
ggactcctggctcagggccaggcccttggtgctggaggaggttgtaggtggaggacggggtcaccaagagggcagccgggacccctgggctgcagacaagaaagggactgtggggtccaccgggtctgggccacatcaagaagtgtggttgaagacccgcccctaggggctgaaagccagggcgctgccaggcatgagaggccccaaacagcccttgggcccaggagggtgaagctgggagtagagggcagagctcccaccccgccccgcccccagggggcgccccgggcccggcgcgagaggaggcagagggggcgtcaggccgcgggagaggaggccatgggcgcgcgcggggcgctgctgctggcgctgctgctggctcgggctggactcaggaagccgggtgagctcggggcgctgctggcgggatggggaggcgggggagcggtggggaggacgggaggtggaggccgcggggagtcacttcttgtctcccgcagagtcgcaggaggcggcgccgttatcaggtagggcgcccaggacgcgcgattcctgccagggccgttgggccgaggtggacggggggcggtgagggggtagaggggggcctttactgctctctcgcccccgcccccgggatcgagaactctgttggcgtggaaagtaactaacggacgctggagggggatgggcgggccctgcagagcacgtgggaggatctccagtgtcacctacttcctgctgcacacacgcgaggggaccctgggtgggcaaaaacgtgctttcccggacggggttgaaggggagaaagggagaggtcgggcttggggggctgcctcccgcggctcagcagttcctctgaccatccgaggaccatgcggccgacgggtcatcacgtcgcgcatcgtggg

SEQ ID NO: 27776 - DNA, 1007 bp, Artificial sequence
  DNA replication origin
ggctcatatccactcgtgtttgcagcaagggtccttctcagggaaggcaaaggatccctcctccagagggaggcggctccagtgctgagttccccactcccaactgccggggtgtgacttggggacatcccttaccctctctaaggcaaggggccctgacttctccatttactagttcttggcaatttccataaccctctcagttttctcatctgtaagatgggtataagaacgttaccaacttcattcctaggtgagctccagcaggaggagaggccgcgcctggctcactgctgggcccccatgtctagaacagtgccaggcacacagcgtgtgctcaaggaaccacgtttgttattgttactactgttgtgggatgatgcagggacgggccagacaggggagcagagggaagggattcctgatacagggaacacgcccagtctggggctgccggggctcctccggatgctgggcccacttctttcagggcatgtgtgttgggggacacgcaggtgccagggcaggcccaccagaggaacccccagaggggtttccgtgggagctgcggttgagcatggcttggaagtttctggggagaggaatgggctcagtgctgcaggagaatcggccagagctagggtgggtgtgggaggcatggagaggcagcccaggagcctgatgcctggggcattggtgagcactgggggaggtggaaagatgcaggaataaatccaagtatgaggtttatgtcgccaagccctccagaacccctccaccaccgcaccacccacaggcctgcgccaaactggcctccctctcacactctccttctggcccccacagcccctggaagggagagaactgggtgtttggtccctgccctggcaggtgaggagagactgcaagcaagaggggcatagcctgcacccccagaccaagcagggggctattgtgcctatgcaggggaacaggtgaacaaagacagttcctccctgacccgcctg

SEQ ID NO: 27777 - DNA, 954 bp, Artificial sequence
  DNA replication origin
atggttctatggtgcagaacagatgtgggtgtgagccaggggcacagacaggctgtctgcacaagagagaatgagctgtccatgaagccactgcttttgaagaatgccctgcaaggcatcaactggaatgtgtttattaccaaacaagacagaagagaaccagggcctgacttggcagtggccccaggctgcatgggctcaggtaggctcagaccggccccaggagtgggagagcccagagaagagggaaaaagagtagcggccaggaggggtctggctgggacatgccactctgggccatcagcttctggatccactcaaagtggtggctgatattggtgtagacaccgggccgattgggccgaccacagcccactccccagctcacgactccaatctgataccacagtccattcttgttacaggccaagggtccacctgagtcaccctggggagcagcggggctgaggtcagcctggggcagagtgagtggggcaggggaggggctgagagtgggaagggctatggggctgggtagactgggtgcacatcctcctcctccccctggcagcagccaagcctccgtttctgcatctgcagagtggggcaacagtctccacctcccggggttggcatgagggtcaaataaggcacagggacacaggatgctttcctgggctgggagtggtggcaaggacactcacgaagcaggcatccttcccgccttgggcattgccagcacaaaccatgtctccaaagatgtccttgcggaaactgtacttgaggaagaggtggttgcacatagagttgtttatgatggcgacctgaacttcctggagggtgtggggagatggcagtgctgtgcggacgatagtgggaaggagagagacagcaacctgaggcccctctatggagggatggcataggctgcgggggtgggggccctggggcacc

SEQ ID NO: 27778 - DNA, 1795 bp, Artificial sequence
  DNA replication origin
agtggctcacgcctgtaatcccagtactttgggaggccaagccggtcagttcatgaggtcagtagttccaggcccagcctggccaccatggtgaaacccagtctctactaaaaatccaaaaattatccgggcatggtggcgtgcgcctataatcccagatactcaggagtctgaggcagcagaatcgcttgaacatgagacgtggagggttccagtgagccaagattgcactactgctctccagcctgggtgacagagtaagactctgtctaaagagagaaagaaagaaaagaaaagaaaatagaaaagagctgagtcccaagcactgctggtggaatccagtttctgctgaatgtgttttgagtatgtgtgccaatattactagagtgctagtaagtctcctgtgatttggatcgtctgtgttctgggatgagtggatggatggatggatggatggatggatggatgggtgggtgggtgggtgggtggatgaatggatggatggatgggttgatgggtgggtggatggatgggtggatgaatggatgggtgagtcagtaaatggatggataggtcggtagatgggtaggtgggtgggtgaatgggtggaataatggatggataggtggatggctggatggatgggtgggtgaatgggtaggtgggtaggtgggtgggtgagtgggtagatgcatgaatggatggatgaatttatgagtcagtagatgggtgggcgggtggatggatgtacaaatgggtgagtggatggatggataagtgggtgggtgggtgaggggatagatggacagaaaacacactagcgggaccaggcacagtggcttacacctgtaatcccagcactttgggaggtcgagacggatgatcacttgagcccaggagttcaagaccagccaaagcaacacagcgagaccctgcctctacaatctacaaaaatacataaccaggcgtggtggcgtgggcctgtagtcccagctacttgggaggttaaaacaggagaatcacttgagcccaggaggtagagactgcagtgagctgaggtcgcgccattgcactccagcctaagaaacaggagtgaaaccttgtctcagaaaaagaaaaaagaaaaagaaagaaaggaaaagaaaaaaaagaaaaggaaaggaaagaaaagacactagcattcatcacgatccaattttggaccaggcgcaatggtgagtgcttacacaaggactgcctcatttaatcatcacaaacacccttgcggtgggtgttaatctcacatttttaaagacaaggaagcccaggctgagcgagtgagtcatggaattccaaccgcaatcccacagtcctcctgccacttcctgctcaggtgttggcccagtcccaccattgtcgggggaggttctttcctgagagtccctgcgtcccaagtgcccaaatacttcagccaccacaacatgtgattttcttgtcctggaattctgaggtccacatgcatacagtgccgctggcagagcctgctgtaatcctgagaattccttttcatcgactcactgcaagttcagagacaaggcatcgactcactacaagttcagagacaaggtgcgtgccagacctgcaccctgggctccagggtgaggaaggaaccgctcgtcctacgctgggtccctgcctctgctcctgcttgtcacccttggccaaacgttccccaatcccgagcggctctggcctttggacagaagtcagcctgtcagccttctggaacacctgcgtccattgtggccacttcctc

SEQ ID NO: 27779 - DNA, 785 bp, Artificial sequence
  DNA replication origin
cctagcctgtcctcagggccctaggatcctgtggagccactagggaaggcacgagaggctcccttaagctcaaggctgcctggaggcgacctcccaactcagagaaatccccaccctccctggtgaatcctgccacttacagggtggtttctccgcccccctctaggcgctacattctcaggggcttctgtcaggaccctattagagggagtagatgcacatgcaccagggcctgtggagggatggggtaaagggacaggcacccacaaaactgagggtcggagaacgagagttgacaaggaggagaaacaggacaggagcagggagaggagaggaaaaagaggaagacgaggggcaggagagggctggcctggcggcacagagcagtggggcagagctgacagggcagaaggagacactgaagggagagactccaggacaggagcaggggagggaggtagagaaatgagggagggggcactcagagacagaagggggcagtcgaggagcaggggcagagggggaaaccgagtgagggagagaggccagcaaaggagggctggagaggggaggggctaaagcccacagaggagataagagaagccagagcatagggtgacatcaagaggggaccaggtcacaaagggagaggccgtggcggttggctctgctacctggcacacctgagtcaccccagcactccctgggctggtcactctgacaaacagcagggcagttctggttggttggttggttgttttaataaaaacaaccctaggccaggt

SEQ ID NO: 27780 - DNA, 1263 bp, Artificial sequence
  DNA replication origin
gcgcggcggccccagagccctggctcggtgccctgagggccccacccccctgagcgcgcccgcggagctgcaccccttgcacgatcttctccacccaggagcggtgcgcagagaggctgatgtagaccccgggcctgttgcgctcggcacagccctcgccccagctgatgatgccggccagcagccaggcgccgtccacctggcacatgagggggcccccggagtcgccctgcagagaggaggcgaggttaggaacccccgtggcacagggggtggcagaatccagggcccgtgccctgtcagggggcagatgagccccttcccgggagcccgtttctccttcctggaggagacaggacctgagctccacccaggtgagaagtccccggcggcagagtaggagctgcagccaggccttaagacgtccaggcgcgggtgctgccgctgcaccatctgaccgtcttccagacagcccctgagctacagctggctctgggcactgaggcgtgggaagccccctgaaggaaatgaaagctcgcggagggcgaggtggtgcagctgggatgcccagtttaatgtctgaacaaataagtgagtggctgagccaggctgaggctggttctatggggacccgggactgtcaggcacagccagttctggggaggaggccagggagaggttgtggggctcagtggggacaggactgacgctggctccttcccgaggccctcctggccaggggtggggggctcgagggagctcaccagacaagcatcccgctccccctccaagtagccggcacacagcatgtcctcagtgatgggtccctgtcctgctccccgccagtacagatggctgcagacttccgagtcgatgataggaaccttcagcttctgcagggtctgagggtggggcaagggaactgggaggaaagaggacagaatcaggtttgggggtctcccctcctcgttgcctcctcaaaggactattcccccccaacaccattcctctcagcagcggttctcaaaggctaacagattagctctaccagtctctcccaagatgccttcagaaaattgaaattccaggtctccacctctggccctgctgaattagaacatgaatgtgaaacctaagaccctacctctttaataaattttcttatatccacagatggttagagcccttcctgtctcagatactgcattacttcatccagcactgggactgctatagaagaagtgttcaataaatgtccactcg

SEQ ID NO: 27781 - DNA, 811 bp, Artificial sequence
  DNA replication origin
gcgttttctgtttcatcctcacagccgtagaagaaaccgaggcacagagcagttaaggagcaagagataaacagagcagaagcggaaaggagatgagagaggcaaggccaggagggagagagggagggagggaaggagggaaggagggtggaggtgagagggaggagggaggagcagcctccggacgtacctgtcgacgccagcagcagcagggaggtgaaggtgccgagacagcccccacccagggctgggggcgctccagaaaccaccatggctggtggggcgggggagcaggcagcaggctcgagagacccagggcgatgcgggtcagggtgtgtaggttccctgcaggtcgccccaggttttatcctgggaggcggaatgccgtcagaccagtccccaggtggctcccgcggccaccccggctgtgggtcctgggcagagggcggggctgcggggaggaagccagccgctacagggctctgggggggctctagctgagaccccaggatgtggcctctggaagggcaggggagggggcttgggcccagaggtccctgacattaattgtccaggggcagagaaaggtgccagggcactgaaaggaaggggttccgggctggggagggcctgggtttggagaggctgaagtctggggtactgggtgttgggggtggtcctagggccttagggatcaagggggtgcccaaagctcagtaacggctcccacctgcagggccccaggcccctgtgactcagcccagagacctggcgcaacccgggcttgggaatcccgttaacccacttcccg

SEQ ID NO: 27782 - DNA, 865 bp, Artificial sequence
  DNA replication origin
gcagcgggagccttggtagcggagtccacggtgggattcagagacctgcagagccagggccgggaggggcagggcagaggaagggcgtgcagcgacgctggcattcggacgtgagaaggcggaaggtgcgggaggccccagaggatctcgacctggaccctggagccctggggcggtggcacattcagcggccgctttagagcgaggggggcggggcgcggagccaggcttagggggaccaaggtggccggggtagtgggggcgaccccgcggggctgggagagccgcggtgagcctagggggctgtgcgggggccgctctggacgctgcagccaagtgtcccaggaaagcagcgcccagggccccacagctccctgtgcccggacccagcccagtcccactgcagtgggtggctggaggatggcgagtgtcccgggcaccccttgggccgggtgaacgtggttgggcacggagagggcggggcccgtgggcacgggtgggcccaatgggccagggctggaccaataacgagaaaggatgaatggacaggggctgaactacagagagagggcgggactattgggcgagggctggaccaatgggcaggggctaaactaatagacgagggctggaccaatggcgcggatgaggctgctgcgtcgtcaaggatgcagagcttaaagcaaggcagtggcttccatgagcctaaacaccttccctccgcacgctcggtatcgcgacgggggagagcaaaacctttaaacaaatgctccagttttccccgcagagagccggagtcaaatccgtgaggaagcccgggggtcgcagtgaagcccaacccactggtgctgggataacctcgccc

SEQ ID NO: 27783 - DNA, 1223 bp, Artificial sequence
  DNA replication origin
ccgcggccttgctgcgcatgctcgcgctgtgaccccggcttgaggtaacagcgcgagctgaggctggggcccttggcgcggaggctgagggacccgccgcggcgctgtcgccggagagggagggcaccgctgtcgtcggtgaggacgggccctggcgggcggggagggtcctgcgtcctcggcatggacgagtccccggcccggctctctcgggggtcccgagggctgcgggtgctgaggaggggtccgcgtcctggtgctcaggccgcctcctgtggggtctcccgcgattccctctttgcctctcgcccctccttccccaccccctccagtcccttgtccaaagcctcaacacccccacacgaaggaggtccgcactcgcccgccggtccctggccgtgtccgccgcgcccagcgctgccttcccggcaccccccaacccccgccggcctcgtcccacggttgcagctcgggaggtccctgcagggacggcagcgagttggaggcgtgagatactggggcgggggagacactcggggcctcagggtgtgggtattcttgagagaggagagagccggggagctgggaccatttgggcgcagcccagcccgcgtttgatgccaattgcattgggtaaaggagtgaaataaagattctgagccctggtgattaggggaaggagctgccatggctgaaattgccatggtggggaagctccgcgctgcacaccttagagtagcagttcttggccttcttggggcaggggtcactgccggttttttaaatctccctgtgaggacgtgtactgcacaccttagtgtcccgtcatcctgtcggggtcaataacagccccgctgtggactgcgtggagcagtaattattggggagcagctgtccatatcgtctgggaacttttgcgatgacttcacccttgcctgtcatctattaacagcccctgataaattcaccactatttccgttacgcagatgaaacctgctgggagggtaagggatttgtcctcgcggctgaggatgccggtgctggtggacattagtgatgtttctcccccgtgcgtatgaagatgattctgtgggtccaccatgaggcaccaggcaggggtcctgtcgtccagaacatcgtcagtgagggattgaaccttgtattagtttcctgttgctgtcctaacaaataaggtggcttaaagcaacacaggccgggcgcg

SEQ ID NO: 27784 - DNA, 1145 bp, Artificial sequence
  DNA replication origin
gacaggcaggccgcatgtgcttttgtcaggttcctccctgaacccacccatgagctgcaggcctacctctccctcagcagaatcctggagctaccattctcagcaagcctgagctcccttagtgcctgggagctgtcagtctgggaggcttcatggaggaagcgagacttgggtcagggagggcagtgactaaggggcactttggaagggcccagtaagggctggggtgcggagacccaggggtggtggcatcagagctgagcctcaaaggacccagaagcctgggatgtttaaaacctgcccattatggggtctagcgaacagcttcttttattcttgtttgaaagtatttttctgcttacaaaagtaacttatacttgatctaaaaaaaaaaaaaaaaagaaaagaaatcacacaatgttaaaagcaaagattcacccatttggccccagaagccctgcggacagagaagagcctatggctgggttggtggcctgggaggatgcgcctgttgtcaaggttacagggacttgccgggcgccacagagcagggggcaaagttctccccagcagcctcaggaggccccgctgctaatccactgtcttctgttctgtctgtgcctgcgagagaagagggtggatcaggctggtgtcaatggagatgggagggctcagcttggctgttgggggtctaccaggcctcactctcaccccaaccagtggatgctccagggccagaagcctctgcctgactgagaagtgactgccactcagggacgctgctcccaaggccaccaggccagggccacaaaagctgctaaagtcatttccaggaaacttgaggccaagtttgtgctgagcactgggaagccgcagccatcgcctctgctggacctggggtggggatggaaggatggaggagttggcagatgggggtggtcgatgcctgagggtgattgcctgcgggacccctggcgcctgatggagccctgctctgcctttcatctggcgaagatggctgtgctccaattctcacaaaggcaccacggccccaggcctagatggatcccagcagtgagcaggagtctcaaaggggctgggaggaccttgagatggtctcattccacagagctcaggtgtaacag

SEQ ID NO: 27785 - DNA, 965 bp, Artificial sequence
  DNA replication origin
atgttcctaggacagagttctagaagtgagattgccgaactggaagaatgcaagttacattcaacccacgtcctgcgaatgccgatctctccggcatttgtcaacacctggttttatcatcaagaagaaaacagtaataacgcgtcctccgcttggccctagcgtgcacagcctctgcgcttttcacctcgaggtctcattttccttggacagcaccgagcgctgggcagggcctcatccgggttcagggccggaatctggagacgttctggccgatgctcctgacggccgggagagggcgcgcgcggactcagcggcggcccagcagcctccccaggacccaggcagtgctggcagccaggagtgcggttccgccccgcagcctcagtcccgctccgcccacccgcctgacccccacccgggctccttacggcccagacaccggctctaaggtggcttctgcagggatgggaggtgggcgactgggaggggtggagggggcctgtgtgttgaccctgcgggtggcagccgttgggaaattgcaatggcgtccacactgtcgctgcccagggcgcgagccgcagcctctcctcccgtctcgcttcctccgacaggcgcccgactcggacacacggcgcccctgtggttaccacatccactgctttttggtctcctcacccaaccccttaacataaactcgacaccagggaaggcatcttggacgattttggtccctgagggtcctagtgcgaagggcagggagagagggagcggtgtggtgcagggggatacagaacgcggaggacatctaggggctgaggatgcggggacgaggagcgcgcggaagagccgaggttccggggttggggggtgcggatttcagaggaaccgccggggatgtggacggactcggaaggaaggggtcccagagaggacgcgggcggctgcaggacacaagaggtgcg

SEQ ID NO: 27786 - DNA, 1964 bp, Artificial sequence
  DNA replication origin
tggacggactcggaaggaaggggtcccagagaggacgcgggcggctgcaggacacaagaggtgcgggacgcaggaggccgtggggtcgtgcgggagcccagggcacctcgacatggacccgccagacctgtggctcctccagcggccgctttagagcgagaggaggtgcgcaggccgtgaggcgggtctccctggggtctcccagggaggagcggcgccctccccgagccagccgaggacgcgcagccagaggggggtcgggcggagagaagagtgcgggcggaccgggacgacccctgggtgataggagagccgcagtgagcccagggcacggtgctggggccgctctggccgccgccgccaagcgtcacaggaaaacagcaaccaggaccccgcggctcctggcgcttggactcagcccggtaccgcaccgcgttgctggagaatgtgtccttggcgcgcgctgagccaggaagggacagcgggaagggcggggcccgtgggcaggggagggaccagtgggcggggaccgaatcaattcgctagcggtgagccagtggtcgagggctaaaccaatgggcaaggcgtggaccaatgggcgagtgctggacatcaatgaatggggcctgaactaatgggcggggtggggccaaggggcggagctgagccaatagaagggagcggaaccaatgggtggggctgaaccaatgggcggggcggggccaatgggctagggctgggccggggcggggccaatgggctagggctgggccggggctgggccaatgggcggggctggaccaatgggcgggccgggccaagggcgggcactaagccgacggaaggggtggaacaaaagggcggggatggaccaatgggcgagggatgggctgggccaatgggcgtggctagaccaatgggcgagcgaagggccaatgggcagggcggggccaaaggacggggtctgagccaatggaagggggcggtaccaatgggcggggctgaaccaatggatgggttggaccaatggcaagggctggactaatggacgagggatgggccggggctggaccaatgggcgagggctggaccaatggccacgggctgggcggtggctgggccaatgggaaaaggaggatttcacctcgtggaatgctcaggggatgaagggagtattcctttatctagcttctactttgacataatttctcacctacagaaaagttgcaagaatcccaaaaggaggttgactggggtggctcacgtctgtttcccaatgctttgggaggccaaggagagagaatcgcttgagctcaggagtttgagaccagcctggggaacatagggagaccacgtctctagtaaaaattaaaattaagaccgggaggggtggcttacgtctgtaatctcagcactttcggaggccaaggtgggtggatcacctgaggtcggaagttagagagcagcctgaccaacatggagaaactcagactctactaaaaatccaaaactagccgggcgtggtggcgcatgcctgtaatcccagctactcaggaggctgaggcaggagaatcacttgaatccgggaggcagagtgcagggaccagccccacagggtctgtgggtctctccccgtgtgcggcgatgagagagtgtagaaataaagacacaagacaaagagataaaagaaaagacagctgggcccgggggacgactaccaccaatgtgcggagaccggtagcggccccgaatgtctggctgcactgttatttactggatgcaagcaaaaggggcagggtaaagagtgtgagtcatctccaatgataggtaacgtcacgtgggtcatgtgtccactggacagggggcccttccctgcctggcagccgaggcagagagagagaggagacaaagagaaagacagcttacaccattatttctgcatatcagagactttcagtactttc

SEQ ID NO: 27787 - DNA, 1115 bp, Artificial sequence
  DNA replication origin
gaggagcaaggagggaatcgcgggagaccccacaggaggcggcctgagcgccgggacgcagacccctccccagcacccgcaaccctcgggacccccgggagagccgggctgcgggcgcgtccacgccggggacgcgggacattccccgcccgcaggggcctgtcctcaccgacggcagcggggccctccctctcccgcgacagcgccgcggcggatccttcagcctctgccgctgcagcagcgagcgtcgaccccgcgacccaggccgccgccgccaccccgacccgggcaccagctcccagccccgacctgcccctcgggagcgagccccgtgaccgcgcgcgcgaccccgccggggagccggccttgcggaacgctcaggcgcgctacttcagagcatgcgcagcaagaccgcgcggcccgttccttaggtaaaccgctgctccgggtcttccctgcgcggcgccgagccgcaggcctggcctgtcagcgcatgggggcggggacgtaactcacggaaaaggcggggccatcccgagattggacggcggcgtccaggggcggagctaggatgggggagctgaacaggacgctcttggcgtaaaggggctggggtagggggcgcttaattgagaccccaggacggtccccagtatctgaggctgcccgcaggaaacggagcgtttgctgagatgcactcttgggcctgtcagtttcctgaccccgtgggaaggcgattctcatgcatctcattgacgcccccagtgaccctaccccagagcggaaccagtgtgagattcaaataaacagcgatagcaacggattataaccttgactacgatatgagtccaaactgaaggaaataagtcaacgggggagaagggacagttgtttcttacatcagaaagccaacaacgacaaaaaaatacctgggccgggcgcggtggctcacgcctgtaatcccagcactttgggaggccgaggcgggtggatcacctgaggtcaggagttcgagaacagcgtggccaacatggtgaaaccccgtttctactaaaaatacgaacattagtcgggcgtggtactgggcgcctgtaatcccagctactcgggaggct

SEQ ID NO: 27788 - DNA, 834 bp, Artificial sequence
  DNA replication origin
aactgccacgtccatcgtccatccattcccatacatcccggttcatgctgtcctgcctcgtcctgccctcatcctcatccttcctggtttagcctcacccggtcccacccggtcccacccagtgccattcagtcccactcagtcccactcatccccattcatccctggagctcagagcgagggagcgggaggggcgggctgccggtagaaggacttgtgcccaggccaatcagcgcgcgcggggtagggggagttgcggggggaggggggtacggggctttccgccctaaccttttcctgcctggagccgctctgctcgagaggcgcctgcgaagtcagctggggttgcccctgcacctcgtgtcaccctgtggggcggcatgagtaggcccagaaggacggcatggaggaacaggctgggccggggctgggggaggtgtggtgggactggccctcctggtacctgtgatttcctggggaccgggccttaatggagttaaggagccgctcccctctgcgttgtctccggagccgaccaggccttcgggagtggaatgtggggccccaggccagggaactttggatcaaagtgggagaccagtgggaactggagctgcagcatgtgaggtgggggtgaggacgctgaaaatgtcagggactgcagtctcgattccaggctgagaggtgggaaagaccccaccatctgcccacactcagttgccccaaaaaagccccaccccacaccatgactgccactgactgcccccaggtccctgccccattccccattatttgccctttctgcctctccaggctggaacccgtggtgaccac

SEQ ID NO: 27789 - DNA, 1074 bp, Artificial sequence
  DNA replication origin
aagccacacctcacctgcatccagcttgctgcacttctgttcaggcatctctagggctggctggaccacccctccctgctcctcaactggcaggatctgcaaggtgctggcgagggtggcggggccagccatctccagggacaggacgcagtgcacttcctggggcttggatcccaccccatcctcatcttggtcggaggctgtgagcagcaccagtttggagaactccctgggcttcctgggggctgccgggatgacgtccgtgcctggcttgggggatggctcctggccggccttcacactctcgccctcctgctcgctgggctcgggcaggggcatcccgggacccagggcctgtccctcaggccacgctcagcacccagcaaggaacctggagtgcagtggttccgtcctaaggaaggaagcaaaatcccgtcagtggtggaagcccttgggggactctagacgtggatctgggagggaggtggggcagatggggctgcctcactgctcgctggggccaagactggccgggggcctgatggaactaggcttctgctctgccagttcctctcctggcagccttaggtacgtcagccccatccaaccccactttccccatctggaaaatgtgcacaataaacaccctccacaaggggccatcagagtgactaatggactaagagctcagccacatgctgagcacggacgaagggtttccacccgcgtttccagtcccccctccagtccctacattatgacggcagaacgttcttattgacccagttatagacgaggatagtgaggcacagacacctgtgatacacttgaggctgaagaggcgggaagctgagacccgtttctgctcagatgcccagggacttgtcaggacctttttggaaaccatgtgcttcaccaggacgccaggcacctgtctcaggcatgtgggcctggtacgcagagccctttccagaggacggcaccacatcacggcctgggaggcagaaagccctttctgggctcaggcagacccagtccctatcctagcctggaggccccaggccacccccactt

SEQ ID NO: 27790 - DNA, 1464 bp, Artificial sequence
  DNA replication origin
ctcaggatccccacgccctccctggctctctgtgcctgcgaccctgagctttgctctagcttagctaacctagccttcccgttcccccagcagcccctcagtccctggagttcctgaggacaccattcgggggccgcctcctggtgctggagtccttcctgtacaagcaggagaaggcagtgggggacaaggtgtactggaagtgccgccaacatgctgagctgggctgccggggccgggccatcacccgaggcctgcgggccacagtgatgcggggccactgccacgcgcccgatgagcaaggcctggaggcccggcgccagagggagaaactgcccagcctggccctgccagagggcttgggagagccccagggtcctgagggccctggaggccgagtggaggagcccctggagggggtgggcccgtggcagtgccctgaggagcccgagcccactcctgggctggtgctgagcaagccggccctggaggaggaggaggcaccccgagccctgtcactgctgagcctgccgcccaagaagcgctcgatcctggggctgggtgagtacaatccactcccctgctgcgtccactcggggcaggggacccgagggcccttcctcagcccaaatagaaatgtggggtcccacagggtcttttaaaatgtactcaaagctaaaatgacttttaaaaatataaatgtggccgggcacagtggctcacgcctataatcccagcactttgggaggccaaggcggacggatcatgaggtcaggagttcgagatcagcctgatcaacttggtgaaaccctgtctctactaaaaatacaacacttagccgggcatgctggtgcgcacctgtaatcccagctactcaggagactgaggcaggagaatcgcttgaacccaggaggcagaggttgcagtaagcccagatcgctccactgtattccagcctggtgactggagcgagactccatctcagtaaaaaaaaaaaaaaaaaaaaaaaaatacataaatgtgggctgggcacagtgttcatgcctataatcctagcactttgggaggctggggcaggaggatcacttgagccgaggagttcaagaccagcctggccaatatagtgagaccccatatctacaaaaaatcagccagctgttgtggtgtgtgcctgtggtctcagccacttgggagactgaggtgggaggatcacttaagctagggagattgaggctgcagtgagccgggatcacgccactgccctccagcctggacaagagacctggaccctgtctcaaaaaaaaaaatcagaattttatctggttcccatgcaattctagtgtccattaagttcaggaaagacacctaggcctgctgcagtgattcatgcctgtaatctcagcactttcggaggctgaggtgggcggatcatgaggtcaggagttcaagaccagcctggccaac

SEQ ID NO: 27791 - DNA, 1423 bp, Artificial sequence
  DNA replication origin
aacctgcggttgtggatgatcggatccaggtggggtcgacctggacacacaaaagcaggcaaacaaacgcagcagctgccaccccacagagaagacagagctgtgttaggaagatgggaccacagagcaccccccagtcagccgcgagcaggtttctaggctaaagtgaaaccaaacgtggccgggtatggtggctcacgcctgtaatcccagcactttgggaggccgaggcaggcagatcacctgaggttgggagtttgagaccagcctggccaacatggtaaaactctgtctctgctaaatatacaaaaatagctgggcgaggtggcaggcgcctgtaatcccagctactcaggaggctgaggcaggagaattgcttgaacccgggaggcggaggttgcagtgagccaagatcacgccactgcacaccagcctgggtgataaagcaagactccgtctcaaagaaaaaaaaaaaaaaaaaagcctgtgcaagaagtgcactgagtagctgacaaggaaatggaaaaaccaattaatagtagtggaggcacattttaggaaatagggcagccaagaccctaagaaacaattgcttagttacttgtggggtcaggagcgggggtgaggacgaggcggggacctcgcagcactgtctctctggagatggaacaaaaagagaaagacaatcacagctctcaagtccgagagaactttagggccatgaggcaactcacatgacccaaaagctgcaggatccggaagagccactggaaagagaggccagcgccttggggcgtgaaggaagagcaggtgagtggaggaggccacgatgaaatggctcctcagccagacgctatggggacatttacgcaactgtggttgtgaagtcaaaacaccaggcactgcggggggccgaccgtgtggataaagatggagacagccgggaccctcctcgggccagcgtttcaggacattatgggtgtctatggaacagcgggccgagaggagaaaccggctgcatgtaagtaaatatcacctcctcaatccttaaccactcagacgttaagacagccttccaccatagcaacgagactgaccatgtgcagtcaacaccctctattactactatgaactcttaagacaaacggaggaagaggagggcagggaggtctatccctgctgctgctactgtggggcaggtcaggctggaagggggaggctgggctgagcaggaaggtgagacccattgaaagcggcatcaggggggccaaggagtaggaggccagggccatagttccttctaggatgttcaaagaagggaagaggacgtttgccagggggagccgcagcatggagagggaaaggcagtgtggggctcctgcctgcttcctggggcccagctcccagcccacccccaggtacc

SEQ ID NO: 27792 - DNA, 2054 bp, Artificial sequence
  DNA replication origin
ctgcggcagcccatgcgggcctggtcccggcaggtccaatacaccttctccccggccgccttctcccgccggtagaggaaggactcgtacaccaggaagctgccccccaggggcgtcttcaggaactcggggcctcctgttgagaaatgggaggggaggagcagcggacaccagctctcagagcccagatcagcatggccccgagatgagacctcccacaacgcccacacctcctcctcacagtgaggtggccccggagcccaggacacagatgccaccatccccccaactctgctggggctccagctgctggggtccgcctcctgaggctggggactggtcaggtgaggcccctgcaggtggcggccaagcgtcccaccttgccatgccttcagggaggcagtgtctgctgcgtcactcgtccgtccccagcacccgcccaggcttgcatgcagggtgcgccgtgcctggttggtcagaggaatgacccggggccctctggggacaaagctgctcaggagccggatggggctgagaggggtggcccccgagagccgcgcaggtagaggtgtgaccccaggactctgaggaagaggcagggagcagcgtccactgtcctggatgtggtgagagggaggacctggcgggtggctgtgccttgcccagaggataccctttcctccgtgcaggctcaggggccacagaggtggggaggtggcctggggcatcgtggacacatcgggtggcagtggaagcaggggatgggggtgggtagcaagccctagaggagaggccagcggggggcgggagggtgtctggctgtggaactaccttcaagagggatggagagggctgggcaggggccatgtggagcagggaggctcgggaggcaggaggaccctgaggggcacagcagcacaggagcctggggaccacgagacagaagaggtcaggacgaaggtggggacgccaggccacgggagggggtggtgtgaccatggggcacgctttatccccttccacacggatgaaaatatccagcaaggggctgcgcacggtggctcacgcctgtaatcccagcactttgggaggccgaggcaggcggatcacgaggtcaggagttcaagaccagcctggccaacatggtgaaaccccatctctactaaaaaaatacaaaaaattagctgggcgtggtggtgtgcacctgtaatcccagctactcagaaggctgagacaggaaaatcacttgaacctgggagacagaggttgcagtgagccaagaccacgccactacactccagcctgggcgacaagagtgaaactgtctcaaaaaaaaaaaaaagacgccctcatctgggaggatcaacatctgattaacaggagcaacagaaagggatgatgatggggaagttaacaaagagcacgagaggatgaccccacgatgaaggacacaagcccaaagcctaaaaaggcccccagcacagccaggtacagctgggagggagcaaagaccctaaaacctcaagcaaagctgacggcacacagaggatcagtcacgcaaaagcggcagggacgttcaagggcaggctctgcacctgtgacaccacggaggccaggctgcccctccggcggagggaagcgacagacatttcagacatgaaaggcctcaacgtgctacctcccgggaccggcccaggaaacgacgggaggcaggacttctccaaaccacaaaattataaagaaaaccaagaaagagaaaggcaggcccagaagcagggagtcagcacagtgaaccccgagggacagctgggcccggcctctgcccccaggccaggctgcactgggaggttccagcaacctgcggttgtggatgatcggatccaggtggggtcgacctggacacacaaaagcaggcaaacaaacgcagcagctgccaccccacagagaagacagagctgtgttaggaagatgggaccacagagcaccccccagtcagccgcgagcaggtttctaggctaaagtgaaaccaaacgtggccgggtatggtggctcac

SEQ ID NO: 27793 - DNA, 1367 bp, Artificial sequence
  DNA replication origin
cgcttggccgccacctgcaggggcctcacctgaccagtccccagcctcaggaggcggaccccagcagctggagccccagcagagttggggggatggtggcatctgtgtcctgggctccggggccacctcactgtgaggaggaggtgtgggcgttgtgggaggtctcatctcggggccatgctgatctgggctctgagagctggtgtccgctgctcctcccctcccatttctcaacaggaggccccgagttcctgaagacgcccctggggggcagcttcctggtgtacgagtccttcctctaccggcgggagaaggcggccggggagaaggtgtattggacctgccgggaccaggcccgcatgggctgccgcagccgcgccatcacccagggccggcgggtcatggtcatgcgcaggcactgccacccaccggacctgggcggcctggaggccctgcggcagcgggagcacttccccaacctggcgcagtgggacagcccaggtgcgtgtggagggtgctgggctgggtctgcctggtctcccaggacctgtgccccacacgctggctggaggctgcccgtggggtgttgtgtgttgtgcatggtggtctgacagccggggccataaactccccaggggcaggaggctccatctgcgggctccgagctcctgcagctggtcctctgggtagtggggactggctgtcggaggtagaaacccactcagctctctagaggaagaggatggtggccaggggtggcattggcagccacagagagtgcttggcatctgctgacgggccgtacggtggatcctggacactcttggtctacccccacgccacccacactgcttctagtctcacggggttctctctggccaccccaacatcatgtgaccttttagttcagcttgttaaaagtcagctgccagctggctgaggggtaggtggacagggagccaggaggccctggtgcccagcccagaaaggctcagcccctgccctgggggatgcacctgcaagcatgaggtctgaggggttgggagagtccttcaggagcattcagggtccagtgcttgccaggccacgtgcccagtcatccccagagcccttggaaagggccagccagcgtgggagtctgggctgcagggcccagaggggaggagggcagggaccaccgtgcagcgtgctaggggatcgcagattcctggtggggcctggctgggggatacaaatcagacccccagccctgccacccaggcccctgtggccccactcacagtgtcactttccctttcagatcctctccggcccctggagttcctgaggacttccctggggggcaggttcctggtgcacgagtcctt

SEQ ID NO: 27794 - DNA, 1947 bp, Artificial sequence
  DNA replication origin
cgagacaggcgggagtcgtggacgctcagtccgggacaggcaggggcagctggtgtctggggagaaaggcagctgcgccccaggtcccagtctgtcccctcctcctccccctgccccgcccttccctgggacccccagcccagactctcccgagccttcacactgcagtggaattcccccagccgtgccccccacctggcgggggagggggaggggagcaggcccaggcaggcgtggggggaaattccccgccccctccccctgggcccgactcctccgagtcctctgatctcccagcgccacccgcccgctgcccccagggcttggggggaggccagcgcaggtgcgtgggagggcggaggcgggggccgggggaaggaactggtgggggccgggcgcccagagcggccccgccccgcccagacctctttgcccctcagtccagcctgcccagcccgcaccaggccctcgccaagctgtcgagcccaggccgaccagtccccgccctgcagcccccacaccgtctctgccccggtgtcgatggagaagaaagatggggttcagggaggttctgtcaggcccaggcacccactgcggtgctgggacccgcgaggatcttccagctggcgcctcacgcgagtgtgctctggaggaggggcgtggagccgaggtgggggcatttgaaggagatggacttgctgagactctaggccagggtcctggtcgcctcctccgggagccctctcagaggccaggctggcccggctcactgagccctgagctggggcctccagcacccacgggctccctggaacccaactgcgcttcccgacgagggagcatccgggaccacctgtctgcccggtttctcttggcgggggctcagtgaagtcctcccgggctccagtccacagaggatgtcctaggggcaggcctgcacaatggcggtgcgtggggagcttcacccccacagccacagccatctgaggatggggcaaggtggcgacagggacaattaaggactctgtgcggaaagggggccggcttgggacgctggtggaggaatcagccccttcccttgagagagtagggtctgaaagaaccgtccctctgtccctggcactgtgacacccggttcggttggcccaggcctgtctcctccagagggggcagggggtgagaggaagtgggtgctcagtgctgaggctggggcactgagatggagtggggtggagtatccctgcggcaaacttcagtctcaggtcactcacggaaacttccagaactaagaagcccaccccccaccacttccccagcatttggcactcagggctctgcaagcagcggcatgtctgccctcctgacgccctgcgagaggggacaggctcatctccccattctgcagatggggcgcagaggtggtaactgggtgactcgtgggcgtcaccagctattaagcgttggaactgggcttcaagctccgcctggtctgatccaggggctgggcgctgattcatgcctccatgtcgcttccagggtctctgattcttcagggacctctgggcacacagagatactctctcacatgctctgaggggctcctcacccctcgaatgtcgttgccgccagctgacactttggaagcaggatctccagcagcccatttcacagacagggagactgaggccagactggggcaggggtcggcctggggtccctagggcctgacaggcttggcatgtcatctctgagggaagcagatgcacaggtgcagattggccacatgggggcggcagagagaaaggagccaaagaggtaggtgcagaagcaacccaggggccagcctggcatttctctcctatgggacatggaacacaggatttgccctgcccaagtagggagaaggtgagaagttgggggacctgggcaagaggagggaccaggcca

SEQ ID NO: 27795 - DNA, 979 bp, Artificial sequence
  DNA replication origin
cctccagagcacactcgcgtgaggcgccagctggaagatcctcgcgggtcccagcaccgcagtgggtgcctgggcctgacagaacctccctgaaccccatctttcttctccatcgacaccggggcagagacggtgtgggggctgcagggcggggactggtcggcctgggctcgacagcttggcgagggcctggtgcgggctgggcaggctggactgaggggcaaagaggtctgggcggggcggggccgctctgggcgcccggcccccaccagttccttcccccggcccccgcctccgccctcccacgcacctgcgctggcctccccccaagccctgggggcagcgggcgggtggcgctgggagatcagaggactcggaggagtcgggcccagggggagggggcggggaatttccccccacgcctgcctgggcctgctcccctccccctcccccgccaggtggggggcacggctgggggaattccactgcagtgtgaaggctcgggagagtctgggctgggggtcccagggaagggcggggcagggggaggaggaggggacagactgggacctggggcgcagctgcctttctccccagacaccagctgcccctgcctgtcccggactgagcgtccacgactcccgcctgtctcgtgggcgcgggggcagggagtggagcttcctccgtcaggccagcggcatctggaccaggggcgggaggggcgtgcggatccgaagaaagtgtgcgcgtgagcgcctggcaatgaatgggagagagtgcgagcgcgtgcgtgcactgggaggagggcgcttgtaactcggacattccgggtgtcctggggcgcgtgcgaccacgtgagggggttctgtatctcccattttaagggccttccgtccgcttgccccgcctgtccccctccacaccttcccacttgaaccggcaccgacctgagggagagggggccgggaagcgctggacg

SEQ ID NO: 27796 - DNA, 1007 bp, Artificial sequence
  DNA replication origin
acaccagctgcccctgcctgtcccggactgagcgtccacgactcccgcctgtctcgtgggcgcgggggcagggagtggagcttcctccgtcaggccagcggcatctggaccaggggcgggaggggcgtgcggatccgaagaaagtgtgcgcgtgagcgcctggcaatgaatgggagagagtgcgagcgcgtgcgtgcactgggaggagggcgcttgtaactcggacattccgggtgtcctggggcgcgtgcgaccacgtgagggggttctgtatctcccattttaagggccttccgtccgcttgccccgcctgtccccctccacaccttcccacttgaaccggcaccgacctgagggagagggggccgggaagcgctggacgcccggggtcgggggaacgggcgtgggaggcgtctggacctgctgcctccgctccagtgctgggcggggcttcccggcctcccatggggggagggagagacccagggggagggacccacggagggatgcgaggcgggcaggagtcagcccgttggagacctgggcgagggagacgccgagagctaggctcagtgggagggggcgggcgtagaggctgaggcaccgcccagagctcgctgagacagagactgagaacgcccccggccagattccccccggagagacccgggtagggacagggacagagagacgcctctaggggcagaggccctgggaggcaaagacccccaggagagatttacccaccccagacggaaagcgcggctcagagtcggacgaggggagactgtcagaggacaacgccccctaggtctcctgggagaccccgaagcgaccccgggggcagcccgggccgtgtccgggcgagggtgacctatccttggttgagagcgatggggacacaagccctgcagggcttcctctttctcctcttcctcccgctgctgcagccgcgtggggcctcggctgggagcctgcacagtccaggtaagtccccgcacggctgt

SEQ ID NO: 27797 - DNA, 2283 bp, Artificial sequence
  DNA replication origin
ctgagcagcccgagggctcctgcaggggcgggtgcggggtcgctggctggggacccaggcgggaggtggcgtaggggcgcgaggatgcccggcgtgggtccggacctccccaggccctgcctttgccgtgcaggcctgtccgaatgcttccaggtgaatggggctgactaccgcggccaccagaaccgcactggcccgcgcggggcgggccgcccgtgcctcttctgggaccagacgcagcaacacagctacagcagcgccagcgacccccacggccgctgggggctgggcgcgcacaacttctgccggtgaggggcggggcctgcgctgggggcgaggctgggctcaccattgcagggatggcccgaagcggggcctccgtgcgggcggggtggaggtctgccgtggactggcagcccagcctcctggagaacctgggggcggggccagaatgaggggcggggcggggcggggcggggcgcgcggaaccctggcgcaaaagggatcctcctcaggtgaacaatttctgcagagctccagttcagggccaggagagaaacggacctgggcactcaaaggacccgtatgggcggggcctggtcagagcgggggccgaatgggcggggccttgtcagagtggggctcttgtcatacaacttattttggggttcagagccacagctacggtctgaggcaggatggacccagcgggaggagagccgcaaagctcaggagctcacttctgcttttaagtggggttggaggccaggcgcggtggctcagcctgtaatcccagcactttgggaggccaaggcaggcggatcatctgaggtcaggagttcgagaccagcctggctaccatggtgaaaccccatttctactaaaaatacaaaaaattagcggggcatggtggcgggcgcctgtaatcccagctactcaggaggctgaggcaggagaatcgcttgaacccgggaggcggagcttgcagtgagcagagatcgcgccaatgcactctagcctgggtgacagagcgagactcgtctcaaaaaaaaaaaaaaaaagtggggtttgagggacggaagtggctgaggcccatgccgggtgggggtgaagaatacagatggcctcaaagtcctcatatatggagtcaagtctagcaacagctgaagcctaaaaacagctctcaagtcccctttaatgacttcccgctgtccactcggaagtcgacgtccagttccttcatcaggcagagttctgcgtagacaaaactggaatttgtgggtgtacagcaggcagcacagccgctcacaggcacagagccttgaaggccactttgagcataggctgcggggccgggcctgggtttgctattcttggggtggtgggagccccaccacctccctcccacccgcagtaacccagacggtgacgtgcagccgtggtgctacgtggctgagacagaggagggcatctactggcgctactgcgacatcccctcctgtcacagtgagtagcgcggctggacagaggtgggaacgctgctgcatctgggaggagggttgttttcggagtcacggaagtctgactctgccccctcagtgccaggctacctgggatgctttgtggactcaggggcacccccagccctcagcggccccagcggcacctccacgaagctcacggtccaggtgtgcctacgcttctgccgcatgaaggggtaccaggtactgctcacgggcccagaccagtgacccctgacctggacctaaagaccacactcaactcccaacactcggttgccaaacccagacaccggtttctgaacctccagcccgattcccaccccgaccccaggcccccaccacttcacccctaccccagcccctgccctggggtcacccagtctgtgctcccagctggcgggcgtggaggccggttacgcctgcttctgtggctctgaaagcgacctggcccggggacgcctggcccccgccaccgactgtgaccagatctgtttcggccaccctggacagctgtgtggcggcgatgggcggctgggcgtctatgaaggtgaggagtgggcggggaccaggggcctgggcgggcctcgaggtggggcctggccgggcaggggagccgccgtgtcctggtcctcaggatgctgactgccggccccgcccgcagtgtcggtgggctcctgccaggggaactggacagcgcctcagggcgtcatctactccccggacttcccggacgagtacgggccggaccggaactgcagct

SEQ ID NO: 27798 - DNA, 1558 bp, Artificial sequence
  DNA replication origin
gggcagggcctgagggcggaccggtggtggggagctggagccccagaagggaacagagctaggaaggaactcctgggttcttaagggagcgaggctttgggtccacgcacaggatcgcgcgcgggatcgcaggtagagcaggacgctgcagcgggattggaccggctcggctgatgtctgctccctctctaggagctgtctgctggctccgggaaaagggcccccggcgctgggggcttccaggggccccaggagaagctgggctgtgtggtaccaacagccccgaggggtggccttgccctgctcccccggggacccccaggctgagggttctgccgcgggctaccggcctctgagtgcctccagccagagctccctgcgctcgctcatctccgctctctgactctgggccccgagggtccgctgggcccgccgccggcgagatggacacctgagatgctgtgctgcgccctgcctcggccttgcgcctgtgtaggggcagctcggcctctggtcgccttggggagaccaaaagtcggacaggaaacatctggtgctattatctgggacttggcctgaccgtgggggtccagatggtccaggccctctccatggacctgtatgtgggggtggtctctggtttcggaggtctttgaacccctctgggggtggtcctggactgccgtcctcagtgagaggtcacaggtcagcaaaaacagtcaaaaaacccccacagattttgaataaaggatctactttggtacgggcctcgaaagttcttccgtggtgggaggagcatgttaatgaccatacaaacgccgagggttgcgtgtgtccatgcaaatgaagggcgttgcacgcagactttggtggagctgcctggaatgcagagaaggacctagaacacagacagatgggtgggtgggtggagtcctgtagaaggcggggggtggaaggggaggaggatcgtgggcagcgttatgctgaataaggggtgccttcccggtccctgctcagggtggacggggcggaggtcgactttgctcccctggcctccaatctgtttcctgtctatcctcggtagggccccgcaagggtgctccttgtgggcgataactgggagcaagttgggccgggcccacgctccgagaagcctagcgcgaaggatagggcctctcccgacggctgcgggcgcgtgaggcacgccttcagaggcctgggtaccgtggagcgccttgctgcactcgggagtccagcctgcggaaagatcactttggagcgggggcgtaccggatgtaggccggacccgtccggcagcaccttggacagagccccgtctgcagggtagggctaggtggcaggactatgcccccgagggtgggtgcccaaaggtacggagacctgggtgtcacgcggaaagcccggatgcacagttctgagggacgcgaggtgccagggtcactctagcgcagcccgcaggacccagaacgttgggtcgcaagcccacagccaccccatgcaaatgaggctgggagcgcgcacactatgctaggaggcg

SEQ ID NO: 27799 - DNA, 1622 bp, Artificial sequence
  DNA replication origin
agaacgggtgaacagggctcctgctgagacatctcatgagctggaagcatccaaggagccagccccttgcagacgagttgggaggaacacctggtgttgctaactctaggaggctgctgtgggcaggctggcatggcagctcagtcccggggacaggcgtggtgggcagcccagagcaggtcgggcacgacgccggcgtgcagctgcaggatggagcccacgctcagcaggtgcatgatctggtgggagttgccccagtagtcaaagcggccaggtccccagcgctcgggcagacgggctacatttaccagtcccccaagcagcgccagtgcgtccatgcgcaggtagcagggcagggagcctggagcccctgaacccagacccactccccgggccccaaataccagtaggcgggcagcagcctgccatccaaatgcccggagccgagcactggtggagggggcggtgagagcacgccagccggccacacccgacaacacagtgtagcccaccagggcagccgggcgcagccagggcctgcaggccagggtgcagtggatgatgggcagggcccctgcacaagaggagagaacaggagagggcatgtcattgtgagggtccacccgcccttccctacccatggcttgtatgcgtgccccatgcctctcccgccggtggctccagctcccatcccttgggccctgactcaccaagggtgttgacaaggcagaccccacacatgtccagggcgaggagccgggcgtacacagcgctgcccccttggtggcacataaagaggtgatagagcacggagcctgcagggggtgcaaggcaggccacgcaatgtgtgcctcccagccagccatccttgcccagctgaccccagggcatggtcattggcaccagcaccaggaagcccagcagggccagccctagggagggagacagtcatctaccagatagtttcagtcacatcctcaaggggaccacggttcagacacaacacaggacagggcaagacaggtccaggtaatgctgtcatccagttggcggcctggccttggccagagacaggccctgggcaaaaggcttttggcactggttacttatcatggctcaggatggtctgggaagtagagaccatgatccccactttgcaggtgaggaaacagacttggaggggctgagtgaccggccccgggtgagcccagcaggtaagcaatggcagaggacaggcctaggccgtcccactcccacactgctctccccatacaagcaggtcacaggagaaggctaaggcagcgaaacctcaagttgagttgtgaagaggacacatgagcagtgatgccagcccggggccacttggcttgctcttcccaacccaagtcctcccctctccataagtgtccagacaaatggaggcactgggcctttttatcttctataaaggggtgaggccaggtgggggaagacaagtccagaatgaagggaagggggcttcgaggggcttgtcccatctccccagacctctccctggggagtttgattccagcctagccctttctgggaggtctccacccctccctgccggcctctagtactggcctcccaggggccaaacg

SEQ ID NO: 27800 - DNA, 1278 bp, Artificial sequence
  DNA replication origin
ggcaagcagggcctgtgggggagaggagctcaggatgtgggtgggcggacccccggggctggggagcagggcaggcagccgccactgtcgggagcttacctgccacagggcccaccctcggctcagggcctccgctgccatgcaccacagcacaccccaggcccgcggctgcctcaacacaggcagtgccagcagggcctcggccgtggcccgcagcttggggtctggctccagcatcatgacaaggacagaacgcagctcggaagacagacctgcccatgaggaagggccacatcggggtcccagaacaccgactgcaccctgagcccagcagtgcctccatggccagccactatctccccaggagcccgtggcagcaccccctcccgccctcacctactcaccggcagtgaactcagggggcaggtagccctggcgcagctgctgccagccctccccaccgtggggcagctccatgttgcatgccacttccaggatggtgaggcccagactggcagggacgggatggggacagaaaggggcagggttggccctgggacacagacccagtccagggctgcctcttggaggtgggtgggagagggctgctgtcttcatcagtcagggaggggcggaagcagggggaagggacaccccaacaggcctgatcatgaaccctgggcaggatggggacatcatggaatatgggctctgtgcccagggagcccacaagccacagtggtgagtcctcccagtgccctgatggacaggcaccacagttactgctggcaggtattactatcctgatgatcagggcagtggttaccagtgtggaccctggaacccagcacctagggccagtctcagctatgccacttgctagcagtgggctccggcaaggcccttaatctggctgtaaatggagtgacaattgtttctcctgtggagctgtgaggaggcaggttacacaaagtggctctggagggttcgaggctcacaggcagcctgaccagagacgctctccactggagggcagggatggcgtctcagccttgtggctctgaggccgggtgtcctgggctagggtggagcttccctcctggggaatggagcttccgtcccaggaagggcctcccacagcctgccaaacacctggcgtgccccggtccccacctgaacacatccgctgctgtcccataggagccctgcagcagctcgggggccatgtagcgggggtctccctcctggacctcaccagctcctgctgtacccagctcc

SEQ ID NO: 27801 - DNA, 1975 bp, Artificial sequence
  DNA replication origin
gtcataaatagagctctccccacccaccaaccccctgaaaattggcttgatttgaaacagtgcgtagggaagttcaagtttaaaggggctgtcaaaatcagtggaagttttggtggtgcgccattaagaagagactggtacccgcattagggcaaccagctgaaccataggccagctagtttaccacagagaagtggagaaagagctagctaggaagagcctgcctgctgtcagaacaaacctcactgacctcaaaagccaccctgtcaaaggagctcaaaattaattggatctggccaggcacagtggctcatgcctgtaatcccagcattttaggaggctgaggtgagtaaatcacctgaggtgaggagttcgagtccagcctggccaacatggtgaaaccccatctctactaaaaatacaaaaattagctgggtgtggtggtgcatgcctgtagtcccagctactcgggaggctgaggcaggggaattgcttgaacctgggaggcagagattacagtgagccaagatcatgccactgcactccagcctgggcaacagagcgagactctgtctcaaaaaaaaaaaaaaatttaattggattggaccgtggaacactttatgccccaaggtattgtttgtttgtttgtttttgagacagggtctcactctgttgcccaggctggagtgcagtggtatgatctcggcccactgcagcctccgactcccaggttcaagtaattctcttgcctcagcctcctgagtagctgggattacaggcgtgtgccaacacactagaataatttttatatttttagtagagatgtggtttcaccatgttggtgaggctggtgcaccaaagtattataaaaaacaatagagcggctgggtgtggtggctcacgcctgtaatcccagcacttcgggaggcaaggtgggtggatcacttgaggtcaagacttcgagaccagcctggcctacatggtgaaaccccatctctactaaagatacaaatttttgccgggcgtgctggtgcatgcctgtagtcccagctactcagaggctgaggcaggagaaatgcttgaacccaggaggtggaagttgcggtgagccgagattgcggcattgcactccaactgggcgacaagagcaaaactccatctcaaaaaaatatacataatagtaaataaaaaattaaaaagagcagtctccagtacctgagggagtacaggggtgaggggagcgatgctacctgggcctggctggcaggctgccctccatcttgtggagactcttcctctgactctaactacctcagagtcccagcccagggtttctccaagtcaggagccagggtgttgggatcctggaggtcactggtcacaagcacagcctccaggcccaaccctggcacactcggggacctgggcctgtgcatcttaacccagttctcccaccgtccctgccctacgacttacgttctagcatgactggcctggcccaacagcctcagtggtgggacgggggaggcaggagcaggggctcccacgtgaatccagggtgtccctgagctaaggccaggcgggggtgacctccgcagcttccggggccctgggcgatcgggccgtctcgcctcaccctctcaccaggcccgacacatctgctggccacctttcccggtagacggtaagttcctcccaggcagggccgcggctgacttcactccgtgggtgtggggaagccctggcgaacagagcagtggacgggctgtcacgagggaagaggggctgttgcagaagaagagaggctgtcccggggcaggggctgtcacggaggaaggactgtcacggggagggcggcggcgcggggttgatggacagcaggcggggtctccgggaggggcgagtagggcgggaccgccgctgggaaggggctcgaggcaagggaaccaggaattggggaggacgggaggcaggg

SEQ ID NO: 27802 - DNA, 1889 bp, Artificial sequence
  DNA replication origin
gcctcactgctttatttcttctttcttttctttttttctctccctttctttccttccttcctttcctttcctttctttctttctctttttctttccctttcttcccttccttttctttcttttttctttcttgagacagggccttgctatgttgcctagtctagaaaactattatttttatccccattttacacacgcagaaactggggcaggcaggatcgcagccctagtttccctcacaccacgcacttatctgctccatctacttatttccatttacatatatttatattacagcctttcctcacacagtgaaatttacatcggaagcatgtgtttccatgcttttttttttttttttttaattatcattgtgaatcagactttaaaaaatgggcggttggaaggggacctgttggggagatggggctggcagaggtagccctaggcagctggggaggggcctgtgtgtgccccaggcctcctgggggccagtctggagtcatcaacaaggatcctgcctgagtcactggggcacagccgccagagatgcgaaggacaaggaaaggtgcaggcaggtgggctgccgcccccagccaggatcccagcctctcctcccccacactgctgctccatgcacagaacgtttacagagggtgcaggaactgaatgggtgggaagctttgcagtccatgacctgtcagagacttggggaggatggagggtttgggggactggttctggaggccagggctagaaggagcaggtagtcaacaagtaaactcacaaacaaaagatagaacatcggacagagatcagggcaatagcaaaaataaggcggaaggagaggtgagagtgagaaggccagcgtttgggggagggttggccggaagcgtactcctcccacccagttaaacagataaagagcccctcggtgagggaaggaacaatccctagcccgacttgctccgcgagggcccctgctaatcactttaggggatcatcccagcgtcctcagctgtttttttttttccaggagaggagactaatccgaagctcagaaaggctcagtgcattcccaaggtcgttcagccaggagagcgctgaagggatctgagctgagagcaagtctcaaactcagagaatggaggagctgccccggaagtggctgctcgaggctgcagtgaactatgatcctgcggccaatcgcggtggctcacgcctgtaatcccagccttctgggaggccgaggcgggcggatcgcttgaggtcagaagttcgacactagcttggccaacatggtaaaacaccgtctctacaaaaaaatgcaaaaattagttgggtgtggtggcgcgcgcctgtggtcccagctactcaggaggctgaggtgggaggaacgcttgagcgggggaggcggaagttacagtgagtcgagatcgccccactgcactccagcctggacaacagaatgagaccctgtctaaaaataaaatacatgagccgagtgcggtggcgcgcgcctgtgatctcacatactcggcaggctgaggttgggagaaccgcctgaacctggggactgcaccactgcattccagccttggtgacagtgagaccctgtctaaaaaaaaaaaaaaaagtatctgaggcctgttggcagggaagctgcaggcaggcgaggtcaggccaagcagagtcctgcctatctggagagcttcctggaagaggcggctttttctggctcccgaagccgtgcgctaggggttgggggtcgtgcgtctggcctcccaccgcgaccctggttcagaacacggccggagtgagaaggggggtgccgggacccaggaggccgtagggacttcctggtcctacccggagtaaccctggggcta

SEQ ID NO: 27803 - DNA, 1050 bp, Artificial sequence
  DNA replication origin
cgtctgctgtccctgctctcaagcaccttacatgcttacaggcgggcagtaggcccagttatgccagatgggacgaggtgtctgcttcagacctgggccggctgagagctcctacacagacacatggcttgccctgcagggcgctgggaaagcgtagcccaagaggaggcaggcgggaaaccaggagacgccctgtgggaggtaacggatgggcgcctgcttggccactgccagagggaacaccagtgcccgctaccactgccaggctgcctggtgctggcatgaccttggaaaatgccagccagcccagggcctcgggccagcctgacagccactcaggaccaggctggacccagtcgggtgtcccagcccctgcaatgccgccactccgactcccagcacagccagtcctctctgctcacccccagacccacccaggcagggcctgcctgacagcacagagactgtgtgtgggctgggagagcccctgatggagtcttgacctgggctaccctttgctcccaggcaccctggcctgaggggacacagcacagcctcggaacagagcagcagctatgaggggctagggctgagggccaagggcagggtgagagcaggggtgttggaagtgctggacccaggcccaggaagtgcattgcctaaaatggcaagagactccctgccagctgcttgacaccagtggcacccgtgagggcaggaatttggggaggacagctggagcggtggccaggcgccagccgggcggacagcttctacactcgcagctgtgctgagcgtcctgcaggccactctgtttgggcagctcttcagcccaaacccaagcatcggagcctccagtataccttcctaggcatcccaaggcaactcacaccagcaaaggtgacctctacaaactccttctccccacccatctgccagtttgttaaaacgttatgcaggcctggtgcagtggctcatgcctgtaatcccagcacgttgggaggccgaggtggggtgatcacctgaggccggtagttcaagaccagcctg

SEQ ID NO: 27804 - DNA, 1172 bp, Artificial sequence
  DNA replication origin
gggacagcagacgtggggactgccagactgctggggttcagatctcagccccactgctccagagttgcacaatctgagccaagtcccttccccctgcctttgtttccccatctgcaaacgaggataagcagcagttcctcccagtagccccaacacagagttgctcttcttgtcattttaggggagagtgaacacactcgggaaggccccgaaccagatggagtgggtgtttgcaccctgtgtgaatccagcacccagctgctagccccggggctactcggctgccctccgtgaatacacgggggacatgcgcctgctgccatgggcggggcaggtggcctggcaggaaagccctctccaggagtctgaatggaccgtcccagctaccctgggcactcataggatggatggggccagggagcatccctgagcccctgtcagcagcccatgaaggtccagcctcggggaccccaactcatggctgtctgccaggcaggacggtgggggggcggttcagggcactgttctgaggcgctgggctgagggggcctgccgtgagcagacagtcctcgtgcacaggtgggtctgtggttgggaggtgggcaccgcaggcatcgtggtgtgcctgtgggtgtgagccctggggatggcttcatgtgtgggcagagcagcagtggggcacagcctacgatgtgggtgagaggggaggcagagagggagggggcacagggacctcagtgctgggctggcctatgagtgagggtacctggtggtaattaaccctgtagtctattggcggctggacctggccgcagaggtgtgggctcagtagcctctctcggagaagcccctgctgccccttcctcattatagcccttctgcagacccccagcctagctgggctgactggcttggcaggctggactccttagccagaggtaccaggaggggctggctgggccagggacaggccagcagacagacagggtgtggggccttctggaccagggtgcaggggctaggggttgagtcactgccgtccccagccagcctggtggggtctgcaggctcattggggcgtgatgcctgttgtccagacccccatgcccagtgcctccctgccaggcccccagcacagggccccggctccaagtccatccacccagccccag

SEQ ID NO: 27805 - DNA, 975 bp, Artificial sequence
  DNA replication origin
tggggttctggagacaaggagggctggggtgtggaaagcctggtctgggcagagaattcagacagtgagggtttttgggggctggaggatagatgcctgggcgctgccccatctcagcctctggggtccccagccttgagtcagcactgtcttgcttccgcagggctgccccttctgcctcctggcctggggaaaggtaggtgggccctctggcactggggtcaggaagagtctcccatctctcctgccctgggggtgtgggagctctctgggactcccgatgcggggcccaggagagctcagggcccttgctgtcttccgggcagggagtctcatcaagtgtccactcaagggtggggagcacagacaccctgcactctcagaagagtctcccggggcagaacatgcagccctgaggacgggcctgggcaggctgagaagggtgggcaggtgtgacaggaggggcggacccaccggcaggccaaagggggccggagggggagaggagggaggggacaaggagaactgagcctgctgaggggcaggaggtggagtgtcatggaagagtctttacttcagggacctggggggtcctaagggtagaaggaggggctgcccctgagccctgatgcatctgagcttcaggagagaaagatggggggcagaggtggtgagaagaagaggaggagatttccatgaagggagaggagcccagtactgagaatggatgggagaggagaggaagagggtggagtgggctctgccccacagtcccccagagccctggctcagacaccttcctccaggcccaggggccctctagcctccactgccctagccccagactgctcacctcctctgccctctaccctcctgtgacagcagggaaactgagacctggaaagggaggtggcatccagatttgggcccctttgtccccttgtaagttcccctgcttccccctgaaccccacag

SEQ ID NO: 27806 - DNA, 1285 bp, Artificial sequence
  DNA replication origin
taatcccagctacttgggaggcagaggtaggagaattgtttgaacccaggaggtggaggttgcagtgaaccgagattgcgccactgcactccagcctgggcgacagagcaagactccatctcaaaaaaaaaaagcctgggctcctaccccaggtgtcctcacctggctgggttccagccccagggaaggcccctgctctcagccttttcccatatcctggagagggagggagcatgagtagagtgcttatggcttcaggggttcgtgcatagagaggcagaccagggcgggcggggctcacctggcttcagaggcttcacattccctccaaggcctggaggagatataggggggctggtgagtgactcaggggccccacccacattctcccccagcccctccccacccctgctcctacctgctccaaatccaaatcggttctgggctgtcaagactatggggagaggagggtggggtggggatttggggtttggttgaggtggaggtaagggaatcctggaggcttcctcccagcagcccttcagttattcaccagctcagccccccatgagactgggaagggaggcagggagaggacgccccaggggtagaaccccagaccccatctgtctcacctggctgagcactcagcccattcccattccctaatcctgggggacagatggaggtgggggtgagagggggaagggggctctgaacactggggagacagaagcccgggagagccaggcttacctggctcctgtgccttcatgtcccctctaaagcctttgggaaaatggggagcagatgaggtacctaggagcccccaactcagatccaccccagaaccccagcatctggaccccagctcctcccatccccctcaggacctgctccagggccattctgaggtggggggcttgtcggggtgggagggctgagctaagctggggacacagcgcctatggttccccttcagggccaagccagaagccaaggatcttggagacgccccgtcacccctctccatcattcaccaatcccgcccctgggaggaagaggccgcccagatgcagaccctggaaccccagactgtacccccttcacctggctgggctcccagcccaattctgtactggaatcctgggggaatagatcaaggcggggtatgaatgaggggagggagctcaggttttggggaggcagagggacaggccggggcagggctcacctggcttctggggtttgacggcccccacatagcctggtggagagacaggga

SEQ ID NO: 27807 - DNA, 1895 bp, Artificial sequence
  DNA replication origin
aagtagctgggattacagacacccaccaccgcacctggctaatttttgtatttttggtagagacaggatttcaccatgttgctcaggctggtctcgaactcctgacctcagatgatccacctgccttggcttcccaaagtgctgggatgacaggcgtgagccaccgcaccgggctgagcccaggcttcttagagggaagggggaagacaaagatcgggccagggggccgggagggcagagtgtgggtctgaatcctggggaattaagtgccactggctggccggatgtggctctgcctctgtgtctctctgtaggcctgggagggggagccaggccccctcccagggccctgggcccccgccctgtctctagggctgcgtcctcctgacaccccctccgaatgccgccgtctcacaccctccccgtccctccccctagaatatggccatggaaatggaccgggagtccagccaggtgagggcagctgggcctggctcgcgaggggtcgggaggtgggacgggaagagagaagctgaggccacagggacagagagctggggtctggggatcagcagcactggctggagttgatgtcagcctctctgtctctcccaggcctaggagcggggatgaagcctcagatgccaggtgaggggactgcctgtgtctgtggccccacctcccctagatcctggtgttctagctgggtctgcgtgggactcccaggggaggggtgacccctgcctcatgagtgaggggaggtctgtaggagcaccgaggaccgaggggagaggaggttggggagagactgagagcccccttcctggcccctgcctccctgtcccccagtggctcagccttaccacgttcccttttttgccccacaggcctgggagctccaaacggctatggaccaggaaggggcagggctggggttccaggaggtccagagcggaggccttgggtccctcacttgctccctttctcttcaccaggctatttgggggttatgaaggcccagaagccaggtgagccctgccccgcctgtccctctgcctcccccaaaccctgagctccctccctcattcataccccacctcagctccatcggcattcaggagggggctgggagccgagccagtgagggggtgtcgggctgatgtccctgtctccctcccaggcctccagagcaggtggacaccaaaatgagggaggagaggtggcgccaggatccctggtttctgacttggctctgaaaggggatccaaaggcccttcgccctctccttagctagaatcccaaaccccctgctcacccctccctccccacaggccccttagcccagaatggctacagagcaggtactggggggctggagttgctgggagtgcagaaaggaggaaagaggtgggggcctggctctcccctgaccctgtactgagggttttcttgggggctcctgcagccttagacggggtagagtctggagaggaggcggcacaagggggagggaggtgctgggagctccagttcctaaattgggaggaaaggggggccaggctccagcccccttctgtaccccaacctctccccatgccgcccccacagaccctgcagttcccactggtcatggaccaggaaggggaggttggcatgggcaccaggtgggggacagatgccaggtctggaagagacccctcagtgaggagtgggcatgggtccctcacctactcgcatctctccaggtgctggagagggcatgaaacctcagaagccaggtaagcccttcccactcctcactctccctacctgcagaaactgcctacccctccacccttttcccctcccaagctgtaccctgtctccccatggtgcaagaacgggctggagctgga

SEQ ID NO: 27808 - DNA, 935 bp, Artificial sequence
  DNA replication origin
cgcacccgccgttgcccggcctgccgcccggcctgagccccgggccgccgacgccctccgctctcgccctggccgagctgccaccgctgcccgcgctcccgctgcggcccgagccgctggcgccctggggccccggcgcgcatctggcactgcccgagctgccgcccgaagcctgctcacccgcgctctccgccgccgtgctcgcactgcaggacctgccgcgcctgcccgcgcccgcgcgctccgcccgcgctcctaccgctgcttccgctgcccgtgtccgccgtcgcctcagcccctgggcccgtgggcgcgctcgtccgcccgcccctggtctccgagccgccgccgcatccgcttccgccgctgcccgcgcgaccctctcccttcagcctgctgacggcccccgagacccgcgacccatggctgctgtccgcctttcccctgccaccgcccgtgcccctgtccccgcatttcttcctgtcgccgccctgctgacctggcccctcccgcggcgggtgagtaggcagcccccgacagggccagtgcccgtagccaccttccccgggcatggattcagaggacgggggttagagcccagtttggggaagagagaaggagaatcggaagcagctcaggtttggtagagaaaggagcgagtctgaaaatagacttgtctaaagattcgggtcttccattttcccctgctgccctccagcaggcctcttgctaggttatttgagaatgtaacccgtcccctgggctgataacctggctagtgatcagggcagcgggcggggcccacagcacgtgtccaaggaaatggggatcaagggtatgaaaacaaaagtttaaagtgctgggccgggcgcggtggctcccgcctataatcccagcactttgggaggctgaggctggcggatcacctgaggtca

SEQ ID NO: 27809 - DNA, 935 bp, Artificial sequence
  DNA replication origin
catctggcccctcggttaggtcttctcagccccaggcggcctaggtgactcagagggtgtgtctggtgtgctgggtgggtgtctctgtgtccagcaggagggggaaggcttgttggtgtccccaagccaggccagtcctcagttccatgaaaggcgcctcttgaaaggcgcctcctctccgtgcctcttgcaggtgtttctggtcctcgcggagcacaaagcagactcgtagtcccgctcggctgagtggtgggtgtcacctcgaggggcctccgcccatcggatgccctgagggtgctgctgctcttaccaccccgctgtcacacctgggctgagctcgcacaggccctccagacgcactgccaggctgaggacagccacgtctcctgccggctggcgcaggttcccactgagcgactctgacagtgccacctggggactctgcgggctctcggctgcaggcggggttttaaggcccaggcaggggaggagcagagtgaagtgcagggaggccgggataggggagacctgagccacggggagggtgcggggctgggggttcgtgggcagcggatggatgaggggcctgggggccagcgggggatgctgcggctgagtggggacaggggaggaaaagcgtccgtagcatctgtgcatgtgggaaccaagggtaaaggaggggaagatggaggacaagctgaggaagaagagacggatcgggggtcaaaaaagtaacaggctcaggacagaaacacacacagggggcgtcggcttgccttcctgagcctcctccttccgcagcccctccccagctgcctctgctctcccccagccgagtttcgtgatgcaaacatgccccagctccccgagtatcgcacactcccgcccgcctgggactctctggaatctgatccatcccccgtctcagcccagtg

SEQ ID NO: 27810 - DNA, 1288 bp, Artificial sequence
  DNA replication origin
aggccagggttcctggggcaggggagggctcagaagagaaggaaggccagccagtgtcctgggcaacggaaggaaacaattactggggaggtgggggcaggccagggttcccaacacctctaggctgcccaacttgggggagaacatcaaaggggaccccactgagaagagctcagccaggccagctgacccagccctgcagccaggtgtagcttgggcttttggaaagtgggttttcctggggaaggaggttgtgatggagcagggcatctggtcatcaggccaaggtcgaaagggcggggcagtggggagcagtgggctcccaggggaaacctccgcctcacacgtagtccctcttgtccagtccagatgcacccgagcgggaggggatggagtagcccagccgaggtccgcggggccgctcgacctggggcggggggcacgtgcagcagaggagccccccgcccagcataagcagtgcagccgccgcccagcccaggtagagggaggcccccagctcccgcttgagggcctcagccaccagggggttgtagaagtcctggatgatggcgtgcgccgtccagcacacagggatgagcaccaggatgccggcgaggaggaggatgacccccgcggtgagcacgatacgggccttggcaccttcgtcctccacacacgtggtacactgggcacctgtgatggccaccaggaggccaagcagggccagcaggagggcaatgacacagagggcacgtgcggcctgcaggtcctgcggcagagccagcagtgagtcgtacaccttgcactgcatctggcccgtgctctgcaccacgcaggacatccacaggccctcccacaccacctgggccaccacgatgctgttgccgatgaaggcggtcaccttccacaggggcagggcgcaggacaccagggtccccagccagcccagcacagccagggtcatgcccagcagttctaagccggtcgaagccatctggcccctcggttaggtcttctcagccccaggcggcctaggtgactcagagggtgtgtctggtgtgctgggtgggtgtctctgtgtccagcaggagggggaaggcttgttggtgtccccaagccaggccagtcctcagttccatgaaaggcgcctcttgaaaggcgcctcctctccgtgcctcttgcaggtgtttctggtcctcgcggagcacaaagcagactcgtagtcccgctcggctgagtggtgggtgtcacctcgaggggcctccgcccatcggatgccctgagggtg

SEQ ID NO: 27811 - DNA, 1082 bp, Artificial sequence
  DNA replication origin
acctggatgggcgagtccctgagggggtcggccggtccgcgcccaagcctccgaggtgatagggtccttcggggctcccaagggttaaacgcccctcccccctccccagggacaaagactccgaaacccctggcgcccctcccccacctgccttgcctctcggggcggggcgcccctcccccctccccctcacctgggggagcggaccttgcggccactgcagctatagaacccctccagggcgcgcggctcccaggctggggtggtcgggtgggccggggcgccctcggacagagtctttttcatgcagtgcatgaaaaagaaaggggcaggggcacactcagaggggagaggcctgggcgcctataccagcgcggccccgaccctaactcggccagaggcctaagggccggacctgagcgctggggcaccgtgccccagccagtctccccaaggtggtctgctccgcccaggcctggggcccccggctaatgagtagagcctgccctccgaccgctgccggccgggaaaagtttaggtccaagccgtacaatgaaagtactctgggcagtgggaggccacagcccggccctagtcagaagtgattccctccacgacctccaacactgaggggacacaggtgcaggccaggtggcggtgggagaactggtgttgaggggagtctagcacggcattttcgtctagaattcataggaaaaggccctcagccttgaggctatgctctccggcgcctagggcaggtcagaagggtggggccagggagttatccactggctttgggggaggaactgcttttagatgggggattaatgatgcttttcttcatctctcctggtcctggtgtctgccagcctggggtgtggaaccaagttgtgagggacattgggtggtgggaggaagcttaggatctccaatcttagtgttgaaattaacaagttttggttgggcacggtggctcacacctgtaatcccagcactttgggaggcttgaggcgggcagatcacctgaggtcaggagttcgagacccgcctggccaacttgatgaaaccctgtttctact

SEQ ID NO: 27812 - DNA, 990 bp, Artificial sequence
  DNA replication origin
ggtcaggctgctctcgaactcctgacctcgtaatccgcctgcctcagactcccaaactgatgggattaaaggcgtgagccaccgcgtccggccgttcgtgtctgatttctatatgtgctgccgaagcgagcactcgtgtctaatttttgatttccccacaccacgcacgctggactagatcaccggctgggcaaggaagggggtctgcgtccctgcggggtcctggcagctcccgcgccaggactttgttgaatgaatgactgaactgagcgggcgccgcggggcggggcgtcccgaagcggacctcaaggcgggcggaggcgagagctccgccccggaaggcgggggcgggggcggggcggcggccgtgggtccctgccggccggcggcgggcgcagacagcggcgggcgcaggacgtgcactatggctcggggctcgctgcgccggttgctgcggctcctcgtgctggggctctggctggcgttgctgcgctccgtggccggggagcaagcgccaggtacgcgggactccggggtcggggaaccccgggccggggctcgggagccggactgggtgtctggagaacagcgccgaactgggggaacaggcggatgtggggatctggggtcaggtggccttcaaacagctcgctcccggctgtgggaagttccatcactctccaagcttcattcacaatccgggcctcagtttctcccaccgtccaattggggttggggggggtcttcagttccacaagtccgaagtacttcgaatggagagagaaagtgagtgagggcgggatgtttagtctaggaaggggcacgcccccagcctggtccgtacagggtctaactagccccagtgatcgacgagttggggaggccgtcgagaggcactagggtctgtgccctctataccatgtggggtgcccccttccatccggtgacttcagtgcccagctatgcggggggagggactggggtcgggcc

SEQ ID NO: 27813 - DNA, 1066 bp, Artificial sequence
  DNA replication origin
tacagggtctaactagccccagtgatcgacgagttggggaggccgtcgagaggcactagggtctgtgccctctataccatgtggggtgcccccttccatccggtgacttcagtgcccagctatgcggggggagggactggggtcgggcccggtgcccaggagtgagtcacccgccggcggcaggggggttgtggggacctgaccccccccacccccagcgtcccgcgctacgccctccctcccggagctgccgtgtcccggtcgggccgtgcggtcacctgtgaggaatgcgcggggagggcgccggtgactcacgttattcgagccggccgaccctgacctcagaccccagaatagccgagtcccgcccccagcctctgacccgaggccccctccccaggcaccgccccctgctcccgcggcagctcctggagcgcggacctggacaagtgcatggactgcgcgtcttgcagggcgcgaccgcacagcgacttctgcctgggctgtgagtggggggcagggccagtggccagcggaccccagactgggagggagggtggctggtgcgcagagcggggccgagagctttgcatctgggaaatcattcgggaggaggtgggagctgggagggggctccggtcagggaggaggccacgtttgggagaaggcagaaggctcagtcttagggggcggggctggcctggagaggggcgaggtctgactccgagtcccgcccccaggcgctgcagcacctcctgcccccttccggctgctttggcccatccttgggggcgctctgagcctgaccttcgtgctggggctgctttctggctttttggtctggagacgatgccgcaggagagagaagttcaccagtaagtgtgccctggcctgcccagccctgtcagcactcgaccttttctctgctgctgacgaccccacctcttatcttgcagcccccatagaggagaccggcggagagggctgcccagctgtggcgctgatccagtgacaatgtgccccctgccagccggggctcgcccactcatcattcattcatccattc

SEQ ID NO: 27814 - DNA, 1912 bp, Artificial sequence
  DNA replication origin
gccaagctcctccaaccacaaggggggtggggggcggtgaatcacctctgaggcctgggcccagggttcaggggaaccttccaaggtgtctggttgccctgcctctggctccagaacagaaagggagcctcacgctggctcacacaaaacagctgacactgactaaggaactgcagcatttgcacaggggaggggggtgccctccttcctagaggccctgggggccaggctgacttggggggcagacttgacactaggccccactcactcagatgtcctgaaattccaccacgggggtcaccctggggggttagggacctatttttaacactagggggctggcccactaggagggctggccctaagatacagacccccccaactccccaaagcggggaggagatatttattttggggagagtttggaggggagggagaatttattaataaaagaatctttaactttaaatggtttggagaggcagtgatccccgactgactcccctgagctggagggagggagtgagtcagccagccgcgggggcgggggtgaggctctgactcacacattctcaatgcctggaactcagccggcaaggacctggctggccctaacagttttccagggaagatcttgaggagaaaccccagcatcccgcgcctctgccctctccaccatccccaaaagccccaggttccagactgaagccttcctttgctcagcaatctttattcagttcttcttgggggtgggatgcctcccttcccatgctcccacccctcccatcccagaactccgttgggctcagtgtcctctgttgagggaaggtcttggtgcccagatgcctactctgcaggagagggaggaaccttgtccctttgcgggagtcgctggtctcttctgttgtggggaagaaggaaggtgggaggggcactgtccaccagcactcagagctccattatgtccccagctggggttgcagggtaggggggactgggggtgtcccccagcctcagcagacggagggcctcagggatgaggctgccaggatagcgccagagaagcagctcagagcaagggctcctagaagaggaaatgactgtcagggcatggagctgaggctggcctagctgagcacctcccaccaggtccaggtccccaggggctcctgggttcccagcactttccaaagagccaagatgggaaacaacccagaggtcagctagagctaaaaatggcacgatgaggcagggcctgaggtcagctgtgaggaccgcctgtgattctgcagaaggcctggccagtggaggaacctacctgagtgggggcagggctggggagaaggtcatgggggggctgcagtaggggtggtcattgtgcaggctgagttgagagaagtgggtggccatgttctcctcagacagaaactgcttgcgcagaggctccctggggagagatggcagagaggcaggctgggatactgacacaggaggcagcctgttggggaccagaggtgacagagatcttgttgggagtccctccctgcccccaaactcactgctcctcctccaggcgccgcttggtgctcatgggcacagctcctcggagaggggagctgggaaaaaaagagagcctggtgcaccccaccctcttggccccttcccaaggatctgcccgcctaagcctgcagcatcagccaggagccccaagcccattcctgtctcagctggtgccggtccccgctctcctggaccatccagcagggtacctcggaagtctcgaccctcagccgcagccccagtcccatctcagctcacgcctaagccccgccgattcgccccaccccgtattcatcctgcagaccagtcctgagcacccagccaaagctcctgcggcccttggtcaggccca

SEQ ID NO: 27815 - DNA, 1151 bp, Artificial sequence
  DNA replication origin
acgtctatcttttctagggcagggatggggctgggtatttatgtatcaagatcggacagagtaatatataaatcactccaccgatttggcccccattcatagaaagaaagagcatggtaaaaaagcctgaaactttattgtaaaaaaaaaaaaaaaaagaaaatgaaaaacactctaaaaccctgagctggctgggggtgtcgtcagagatcagaaggacagggagaaggctcggtaacccaggttggtgaagacatccacccggcagctgttgcctgcagctgtcaggacctggaggaaagaggggcatgactggcctgcccacacccctgcctcccagccgctccgcggcccctgccggacccaccttgcactcaggcgcggcaggctgctggttgaggctgaggctgagcagccctggggaggagccaggcacctgggccttcagctccccgctcagctgccactggttgacgcagcggccctggccagctgacagaatctgcagaggacagggaaggtgctcaggggtcaggactgaagggaagagtcagtgggggtggcagaagtgagacacagggcctcaccaggtcctggtagaaggtgacgtgcttctgtggcgcccggatggggaagatggtggtgggtgtggaggatcggaggtgccagagggtgagggctgggccccctccacagacctggacagaaaggtgggagtccccagctgtgaaccacaggcccacagctgacagggcccggagctgccatcccatcccacagtctgcccagctcaccatccagtcggaatcagttgccaaacatccaatccagcgcccattgtggggcctcgagcactcctgggatggggaggggaggagggaaagaggtgaagacctggagaattcaaggagttgggggagaagaggacaatggccacggtcacaccctcacctcgtgcttatagacctcgatcgtctggacctccttggctgtgcgcaggtctgcggggaaagaactgtgagtggtgccccacttgcctcagcctccttcactgccatcttgccctccaaccagccacctgcttaccccaaagtcgaacagctccatcctcgccacctgacagcacctctgggctcctttcccgcagtgcc

SEQ ID NO: 27816 - DNA, 1492 bp, Artificial sequence
  DNA replication origin
agacaatctgggccctgtcgctccattggcctgaagaggaaagtgagcccctaagtgggcaagggcagccctctgggcccagccgtcaggtccttcggaagaggttactgagaaagccaccggcgggcccggggcccaggcgcagcgagaagcggggcgcggcacggcgcggggtcgacgacgacgcggaggcgctcagctccttctggcgctgtgagcgcagctgctgcccgatcaccacctgcatgtcgtcctgcgggaggccgtggtcggctcagcgccggtcccgccccttgccccgccccgcacacgggccccgcccctcacctgccaggcctccagctcctgcgtgagcgccaccttctggcggatggcgcgcagcagctcccgagacagggagtctcgctccagcgagacgcggttgagctgcagggacagctccagggccctaggcgggcaggagcagaagacgcgtttgagggcgctagggcctcagggagccggggtggcgggggacttctgtacccgggcgggaggagggctgcaaacacctagatcaaggaggtcagggggcccctgggtgggagtggggatcattataacccgtatcagaagaggaatcaggagcccaggagggcccagagggcgctggggcggtggtcaatggcttgaggcttacttgttcacggcctcgtcccggtctgagagggcactgtgcagggcctccccagggtcttcctgcgcccgcagctccttctgcctctgcagctcttcccgcagggactgcagctctgcctgctgcagcgagatctgtgagcagaggaggggggccgtgcggcagatgggccaatgggcctccctgcttctcccagcagccccgactctggctctccccacccctcctctgcctgcgacagacaccccaggcagccgtggccctgtgctggagactccgatatgagccctctgagcccctcaggctggtgcggggtggggtggagcagggttagttggagtggtataaccctgcaggagggatgcagggagaagcattgggagtggaactaagggcagaggtgctgtccaggaagtcttcctggaggaggtggcatacaggctggctcttgaagtaagtttgttgagatgaaagccgatccaggtatagggagcttagtgggcaaaggctgggaggtggacatgggagacagaaactgacagctggaggggccgtgcatccagcaccgtgccctctgccccacctcatcttgcagcttggccacttccacctccttctcctccagtatctccgctggactgagggatgttcgcttcttggggggctctaagatctcttccgggggtgaaggctgggggctggacgcctttcgggtctttggggaccgggtggtctgtgggccaaagaaatgggttagtggtgtggagtttattggggaaaggaggaaaggcggagcctgcaaccctctcgatggca

SEQ ID NO: 27817 - DNA, 1088 bp, Artificial sequence
  DNA replication origin
agaacgggcacgggccctcagcgagctcagcgagcagaacctccggctcagccagcagctggctcaggtgggatggccctgaccccagggccctggacaaggttggggaggatgcctgggtccccagcggggagtaggtgcattgggcttggtgctgaggctcctctgtccctctttccacctccccaggcctcccagactgagcaggaacttcagagggaactggacgcccttcggggacagtgccaggctcaggcactggctggagcagagctgaggacgcggctggagagtctgcagggggaagtgagtgtcagctggggctgggggattatctgagccaaaaaagccgggctgagggctgggaggggctgcccctgtccccagctctcaggcctttccccagaaccagatgctgcagagccgccggcaggacctggaggcccagatccgaggcctgcgtgaggaggtggagaagggtgagggcagactgcagaccacccacgaggagttgctgctgctgaggcgggagcggcgggagcacagcctggaggtgacctgcagggctgggggactacaactgcctggacccttagcaatggcttcagggctttctgggagatgaggccggagctggatcactgggaggcccagaggctggcccacaagagcatgggcattagcccatgggcaaatgggagccacggaaggctgttgagcaggtgaggcatgctcttagagtgcatcagagcctggcagctggaagagcagggagggggctggtgccagagctcaggccaggaatgacagcccctagaccacggctgcgcaatggagacggagaaaaagaaatgaaaagaggatgcggtgtctgatgttagagatcaaaggagtctgcactttggggtcagcttgccttccttcgcatcccggtgccccttcttacttactactgtgggacaagcagcctcagtagcaccaataaatgctgcatgaaacaattactgaatgaggaggtagactgggcaggggaggagatggggctcttcgaggtgcggccctgctctataggcgaggaaactgtatat

SEQ ID NO: 27818 - DNA, 1002 bp, Artificial sequence
  DNA replication origin
ctggctaggaggagctggggagggggctgggcagagtccaggcctccagagcccctgggacacagcaggtgtgtgctgccatgggccggggcttgaactctgccagactcaggcgccaaaaacggcgcttgcgacctcaggtccagaagccccggcagcagctggaggtgagtggtcatcagagatccccccaccccaacccttgccccgggcccacgcgtcctgtctgctcggaaccttccctctaaatctctgggtcttgctcacgcttcctccctcactctcccttgcttttgtgtctgtcttggacacaaggcccccttaggctttctccctaggtgtctgtccctccatcgccatctctctgtgcctgcccagtctcatcggtgcctctctgcctctgtccctctgccctggcccccacagcggctccagcaggagaaccatgagctccggcgaggcctggcagcccgaggagccgagtgggaggcccgggccgtggagctggagggggacgtggaggccctgcgggcccagcttggggagcagcgctcagagcagcaggacagtgggcgagaacgggcacgggccctcagcgagctcagcgagcagaacctccggctcagccagcagctggctcaggtgggatggccctgaccccagggccctggacaaggttggggaggatgcctgggtccccagcggggagtaggtgcattgggcttggtgctgaggctcctctgtccctctttccacctccccaggcctcccagactgagcaggaacttcagagggaactggacgcccttcggggacagtgccaggctcaggcactggctggagcagagctgaggacgcggctggagagtctgcagggggaagtgagtgtcagctggggctgggggattatctgagccaaaaaagccgggctgagggctgggaggggctgcccctgtccccagctctcaggcctttccccagaaccagatgctgcagagccgc

SEQ ID NO: 27819 - DNA, 1328 bp, Artificial sequence
  DNA replication origin
taatcccccagccccagctgacactcacttccccctgcagactctccagccgcgtcctcagctctgctccagccagtgcctgagcctggcactgtccccgaagggcgtccagttccctctgaagttcctgctcagtctgggaggcctggggaggtggaaagagggacagaggagcctcagcaccaagcccaatgcacctactccccgctggggacccaggcatcctccccaaccttgtccagggccctggggtcagggccatcccacctgagccagctgctggctgagccggaggttctgctcgctgagctcgctgagggcccgtgcccgttctcgcccactgtcctgctgctctgagcgctgctccccaagctgggcccgcagggcctccacgtccccctccagctccacggcccgggcctcccactcggctcctcgggctgccaggcctcgccggagctcatggttctcctgctggagccgctgtgggggccagggcagagggacagaggcagagaggcaccgatgagactgggcaggcacagagagatggcgatggagggacagacacctagggagaaagcctaagggggccttgtgtccaagacagacacaaaagcaagggagagtgagggaggaagcgtgagcaagacccagagatttagagggaaggttccgagcagacaggacgcgtgggcccggggcaagggttggggtggggggatctctgatgaccactcacctccagctgctgccggggcttctggacctgaggtcgcaagcgccgtttttggcgcctgagtctggcagagttcaagccccggcccatggcagcacacacctgctgtgtcccaggggctctggaggcctggactctgcccagccccctccccagctcctcctagccagttccctctaattaaccctggtcagccccgccctggcccaaaaacctgtctgaccagcgggggaatgccctggcacacccagatgcccagcgtggggaggcagatgaatcgggggttaacctctggcccactctctctaggccctcaaagcgggatgggcctggatgaaggtgacaattgccacagctgctgcagcgactcgcaggtaccctgcattagggctctatctgcattgcttcatttcatccactagagggagaatcactaacgtcctgggtttacagatggaacaagctcaagagttgctaagtgccttgcctaaggacacacagtcatttattgttgtttttattttttatttatttatttattttgagacagatctttactctttggcccaggctagagcgcagtggcact

SEQ ID NO: 27820 - DNA, 882 bp, Artificial sequence
  DNA replication origin
gctggtcctgaactcctggccttaagcgatccaccctcctcggcctcccaaagtgctgggattacaggcatgagacaccgtgcccagccgacacacaataacttcacaaagcagggatgccaactcaggcagcagaactcttaaccgaatactgcagaggcaacacagcttcaggattaagctgtcaggttcaaggtcagattgtcctggctgatgctcggctctgctgatgccttgtggcctggacacaatatctctaagtctatccacccacactgctatcaatcctcccacatttcctgagctccacttgttctggggtctgctgtcagtggcacgtgagaccaccaagttcactgcttcaagcagcttagagtccagagggcatggacacatgccggagccaggtagtttcagggagacagtaagggctgtaaagagacccgggaaatgatagagagtaaggagtggggtgggggtggagggtccttcaaggaggacgtcatgtttgagtcgacttctgcaggacaagaagagccaccagaaagaaggctaggcattaaggaacagcaagtgcaaagttcctgagggaacaagcgtgagttcttggaggaaatgaaaagagccctcattgtcggggagagggtggttcggctgcccttcttggaggaggggagaaaggggtggtgctgctgtgatgaggtcggggaggagcccagttctctgggacttttaggccctggggaagggttttggtttcattctaagtgtgagggggagattctggttgaggagtgaaatgatctgatttgcagtttttgaaagtcctgggctgtcccttagagaacgggctccaggggtcaaaggtggaagctgggggct

SEQ ID NO: 27821 - DNA, 1637 bp, Artificial sequence
  DNA replication origin
aagagccctcattgtcggggagagggtggttcggctgcccttcttggaggaggggagaaaggggtggtgctgctgtgatgaggtcggggaggagcccagttctctgggacttttaggccctggggaagggttttggtttcattctaagtgtgagggggagattctggttgaggagtgaaatgatctgatttgcagtttttgaaagtcctgggctgtcccttagagaacgggctccaggggtcaaaggtggaagctgggggctgggcacggtggctcacacctataatcccagcactttgggaggctgaggcaagtggatcgcctgaggtcaggagttcaagaccagcctggccaatatggtgaaaccccgtctctactaaaaatacaaaaattagctgggcttggtggcgcacacctggaatcccagctacttgggaggctgaggtgagagaatcacttgaacccaggaagcagaggctgcagtgagccaagatcgcaccactgcactccagcctgggcgacagagcgagactccatgtaaataacaacaataataaaagagtggaagctggggactcaggagaaggtggctggagtgtctgtggcagaagggatggaggctgtgatctgtgatcagcttggaggctgcagagccgaccagtgggtggttggagtttagaagaatcaaaagggcttgcggatattggggggaatttgttcactcaagaaaggttggctgagcgcattgactcacacctgtaatcccaacactttgggaggctgaggcaggcagtttggttgagcccaggagtttgagaccagcctgggcaacatggtgagacctcatctctacaaaaaatgcaaaaattagccaggtatggtggtgcatgtgtgcctgtagtcccaactactcaggaggctgagatgggaggattgcttgagctcgtgaagttgaggttccagtgagctatgattgcaccactgcacactatagcctgggtgacagagggagaccctgtctccaaaaaaagaaaaaaaaaatagagaaagagtccaaggaggtgcacaggctctggtcctcaaggttgggaaggcgaggatggggacagcaggtgatgggggcatggaatcgagtgcgtggaatcaagtgccacttgtgttgagatgcccactaggtggcctggtggagagggttagctacccaggtcaggctcagggcagtggttggggccgacgcagcagataaaggagggtgttcaggagaccagatgtgagccccagagcaagaagtgggccaaaaatagaacctgggcagagggaactgttcctacctcattgggctgggcaagaatcaatggagagtcatggaaagcactcagcccagtgccaggcaaggagtggacacccatgactgtcgcctggtgttccgctatactgctgaggagctggacccaagatccagagagggccagcagctgacccagggtcacacagctggacgagggtctgaacccagtttgtttttgttttttgagatgcagtctcgctctgtcacccaggctggagtgcagtggcatgatcttggctcatagcaacctctgcctcccaggttcaagtgattctcctgcctcagtctc

SEQ ID NO: 27822 - DNA, 1039 bp, Artificial sequence
  DNA replication origin
acacaggtcattaaccctttgtggcccaggaagccctggctgcaggaccgggcaggctggcagcaggtggagaattcctggagggccaggtgctgggcggagggtgagcccctgtcaggctgcagagtagagtgtcccgcagccacctgtccccgcagatgctgcaggtgacatgagctctccagatgggcccagcttcccgtccgggccgctctcagggggcgcctctcccagcggcgacgagggcttcttcccctttgtgctggagcggcgggactcattcctgggagggggcccagggcctgaggagcccgaggacctagccttgcagctgcagcagaaggagaaagacctgctgttggccgcggagctcggcaagatgcttctggagcgaaatgaagagctgcggcggcagctggagacgctgagcgcccagcacttggagcgtgaggaagtgagctagcactggacggggtgggtgggtgggtgggcaggggaggacgggtgggcctggagaggacaagggaagggagtcaggcaagggaaggagagaggagctggggaggacagccgggcgaggggggcactttggaacaggtcagagctgggcccagtccccctggcagtgttgcccagtggcaaagaacatgaactctgggtgccgggcacagtacctcacacctgtaatcccagcactttgggaggccaaggcaggaagatcactagcccagtgttggagaacagcctgggcaacgtagtgagactctgtctctacaaaaaataagaaaattagctggatgtggtggtggcacctgtagtctcagctactcaggaggccgaggcagggggatcaattgagcccaggaattttagagtttgaggctgcagtaagctatgattctatgatccactgcactacagcttgagcaacagagtgagatcctgaaaaaaaaaaaaggaaggaaggaaggaaggggaaggaaggaaggaaggaaggaaggaaggaaggagagagaaagaaaagaaaaaaaggaaagga

SEQ ID NO: 27823 - DNA, 1224 bp, Artificial sequence
  DNA replication origin
tctctgggcttccgacgcctggggctggaggccccaacacctgggcagctaggtgcggaaggggagggggagcggtctccaggtccctgtctctcgcgtggaggggggcgggggagcggggcccgcgagggccaagtcagggaggtccccgggagcggcctgggggcggctgggctgggaccaccgtgacactcacgtcctgcgagcagggctgcacatggacaccgggcgagaggaggagggagagcacgggtgtgtgtgcctagtgggtggtgagcccccggagggctggggctggtaaagctgttgtgtcgggccctctgacccgagcccctgaaccccagcccctgagccgccctaggggagcccagggctcccgtccccaggggcggaccgggaagtaaacagaaactccgagccgcgctgcggccgggcggccggcacaacctgttacctcgccctgtcctgggccccacgccagggccctgggaaactggggggctgagggtcagggctcctgagtccggaggggtgggggcatgaatgcctgagtcccgtggaaaatggggactggggtgggaatccttggtgggggacattggaggtggggacctctgagtctggagggtggagtcaaagcacctgctcaggaggtagcaggagaatgagggcgagagacccgggaggtcaggggctgggatctgggcttctggcaggggaaggagctggattcctgggggcgaagatacctcagttcccaagccttagggtcctgcattcctgagagaagaggctgggcccaactccaactgctgagtccctgagaacctgggttctgggaactgtctcagatggcgaggggctacaagccaaactgctgggttctgggaagagaggggacagggagcagaggtggcctgtggccctggagcactggaatgagctttcctggggacagagattgtctggcagaggccaaaggctgggcaggtcatttccttctgcttcctgcctcagtttaccccagggacattaacggaactgggtagccaaaacacaggtcattaaccctttgtggcccaggaagccctggctgcaggaccgggcaggctggcagcaggtggagaattcctggagggccaggtgctgggcggagggtgagcccctgtcaggctgcagagtagagtgtcccgcagccacctgtccccgcagatgctgcaggtg

SEQ ID NO: 27824 - DNA, 1244 bp, Artificial sequence
  DNA replication origin
cccccaggccgctcccggggacctccctgacttggccctcgcgggccccgctcccccgcccccctccacgcgagagacagggacctggagaccgctccccctccccttccgcacctagctgcccaggtgttggggcctccagccccaggcgtcggaagcccagagaagcggctgggctcacccccgacggctgagttcctgccggcgcccccggttccccggcgatcccggttcccctgcccccgccccggctcccccaccttctccgccgacgcggccggaccaggccctccccaggctcgaggggcccggccctcggcgtcccccaggctctcacccgaagccgccgggctccctccgaggtccccgcggtctccggtcccctcttccggaggcggctccaggtgtgcggccaacacaggtgaaggggcggggccgcgggaggggccggggcgctccctggctgcctgaatggccgggcggggtcgagggagagtcgcttccacctgggtggggggcactggcccaacctgctgtggttgcaaatggcccggccagttaactgagcatctactgtttgcagatcctacattgaggtagcctccgctcctttcccgtcacgactgccttgccctgtggggcaggaaattattagcaatgacaacaacaccgaatctgacatcttaagcattctgctaagtaaactcttttttattttttagagatgggattttgctctgtcacgcaggctggagtgcagtggcaccatcactgcagtctcgtcctcccaggctcaagcgatcctcccaccacagcctcccccgtagctgggactgcaggtacatgccaccatgcccagctaatttttgtactttttgtaggggtggggtttcaccatgttgcccaggctggtctcaaacttctggattcaagcaatcctcccgcttcggcctcccaaagtgctgggattacaggcatgagcctctgcttctggtcaagtaaactcttttataggcataacttgttgacctttttttttttttttgagatggaattttactcttcttgcccaggctggagtacagtggtgccatctcagctcacagcagcctccgctcccgggttcaagtgattctcctgtctcagcctggtgagtagcgggtactataggcatgcaccactacatccagctaattttgtatttttagtagaaatggtgtttcaatgttttggccaggctggtc

SEQ ID NO: 27825 - DNA, 946 bp, Artificial sequence
  DNA replication origin
ctctccttccccccaggaccccgtggggcaggttgtctgagagccggggggatttccgggcagcaggaggctgggaaggaagcctccttccccgcggggtcccggcccgccctccgccccgccagctccagctgtgcgcggttgcagctgcccgagggccaatactcagtccctcagcccacgtgggctgcgcgcggggctcggcctgggcacgcgggggtttgggcccctctagatgccgggagcagcggctgctccgcgactgcacccctctccctaagtgccggacatttaaatgctgcagccactgcgcggaagccacagcgcctgccagtgccgggagccggggaccggggagtgagtaggcgggggagatccgggaagccgagacctgggggtctgcgagccgcctcctcccgcgccgagagcaccgggctaggaggccggacaggtggggaaggaactggaggaagcgggcgggaggcttcctggggagggcgggtgggcgagtgtgagttaaactgctcagtctcggagcagttcaggggcagccgccggagctgctcacaaaataaacagcgagcaggatgcggagctggagatgcaaaggcaaacactgcgatcccgcgcccgctcgctggggccgccagaacaaaacaccaaggactgggaggctcaaccagaagtttacgttctcacagttctggaaactggaaggccaagatcaaggtgcctgaggggctagtttctccggatgcctcctcctgggcaggcagatgggcgtcctcttgctgtttccccacacggccgtccccctgcgcttgcacaccccagaagtatcgtcctcttttgttttgttttgttttgttttgttttgctttttttgagacggagtctcgctctgtcgcccaggctggagtgcagtggcgcgatctcggctcactgc

SEQ ID NO: 27826 - DNA, 1567 bp, Artificial sequence
  DNA replication origin
tcggggtgcgcccggcccggcccggcccgccccacccagccctccgctcgcgcccggagaggaggggccgctggcgcagcgccccgggaccccgagaggccgccgcggcacatccagacctccgccgctcccgcgccctctcaaccatcctgggattcccgggcccacccgacccagcggcgcgaccctggccctccgggaccctccgctgactccaccgcgcacttcccgggacccccacacacatcccagccctccggccgatccctccctactcggtgccgggtgccccccgccctctccaggcccggatctcctcccccaggtccccggggcggccccagccaggcccccttcgaaccccgccggcggcccgggctggggcgcaccatgcggctgcggctccggcttctggcgctgctgcttctgctgctggcaccgcccgcgcgcgccccgaagccctcggcgcaggacgtgagcctgggcgtggtgagcgcggggtccgcaggctcctggggtctgcagagagattgggagagggaagccgggcccggactcctgggtccggaggaggcaggggccagattccaatatccaaagagtgactgaggatggggtctgtgctcccggcttcttgggtctgtcgggaagtttggggctgggatttggagctctggaaaggagctgaggtgcggagctgaagtccagacaagactggcaaacccgggactgaagcggggacctatggaggggagcaggcaggcatccggggctggggccctgggctctgggtgcctgggaggggcagggctgccaggatggtggtgggcagagagagcccatacttttcacccagcccgcttcacctgccccctccgatgccctaggactggctgactcgctatggttacctgccgccaccccaccctgcccaggcccagctgcagagccctgagaagttgcgcgatgccatcaaagtcatgcagaggttcgcggggctgccggagaccggccgcatgggtaggtggcccccacccctccccagccctgcctctgcacccagcctgtccaccgcccaacagcctttagacctcagtgtgctcctggaacacggagctgtgaagatgctgatctcaggccccaaacccagagggcctcaggcgttcatctttccataagcatttatcaagaacctggtggctcatgccggtaatcccagggttttgggaggcggagactcaaggattgcttcaggccaggagtttgagaccagcttggccaacaaagtgagacccccccactctccaaggattttttttttttttttttgagacggagtatccctctttttgcccaggctggagtgcaatggtaccatctcggctcaccgcaacctctgcctcccaggttcaagtgattctcctgcctcagcctcctgagtagctgggattacaggcacgcaccatcacaccaggctaattttgtatttttagtagagacggggtttctccatgctgatcaggctggtttcgaactcctggcctcaggtaacccgccggccttggcc

SEQ ID NO: 27827 - DNA, 905 bp, Artificial sequence
  DNA replication origin
atataggccgggcgtgattgctttcatctgtaatcctagcacttcgggaagcacaggtgggtggatcacctgaggtcaggagtttgagaccagcctgaccaacatgttgaaaccccgtctctactaaaaatacaaaaaattagccgggtgtggtggtgcaagcctgtaatcccagctactggagaggctgaggcaggagaatcagttgaatcctggaggcagaggttgcagtgagccgagatcgtgccactgcactccagcctgggcaacaagagcaaaactccatctcaaatatatatatatatatatatgaatatccacacatacacactgagtgactactagcacaagacaagacatacagagttccgctctccccaggtacacagggttgagatccaatgggaaagcagtgagccagctgagtcaggggtaagaggagccagtgaccagagaaatgacccgggacatatgaggccagaagccaaaactatggcatcagtagggagactgcagaaggcggcaggtcctggatcaccaaggaccttgaaagcatgtggaagactttgatcaatgggggaatcattaaggggttttgcattccggaactatcatcagcttcagcggggggcagggggtaggatagaggcagggaggcaggaagttctcgcagggtccaggcaagagatggtggagtgtggtcctggggaagggggcagtggacggatctgagggaggttcagttaggatgggcaaggattgagatctggctggatcctggtgacaggggagatgaggctggggcccttggaggatggcgtcctggtgctgttaatgcaggtgtgagagtgggaggaggaggagcaggctggcagaaggcaggcacaagtgcaggtctgggcggg

SEQ ID NO: 27828 - DNA, 1675 bp, Artificial sequence
  DNA replication origin
aaggtgatcaacaacaagagtgaaggaggaagtggtcagctgtggctggggcaaaacaagcccagtaagttacattggcctgtgtttggtcatccagggacaaagtgacctttttagtgcctgtaggcccagcgcgttggggaagaatttagaatgcagtggggataggtgtgagaggagcgggggaagtgaagattgagttgagaccactggctggagaacttgaccgggaagggagggcagagagcagcatggggtgaggggagggaatggatccaacgagcgtcttaggatgagggagttgtgagcgctcaacaccattacaaagaagggatcggggattgatagactgacagatgcatgcacagaggcaggtatggatgcatgcacagaggcagggatggatggacggacaaatgcatgcatagaggcaaggatggatggatggacagatgcatgcacagagtcagggatggatgaatggacagatgcatgcacagaggcagggatgaatggacggacagatgcatgcacagaggcagggatggatggacggacagatgcatgcacagaggcggggatggatggacagatgcatgcacagaggtggggatggatggatggacagatgcatacacagaggcagggatgaatggacagatgcatgcacagaggcagggatggatggatggacagatgcatgcacagaggcagggatgaatggacagatgcatgcacagaggcagggatggatggatggacagatgcatgcacagaggcagggatgaatggacagatgcatgcacagaggcagggatggatggacagatgcatgcacagaggcggggatggatggatggacagatgcatgcacagaggcagggatgaatggacagatgcatgcacagaggcagggatggatgtacggacagatgcatgcacagaggtggggatggatggacagatgcatgcacagaggcggggatggatggacagatgcatgcacagaggcagggatggatggatgcacagatgcatgcacagaggcggggatggatggacagatgcatgcacagaggcggggatggatggacggacggatgcatggccagaggcagagatggatgggtgggtagattggacggacagatgatggtaggttgttcttgtcctggaggaggtgatccaggctgagtcctcacactgggcagagcaagaggcaggaggtgagcatggggagatgcagctgtgtgccccagtgcaccggaagttacagatgacatcgatgtcctgtcctgatgaaacaggaaacacatttgtcatttgagagttagtggctggggctgggtggaagcttgaggggctgtgggcctggaatggggctgaggggagcgtgcaggagctgcctgccaaagcctggagcaaggatgacaggaggtgccggggcccctgtggactgccctctgggaatcttgtggggctgggtctgcacagctgtggttgtgtaacttcccccagatgcatggcgtgacaagggtgcaggaaggggtgcagggcccggaagcccagtatggccaaggagagacaaggcagggaagaaggtgagagatgaaagatatcgccctgattgaaacaccaaactacccccagtttctcagaaaaaggactcagagca

SEQ ID NO: 27829 - DNA, 1587 bp, Artificial sequence
  DNA replication origin
acccgcaggtcaccgcgctccccacctgcgttgctgacggtgacatcgtcaggggaggggggcgcgccttcccagaggctcaggtcgcgagggtagccggggtccgggcgcgccgccgcctcgtcgtagcgccagtactgccggccgcggaccaggtaggtcttcccgttctgtggccacgagaacacggcgtccacctcctctcccgggggcagccccagctccgtgagcggccgcgccccgccctccagctgccggtcctggaacacccagaactggggccctgcagggtggaggccgggaggtcaggggtgggctccccgcgccggccccagcgcgccccgccgccggccccactcaccgctaaagaggaggattcggccgtctcggtgccgagcataggcggcctgcaccaccctcacctgggcgggcagcccctcccagaagcggtgcagccgtgcgggtcgcggggacaccagctgtccggagggctggaggcgccagaaccaggggcctgcaggggacaaaggggttcgcaggaaggcatgagacagcaggaggtctcctcccccagggtgtgtggctgggtggggaggggtcccatctggaaatcaagggcgcaatggatctagggtgaccagcccatcctggcccgcctgagacttttccctttttagcgctaaaagtgccagggccttgcctggtggctcagacctgtaatgccagcacattgggaggctgacaccggagaatcacctgagccaggagattgagcccagcctgggcaatatagtgagactccatctctacaaaataataaaataaattactagcaaggcgtggtggcatgtgcctgtggtcccagctaccagggaggctgaggtgggaggatcgcttgagcccagtattttgaggctgcagtgagccatgatcacaccactgcactgcggcccaggcaacaaagcaagaccctgtctcaaagaagaaaaaagttccgcttccagggtaagcccacagccccagtgggtcactggaagtgggcaggaaaccaacatatatgaggccaagtgaaatgactcacctttgaagaagaaagtttcccctcggatgttggcgatggcgtcaaaattgccctcacatcgatcagggatggggaaggatgggctggggaggaaaggagaggtgagtagagaggggggtttgttttctccaaggcagggacccccaccatccccatctcagaggacactgaggctgggcagctggtcacccaaggtctccgagttggtgggggactcacctgtgtgtgggcgaggccgggggctggggcggaggagccaggggtttccttgtgggcttgtcatatggggtttggggcgccttccctgtgaggaaagagtcaggcaggtgtgcgtcccctggccctgctgcagaggacactggatggggcaatgatggtttcgcggcaggtccctctccccctaccatagagttgctgcaggccatcgcggtcatcctgagacaggcggtacttgtcagggtcgcccaccggaccctggtagaagggcctcataatggagttggggg

SEQ ID NO: 27830 - DNA, 983 bp, Artificial sequence
  DNA replication origin
ccttcctgcgaacccctttgtcccctgcaggcccctggttctggcgcctccagccctccggacagctggtgtccccgcgacccgcacggctgcaccgcttctgggaggggctgcccgcccaggtgagggtggtgcaggccgcctatgctcggcaccgagacggccgaatcctcctctttagcggtgagtggggccggcggcggggcgcgctggggccggcgcggggagcccacccctgacctcccggcctccaccctgcagggccccagttctgggtgttccaggaccggcagctggagggcggggcgcggccgctcacggagctggggctgcccccgggagaggaggtggacgccgtgttctcgtggccacagaacgggaagacctacctggtccgcggccggcagtactggcgctacgacgaggcggcggcgcgcccggaccccggctaccctcgcgacctgagcctctgggaaggcgcgcccccctcccctgacgatgtcaccgtcagcaacgcaggtggggagcgcggtgacctgcgggttactgggcctgggggtggggagagggatgtggggaatggggacatggaggccaccctgcggggatgggggtccttgggcatcagggagcggcggggcggggagggaccgggactcaagctctgctcctccaggtgacacctacttcttcaagggcgcccactactggcgcttccccaagaacagcatcaagaccgagccggacgccccccagcccatggggcccaactggctggactgccccgccccgagctctggtccccgcgcccccaggccccccaaagcgacccccgtgtccgaaacctgcgattgtcagtgcgagctcaaccaggccgcaggacgttggcctgctcccatcccgctgctcctcttgcccctgctggtggggggtgtagcctcccgctgatggggggagccatccagaccgaacagcgccctcca

SEQ ID NO: 27831 - DNA, 1407 bp, Artificial sequence
  DNA replication origin
tgttggccaggctggtctcaaattcctgacctcaaatgatccgtctgcctgggcctcgcaaaatgctgggattaaggcatgagccaccacgcccgggcccactcttccttcttagattccccatcaaccatggattccttctgcgaagcagggagattcaggtcagtccagttcctgccaccacacttctccccaggtccatcaatgctcagaagaatggaagggctttttgtacattcgtttttattgtcctgagtgggatgaataagtttctaatatacaaatttccccctcctcatacatggaaaagaaactgacagaggcccaaatcgtttcctggcagcccagaattcccaggtaactgaccaaagtctcctgccttctgtcctcatgctgatctgtttgtatgagcaactggggcaacccctcgcatggttgctgggacagccgcccacagcctcagctccaggaagcactagggggtcactgaggctggacagcaacttaggaagtggcccctaagtgactctacccatggggttcaggccatcggtgtggcctgaacatattggtcctggggtggaggaacactgcagagccacagaaatgccacgaaacagccagctactgccccccacaatccccgcgactagttaaaatgcagattcctgaccccaccctgagtgaggattcagggtgagtgtgggatctgcaaacttaaatttcccagtgattctgatgtgggatagtctagaagaatagttccagaggcaatcatttagatcctaaaactgtggggagtggggacagggtgaacgaggtgcccccaggttccacccacccctcactctagagctaaggcctcccaggagggagtgctgaggaggcaatgaccaggcctgagccagggttcggtccctgtctttccaccagcgttgagttgatgggagtcaagctgttctctccagggtgcaagcagggaaggggttcttggggatagaagggttccccattgaatggaaggcagttctgggcccagggaggtgcccaagttgggtggcctggggaggaggaggtgggtggcgggggagcaacggaaaaggttaacagcctggagagcaagggtcgtccctccagccactgattccaccacccaggacgtggcgcatgggtcctcaggggtgatatctgggctggttccgggtctgggtcccaggtccccaccagtgtggcagtgactgtaggggggccttgtgggagcagaacggggtgagaaactgcgggtgggagaggggcaaggcacagcttcgcagtcaggcctgtcctctaacgacccaggaatgccagacgcagtggccaggcggggcggggctgcggagagtcccaggactgcgctccgagaaaagc

SEQ ID NO: 27832 - DNA, 917 bp, Artificial sequence
  DNA replication origin
ccaacatggtgaaacactatctggactaaaaatgcaaaaattagctaggcatggtggcacacgcctgtaatcccagctacttgggaggttgaggcaggagaaccacttgaaccagggagtccaaggttacagtgggccaagattgcgccactgtactccagcctggtgaaggaccaagactccatctcaaacaaacaaacaaaaaaaacaagggacaggttcttgctatgttgctgaggctgcagtgcagtggtgcaatcataggtcactgctatggatggatggacagatgcgtgcacagaggcagggatggatggacagatgcatgcacaaacacgctgagcgcctactagcacaagacaagacatacagggttctgctctccccaggtacacagggttgagatccaatgggaaagcagtgagccagctgagtcaggggtacgaggagacactgagcagagaaataacccgggacatctgaggccagaagccaaaactatggcatcagtagggagactgcagaaggcggcaggtcccggatcaccaagggccttgaaagcatgtggaagactttgatcaatgggggaatcattaaggcattttgcattccggaactatcatcagcttcagcagggggcagggggtaggatagaggcagggaggcaggaagttctcgcagggtccaggcaagagatggtggagtgtggtcctggggaagggggcagtggacggatctgagggaggttcagttaggatgggcaaggattgagatctggctggatcctggtgacaggggagatgaggctggggcccttggaggatggtgtcctggtgctgttaatgcaggtgtgagagtgggaggaggaggagcaggctggcagaaggcaggcatgagtacaggtctgggcgggagtc

SEQ ID NO: 27833 - DNA, 1357 bp, Artificial sequence
  DNA replication origin
tccacttgtaatgaacaacttccttaacctcattgtctcaggttcctcccctgagaaatgcgaggagaacggcgcctgctggtggcgggggcttgccgatgaaatgagccattcacccatgcctctcagcacagggcctgccctgggccgcatactgtgcattgtcagctgctgtcggagctgggctagtggccgccttgagagccagcagtccacgggggttggcgagcttctgggaggaaagggtggaacgtgactgtcaggtacagagctacagagaaccccagcatgaaggagtaggtggcaggggagaaggactcaacagagatggagaaagactaagcccaaaggtgatcaacaacaagagtgaaggaggaagtggtcagctgtggctggggcaaaacaagcccagtaagttacattggcctgtgtttggtcatccagggacaaagtgacctttttagtgccggtaggcccagtgggttggggaagaatttaggcggcagtgggcttaggcatgagaggagcggaggaagagaagattgagttgagaccactggctggagaacttgaccaggaagggagggcagagagcggcgtggagtcgggggagggaataggtccaatgagcgtcttaggatgaaggagttgtgagcactcagcacaggataagctgatacaaagaaagggatggaggatggatagactgacagatgcatgcacagaggcagggttggatagcatgacagatgcatgcacagaggcagggatggatagatggacagaggcatgcacagagagagggatggatagatggacagatgcatgcacagaggcagggatggatggatggacagatgcatgcacagaggcaggaatggagagacagatgagtgcaaacaggtagggatggatggacaggtgcctacacagaggcagggatgaatggatagatggatgcacaggggcagggatggatggatggacagatgcatgcacagaggcagggatgtatggacggatgcatgggcagaggcaaggatgaatggatggatagatgcatgcacagaggcagggatggacagacagatgaatgcacagaggcagggatgtacagaaggatgcatgcacagaggcagggatggacggagggacagatgcaggcacagaggcagggatggatggacagacagatgcatacacagaggcagggatagatggacagatactggcacagaggcagggatggatggacagatgcaggcacagaggcagggacagacagacagatgcatgcacagaggcgtgtatgaatggttggaaggatgcatgcacagaggcagtgatggatgggtgg

SEQ ID NO: 27834 - DNA, 1341 bp, Artificial sequence
  DNA replication origin
atgccattgcactccagcctgggcaacagagcgagactatgtcaccagatgttgcaggagaaattcctcttgtggaccccaggaaaggacatttcaaggaggagggatcagtcaactgagagatggagggtgaggagttgggagaggccacatttgaagcacgggaagccctcctgatgtattgagtgcctactgtgtgccagggaaggtgctgggttattgaggggaataaggggaaggtggcctgggaaggatgtgggaggggcggccctggcagagggagtatcaggaagccaggcctggggaagggaggagccccagatgcagctggacagcatctgtcccggagggggacacaacagttcccaatgactgagggctgacacgccagccctgggctcatgtgcaatgggagacctgcagagggctcaggcagggagggatttcttttctagtaataaaatcacttcagctttggctactgcatggaaatagattgagagaggcaaggccagggacggcagctagaaggcggagactgctgtccaggctgggggtgacagagcccctggggacagagtgaaactctgtctcagaaaaacaaaacaaaacaaaaaagaacttgagcagtggcagagggtagatcccagcatgtggcccggggtaaggagaggcgggaccagggtcgagccatgggcggcccctcagagctggggtctcaggccagagacagtccttccaggataaagggacatcagaggtttctgcaggatgcgaaggaggaaagcctgcggggctctttgaggctctgcagagagaagtccggatccagctgcctccttcctcaggaaggctgggggcagcagggcccagagagcctggtgacatcattccttcccactggtcacctccctcagtcctgcaggagctgctgggacaggggctggaagcaagcagggcccctcagggtgaccagggccaccaaaggtgactgtcggggtcgctgtccagctgtttcccctgctggacactaggctgcgccaaggagtgcgtgctccaaaactcaagagtgcatccaatgctccaaacgggcagaccagggaggggcatactgacccccagcaatgttcctggtccccaagccccccacaccctcgagcacaccccagtgtccctcccagaccgtgggctcagccctaggagagctgctcagggagcctcccctgtgggtgtttgctcctccccaggctgtggcccatttccccttcctccttcctgctcagcccaaaggcaggagtcatggaaccccaggaaaggacggaacagaacaggacagggccc

SEQ ID NO: 27835 - DNA, 931 bp, Artificial sequence
  DNA replication origin
cacagctgtccttccctggccgaggcattgctttctggcctcagctatgtaattaaaacgcccgaagtaaaatggccttctccaaaatggcccctctttatttctttacaagcccaccaaaattcgaactgtcagctttccctctggggcacagggacacagctgcaccttctggagcaggctgactgggagcaggtggggggagagtgtcgccacccagaatgagggagaagggggagatgtcagccttcacagccagctgtggggagagccaaggaatctgaccctggaatgttttctcctctggagtctacccttgatctgtgctgtgcggtaagtactcacttgtcacataagactccttaagttgtctgggcatggtgcccatgctcccagcactttgagaggccgaggcgggtggatcacctgaggtcaggagttcaagaccagcctgaccgacatggtgaaacccctgtctctacaaaaaataccaaaattagccgggcgtggtggtgtctgcctgtagtcccagcatcctgggagactgagacaggagaattccttgaacacgggaggcagaggttgcagtgagcctagatcatgccattgcactccagcctgggcaacagagcgagactatgtcaccagatgttgcaggagaaattcctcttgtggaccccaggaaaggacatttcaaggaggagggatcagtcaactgagagatggagggtgaggagttgggagaggccacatttgaagcacgggaagccctcctgatgtattgagtgcctactgtgtgccagggaaggtgctgggttattgaggggaataaggggaaggtggcctgggaaggatgtgggaggggcggccctggcagagggagtatcaggaagccaggcctggggaagggaggagccccagatgcagctgg

SEQ ID NO: 27836 - DNA, 1197 bp, Artificial sequence
  DNA replication origin
tcacgcagagctcgcagctggtcagccaccaacgggtgcacacgggcgagaagccctacgcctgtccgcagtgcgggaagcgctttgtgcgccgggccagccttgcccgccacctgctgacccacggtggccctcggccccaccactgcacccagtgcgggaagagtttcggccagacccaggatctggcccgccaccagcgcagccacacgggcgagaagccctgccgctgcagcgagtgcggtgagggcttcagccagagcgcccacctggcgcgccaccagcgcatccacacaggggagaagccccacgcctgcgacacctgcggccaccgtttccgcaatagctccaacctggcccgccatcgccgcagccacacgggcgagcggccctacagctgtcagacgtgcggtcgcagcttccggcgcaacgcgcatctgcggcggcacctggctacccatgcggagcccgggcaggagcaggccgagcccccgcaggagtgcgtggagtgcgggaagagcttcagccgcagctgcaatctgctgcgacacctgctggtgcacacgggcgccaggccctactcctgcacgcagtgtggccgcagcttcagccgcaactcccacctgctgcgccacctgcgcacccacgcccgcgagacgctgtactagcttggcccgccttccgccagccgcgccctgcgccacctacccggggtcctccacagcggaggcctgcaggaatgtcccttcccaccacaccccacttccctctccttccactttcacagctgtccttccctggccgaggcattgctttctggcctcagctatgtaattaaaacgcccgaagtaaaatggccttctccaaaatggcccctctttatttctttacaagcccaccaaaattcgaactgtcagctttccctctggggcacagggacacagctgcaccttctggagcaggctgactgggagcaggtggggggagagtgtcgccacccagaatgagggagaagggggagatgtcagccttcacagccagctgtggggagagccaaggaatctgaccctggaatgttttctcctctggagtctacccttgatctgtgctgtgcggtaagtactcacttgtcacataagactccttaagttgtctgggcatggtgcccatgctcccagcactttgagaggccgaggc

SEQ ID NO: 27837 - DNA, 2394 bp, Artificial sequence
  DNA replication origin
ggccgctggtgagagggtggggcagcgggctgagcagcatgcggatgatggggacttgatccccccagtgaggaatctctggaaacttcactttcccccacctgaccattccttcttcacctcctaactcctcccctggctgactctaacctcgtttctgtcccatgtcccctcggagtcaggacacaggttgccaccccgggagtcacttaacttgaatgtgttttgaacaggattttagttgtaatgctggcaagagttgtccccgtgcagacgtcaccttggaggaaaaggggtgtgcttcccaggtccccagccacagccccaagaaggaattgcctgcggaagagccttcagtgctgggcccatcggatgagcctccccgaccccagccaagggctgcccagcctgctgagccgggacagtggaggcttcccccaagttcaaagcagccgctgagcccggggccccagaagacattccaggccctgcaagaaagcagtgaggagcttgtgccctaggaggccaaggactgggtgtcgcggaggggcctggatgtctggggtggggtgagaagtggggcctccccaggtgaccaggacaggagagcgccaaggtgtcttcacagggcccggatgatgcggtgtgtgtccttgcagccatatggcaggcagggctgccttctaacagcacttcctcccctcttccccaatgccgtcaggtccccagggcccctcaccatggccagaggagagttcccgagatcaggagctggcggctgtgctggtgagctgggccgcaccccagggtgtcctcaagccccaggaacttctctaccctgtagttttagcaaatccataccttccctgattcagtcctaggaagcatttcagtccccacaggttcctgaggcatgttcctcactcaccaagggtttctgctcttgatacaggagtgcctgacctttgaggatgtgccagagaataaggcgtggcctgcacaccccctgggtaagcaacccttccctggagaagtgaccactgatgcctctttcttttcttgtcttttttaaagagatggaatctcgctatgttgcccaggctagtctccactcctgggctcaagtgatcctcccacctcagcctcccaaagtactaggattacaggcatgagccaccgtgaccggccaacacctctttctttgcctgaagctccagaccctacctgactttttggcctttttgttttttgaaacaggatgttactcgcccagactgtggcacaatcatggctcactgcagccgggacctcctgggctcaggtaatcctcccacctcagcctcccgagtagctgggactataggtgtgtgccaccacgcccagctaactttttgtagagaggtcaaataaaagggcacccttgtttgacctccaccctctctaccaacctaccaggtttttttgtttgtttgtttgttttcagacagagtctcactgtgttgcctaggctggagtgcagtggaaccatctccgctcactgcaacctccgcctcccgggttcaatcgattctcctgcctcagcctcccgagtagctgggaccacaggcatgcgccactacacccagctaatttttgttttggttttttttttttttttttgtagagacggggcttcaccatgttggccagggtggtcttgaactcactcctgacttcaagtgatccgcccgcctcgggctcccaaagtgctgaaattacaggcgtgaaccactgtgcccggccttttacctaccagctttgcaggatcctgggtttctttccacttccaggccaatcaggttctggtgattgatagtggccctgggaataggcctgaccgtccctgttttgtcttgtttcccaggattcggaagcagaaccccagacaaggaggaatttaaacaagaagagcccaaaggggctgcctggcccactcccatcttagcagagtcccaggcagatagtcctggggtgccgggagagccttgcgcccagtcgctcggacggggcgctgcggctagcggccctggtgaagatgggtcccttcttggcagcagtgaaattttggaggtcaaagtggctgagggcgtccccgagcccaatccggagttgcagttcatctgcgcggactgcggggtgagcttcccgcagctgtctcgcctgaaggcgcaccagctgcgctcgcacccggctgggcgctccttcctgtgcctttgctgcgggaagagcttcggccgcagctccattctcaagctgcacatgcgcactcacacggacgagcggccgcacgcctgccacctgtgcggccaccgcttccgccagagctcgcacctgagcaagcacctgctgacccac

SEQ ID NO: 27838 - DNA, 1634 bp, Artificial sequence
  DNA replication origin
cggggaggctggacccgggcgcccgggcgggggttggcgcctcatggatcgggatcctcgcccgggagggtggactctcccttcattaagacccccaggtcccaggcatggaggaggcctcggcgcttccccgtggaggccttcgaccaggcagcctcagtttccccacgggcgaaagccgactcgagggtggggtgccctcgccccgcctgctcctcacggcgattgcccccgcgccccgggctggacaggtggggcgccgcgaaaaggcccggcaagccggaagttgcaatggggcagccggacgcaaaacgcggggacaccggccggggtccgccaagctagggtgagctgccgatcggggacgcgaacgggagcgcgcaggtgagggcggcggggcggggctggggcgggggcggggccactgaggctgcggccaatcaccggcgcctcccgtgggcggggcggggccgttgcttgggcgacaggctccagcgtctgcgttctgtgaacctagccgctgggctgtgcggacaggttcgcgtggggctcctgggcctcccgcagccgcgtaggtttcgggaaccgggtcgcctccctgcctccggattctcacgcgctggtgtccggtggccctgggaaatcttttcttttaacaatgtgtattccttgggtcctacctatctaacacttctgctggtttctttttcttctcttttagagttcaatatttgctctgctcttttttgttgtttgtttgtttgagacggagtctcacactgtcgccctggctggagtgcggtggcgcgatctcggctcactgcaacctccgcctcccgggttcaagcgattctcctgcctcagcctcccaagtagctaggattgcaggcgcccgccagaacgcccagctaatttttgtatttttagtagagatggagtttcactatgttggccaggctggtctcaaactcctgacctcgtgatccgcccgccgcggcctcccaaagtgctgggattacaggtgtgagccaccgcgccgacctgctctggtctttattattcttatttttctttaccttgctcagttcccttgttttcccctatcgtcgtctccttccttccttcctaaggctggctacatctccctgtctccaacctggcttagccaccttaattagcaccaattattttgttcttacttcagatgggtctttttttccctagtttttgttattccttaagtcttgacttaactgtcaggtcgatctctgagagcagatcatgatttatttattgaaggaggagtcctctccttactcagggtcagtgaagccgccagctacaggagttggcatttattatttaccatgctcgaagctctgctaagcggctttgtgcattatagtcaattctttctttccttccattttttttttttttttttgagacggagtttagctcttgttgttcaggctggagtgcaatgaatggcaccatctcggctcaccacaacctccgtctcctgggttcaagcaattctcctgcctcagcctcccgagtaactgggattacaggcgtgcaccaccatgcccggctaatttttgtatttttagtagagacgcggtttctccatt

SEQ ID NO: 27839 - DNA, 1809 bp, Artificial sequence
  DNA replication origin
gcttggcgcccgtgtgggtgccctggtgggtgaccaagtccgagcggcgggtgaagcgcttggcgcagcggtcgcacacgtagggcttctctccggtgtggatgcgctggtgctgaatcagcgtggagtggtggctgaagctcttccggcaggcggggcaggtgtagggcttctcgcccgtgtggatgatctggtgctggatgaggtgcgagctgcggccgaagcgcttcccgcagtcagtgcaggcgtagggcttctcgcccgtgtgcgtgcgccggtgcgtcaccaggtgcgagtgccagctgaagcccttgccgcactgctcgcaccggtagctcttcctgcccacctcactgtcaggggccaggccctcctcgccactctccggggcgcccttctcctcctcgttgggcttctccgggacgcggtactcctggggctccgtgggactggggtctggcggagctgcatccggggtgcgatctggctcagccggctgcccggagtctttggccggccctgagctccggccgcaggctgcttcctgcgcgcactgcgggacgccccactggactctccctgccctggttctgaagggcttcacattcccaagggctgccacggatgaggtctgcaccctctgccccacctcgacggctcctggaaaaagaaagtcgtttccagctagggacgagcttccctaaggaccccaggagggtggagaaggcagagctaagggtgggggctggattctcagagaccagaaagcgcaagggccgccctgggcgcaaaccgcccaggagggggtctggtggccctgccccactcccacagacaacagccagaaggcctgcgtctgcgccccactcccgcagacaaaggcgcgcgcccgtccctcacctgtgcacgcgcctctccactccttctcatctcctgcctgccggctggagcccgaggcctcacccttgccgtgcgcttgaggggcccagaaaggcctgctgaagggaaagcctgcccagaaagagatgctgtgctgtcacaggccttctggcgctgcccagctgcagacagcatctccccaaaactgatgggcccaagtagggggtgaggctctggaaacagggggtaaaataaagcagtttcaagaaggccccctgggtcgggggtccgccccctgcctggcggctgccagagctgactaggcctgtctcctctttccctgaaagagcaacggagtttaagggacgggagtgggcaacaccctacatcaacgcccacgggacgggtatcccgctcctacacccacacctggaggggcaagggtagtggccctccaagtgggaggacctgggacaggagggccaggatctccaacgactaaggtcatcccatttgtcaagtcttgggggggtgtggccccaggaattttggtcaagtcagtaagagagcagagggggccctggcttccaccacccgtgggaggaaaggaatgtgttggaccaaccgggtggcttgaggcatctgcgaggcctgccgtggtgctgaaaatgggtgttgagatccttctgatccctcaggacttgcctgggcttgctggcccaggcactggggaaccataagagcggtgagcagcctgagctaattgaggggtgaccatccctggtgccagccagcggggccttgggaccaccatgatgccaccacctggaatgctgagtcctggattctgcctggactagcaagtgtgctagctgggtgttggccaggcgcagtggctcatgcctccagcactttgggaggccgaggtgg

SEQ ID NO: 27840 - DNA, 1219 bp, Artificial sequence
  DNA replication origin
tttggaatgggcctttggcaaaagggaccccaaccctggtggagacccaagccaagagtggtgatgcggggatgcctcaatgaggacaggggattagcccaggagctcccccacgctcggggaatcagcgccagggcaccaggagacaaagctgtgtaggcgggcgcttcaagtccaaggcctttaattcgcagagtgcctgccctttctcgccctcgccctcccccatcgccatgcctcaccccatgccctcaccgccccagctcccttcccgagcccctctctcctccctcggagccttgactccagtggggctgttccagtggccctgggcgccccgctccccctttcctggcctcctaggtgggagcgggtgggggtgtggccagagcccccgccgccgccgcccccagcatcagcatggccagggccttgggcccggtggtgtggatcttctcgtgccggtgcaggttggagcgccggctgaagctcttgccgcacaacgggcaggcgtagggccgcacgccacggtgggtgcgctggtgcgcggtgaggtgcgagctgtggctgaagctcttgccgcagtcgaggcagtggtagggcttctcgcctgtgtgtgtgcggttgtgcgcgatgaggttggaacgctggctgaagcacttgccgcactcggggcacggatagggcttgaccccagtgtgggtgcgctggtgggtgactagcgccgagctctgcgtgaagcacttggcgcagatggggcacttgtgcggcttggcgcccgtgtgggtgccctggtgggtgaccaagtccgagcggcgggtgaagcgcttggcgcagcggtcgcacacgtagggcttctctccggtgtggatgcgctggtgctgaatcagcgtggagtggtggctgaagctcttccggcaggcggggcaggtgtagggcttctcgcccgtgtggatgatctggtgctggatgaggtgcgagctgcggccgaagcgcttcccgcagtcagtgcaggcgtagggcttctcgcccgtgtgcgtgcgccggtgcgtcaccaggtgcgagtgccagctgaagcccttgccgcactgctcgcaccggtagctcttcctgcccacctcactgtcaggggccaggccctcctcgccactctccggggcgcccttctcctcctcgttgggcttctccgggacgcggtactcctggggctccgtgggac

SEQ ID NO: 27841 - DNA, 1406 bp, Artificial sequence
  DNA replication origin
cgccaagcgcttcacccgccgctcggacttggtcacccaccagggcacccacacgggcgccaagccgcacaagtgccccatctgcgccaagtgcttcacgcagagctcggcgctagtcacccaccagcgcacccacactggggtcaagccctatccgtgccccgagtgcggcaagtgcttcagccagcgttccaacctcatcgcgcacaaccgcacacacacaggcgagaagccctaccactgcctcgactgcggcaagagcttcagccacagctcgcacctcaccgcgcaccagcgcacccaccgtggcgtgcggccctacgcctgcccgttgtgcggcaagagcttcagccggcgctccaacctgcaccggcacgagaagatccacaccaccgggcccaaggccctggccatgctgatgctgggggcggcggcggcgggggctctggccacacccccacccgctcccacctaggaggccaggaaagggggagcggggcgcccagggccactggaacagccccactggagtcaaggctccgagggaggagagaggggctcgggaagggagctggggcggtgagggcatggggtgaggcatggcgatgggggagggcgagggcgagaaagggcaggcactctgcgaattaaaggccttggacttgaagcgcccgcctacacagctttgtctcctggtgccctggcgctgattccccgagcgtgggggagctcctgggctaatcccctgtcctcattgaggcatccccgcatcaccactcttggcttgggtctccaccagggttggggtcccttttgccaaaggcccattccaaagcgttgcacacattggcaagcaaaggcttcaagtacagagaggtttccagggctgaagccagtcagccgctcctggacctggggaccccttgccggccgtctgctgctgacgccacttgtcccaagggcactgcttactgagcccgcactctcccttggctcttctctttggaagccaggagcaggcagaactggtccggaaattcctgcctgccccatctcccactcaggcatcggtggctgggttttgtgactggcctttgccatttgctcccaccatggcctgcctgtggtcctgcgagggctcctcactcaccaggggccactttccttcttggcccatgctgcagctgctgtcacctgcctctgctatgtctcacctccttggcctcctggtatatgtcctatataattcgccctgctcgcccctgcctggctctgagctttgatttactcctggtctttccgctggcgtttgtttttgtttttgcgacagagtcttgctctgtcgcccaggctggagtgcagtggcctgatctccactcacggcagcctccacctcctgggttcaa

SEQ ID NO: 27842 - DNA, 936 bp, Artificial sequence
  DNA replication origin
gcaattctgctacggggatgtgcatgggcctcatgaggccttcagccagctctgggagctctgctgccgctggctgcggcccgagctgcgtaccaaggagcagatcctggagctgctggtgctggagcagttcctgacagtgctgccaggggagatccagggctgggtgcgtgagcagcacccgggaagcggtgaggaggctgtcgccttggtggaggacctacagaagcagccagtgaaagcctggcgacaggtgaggggcccttccacatccaggggcacctggatggtatctgagctcgagagaagtgggtaacctgcagagataagtctcccagaggctcacagggtaggggagacacagagcccccaggagcaggcacacaagcacagtgtgccatgggtgcctttctgaaagatgcgatccaaagtaaatgtgatttattttttgtggctttggaaggcagcaatagggctgaagtgcgaatgttccagacaggaggttttagctccatgcagggtctgctgatgtttatttgcattttgctctaggcctggctctggggacacaagggtgtgcatagagccagctccagagtggggcgagaaggtggagctgtccggggcctctgctaccttgtgggatgttgggtccttcacattggatgcatctggggaggttctaatgagtggctgggggatggggttctgcctttggcaggagggtccccagctacccccttgctaagtggctgtgattctggcctttcagggctggttcttgcctcgtgaatgatcggggagcatccttgggcacacagcattacctggtatcacattctcctccggacttttcctggggcaccatattggtctccttcccacaccccagcatcctgagggtcatgtcctgtgtctccttcccagggagtaaac

SEQ ID NO: 27843 - DNA, 1255 bp, Artificial sequence
  DNA replication origin
ctgcttgaagctcttgtcgcactctccgcagccgaagggccgctcaccggtgtgcacacgccgatggtccagcaggtaggagcgcagcgagaagctcttgccgcagtcgctgcagccgaaaggcttctcgcccgtgtgtatgcgctggtggtcggccaggtaggcgctgcggctgaagctcttgccgcactcggaacaggagaagggcttctcgcccgtgtgcacgccttggtggcgcaccaggtccgaggagctgcggaagctcttgtcgcactcagggcacttgtgtggcttctcgcccgtgtgcgtgcgctggtgccgcgccaggtccgagccccagcggaagcgctttccacactgcccgcagctgtgcggcttctcggctgccaggtcccggaactggcgccggcgagtgggtggccgcccccgtcgcgcgcccaccactgggcccagggccgccctcggccggttctcgctctcccaggcctcagcctcctcggggctccaggacacagtcacgtcgctgcctgtctggcctggcaccaccggcaccatctcctgcagcagggacttctcactttggcctttgagcccaaaacctgcaaggggaaggaggcgacctcttcagtcccacgcggttctggggccagagctgaggtgaggaagaaacaaggctggggaaagctccctggcctccaggttcagaaagccctgggttcacacagctgaattctcaggttcctcatctataaaacagggatgattggccaggcgcagtgactcaagcctgtaatcccaacattttgggaggctgaggcgagctgatcacctgaggttaggagttcgagaccagcctggccaacatggtgaaaccccgtctctattaaaaaatgcaaaaatcagcagggcatggtggcgcacatctgtaatcccagctactcaggaggctgaggtagaagaatcacttgaacccatgaagcggaggttgcagtaagccgggatcatgccattgcactccaagagcgagactttgtctcaaaaacaaacaaaaacccaaataaatcagggatgatgaaaaaattcggcagagcagcagtctgaataagcctctgatcccgcctgcatgggccagccccctaagccatctgtgccctgcaggccacactgggatccaatgtcccactctgaaccccagatatcaagctccacagcagaacagatttatagtaattctgaaacttttcaagggccgggc

SEQ ID NO: 27844 - DNA, 1185 bp, Artificial sequence
  DNA replication origin
acgttagtgacaatggagtgggacaccagtgccgatggagcagggcgttagtgctgatggagtggggcaccaatgtcaaaggagcgggtcattagtgccgctggagttggggcgttagtgccaatggagtggagcattagtgctgatggagtggggcgccgagtggggcattagtgccgatggagcggggccgatggagtggggcgccgagtggagcattagtgccgatggagcagggcgccagtgccgatggagcagggtgccggggccgatggagtgaggtgctagtgctgatggagtgaggtgctagtgctgatggagtgctagtgctgagtctggtgcagccccacctctggaggaaaagatggcagccaggcgccctgttcttggtctccagggttggcctcctgtcgctggagccaccattatcctcaccagattggtgggcaggtggctctcagagcctcatgctagggcaagtaggccgagggcaaaggcaggccgagtccgtatggccaggacagggcagagtggtcatggcctggaaacgggagtgggagggggccagaaagcccctgccgccgtgactaagacccgcggtcccacaggtgtgggctgtctctcccaaagtccagcagccccctggggggccaaggccagtcctccacgcccactgaaaggcacaggttggtagggcagaggcctgacccatggacccaccccacagggtgggggccaaagagccacacagtcaaatgaggctcgggggcttctgggaagggacctagacctgagtccttgccaccctgctgtccctgccaggaatgtgttggggctccaggaaactagaggggaagaggaacgctaggcgcagaagggggaaagaggacaagatcgggggcgggaggggaaggcttccgttccctttgagcgctgggcaggtcctcagagccaagcagggcaggcgagctccgagtgtgaggtaccctggggtccctcggacagcccgggaggtggccacagatggaaggagagtcccagtggtgaacaaagcaggatgtgccgtggctgggcctcccccgggtttccggccaagccagctgctcaccccacgggctgggccatcttggcgtgcaggctctgatgcgcgatgaggtgcgcgcgctgcttgaagctcttgtcgca

SEQ ID NO: 27845 - DNA, 1405 bp, Artificial sequence
  DNA replication origin
cggcccccgcctcccctcagccaggggccctgaggccactagcaggtgaaagagaaggaaccagcatgggtggaaggaggggtcgtgcctggatgatcactagttttgaccacgcacccaccagcccttggtgggtcccggcctggggctcctggtagggagaagttggatgtcaggggctggtgggaagggcaagcccgctgtcagcccctcctccaagggactcagcctggggcagccttgagttccagatccccaacacgcagcaagagggtcccaccactgaccaagcagcgtctatgggcccttcttcctttcacagttgtgggagaggagtggcctggtgaagaccctgagtcctgctcagctccccgttctgctggagcaccgacggtgctcccagagcagggcaggcactagctgacacagggggacaagagtcccaggggacacggctgcccattggggcccagccgacctggacgccaaggacgcagctccgcctggtcacggtgcagcagcatgtgccaccaggacacaaggccagggcaaggggcatatattccaggtatccccaccctccagctaccgaaagaacagaacagcctggaggtaagttttcacgtttattaatactcttctgttgccctttggaggtctgagggggagtccttgcagggcctctggtctgtccctgttcatggaaggcagtgctcaggaggcagcagcaaagtgccaatgaagcagggcgttagtgccgatggagcagggagccagtaccggtggagctgggcgttggtgccaatggagcgaggcactggtgccggtggagcggggcgttagtgccgatggaatggggcaccagtgccgttggagctggacgtagtgatgatggagcagggtggtagtgccgacggagctggacatagtgatgatggagcggggtggtagtgccgatggagccggacgttagtgacaatggagtgggacaccagtgccgatggagcagggcgttagtgctgatggagtggggcaccaatgtcaaaggagcgggtcattagtgccgctggagttggggcgttagtgccaatggagtggagcattagtgctgatggagtggggcgccgagtggggcattagtgccgatggagcggggccgatggagtggggcgccgagtggagcattagtgccgatggagcagggcgccagtgccgatggagcagggtgccggggccgatggagtgaggtgctagtgctgatggagtgaggtgctagtgctgatggagtgctagtgctgagtctggtgcagccccacctctggaggaaaagatggcagccaggcgccctgttcttggtctccagggttggcctcctgtcgctggagccaccattatcctcaccaga

SEQ ID NO: 27846 - DNA, 1063 bp, Artificial sequence
  DNA replication origin
tgctgcaccgtgaccaggcggagctgcgtccttggcgtccaggtcggctgggccccaatgggcagccgtgtcccctgggactcttgtccccctgtgtcagctagtgcctgccctgctctgggagcaccgtcggtgctccagcagaacggggagctgagcaggactcagggtcttcaccaggccactcctctcccacaactgtgaaaggaagaagggcccatagacgctgcttggtcagtggtgggaccctcttgctgcgtgttggggatctggaactcaaggctgccccaggctgagtcccttggaggaggggctgacagcgggcttgcccttcccaccagcccctgacatccaacttctccctaccaggagccccaggccgggacccaccaagggctggtgggtgcgtggtcaaaactagtgatcatccaggcacgacccctccttccacccatgctggttccttctctttcacctgctagtggcctcagggcccctggctgaggggaggcgggggccggtggacaagacgctctggtcccttggtaacaggtgtgcatgtgccagccctctctgcccctaggcctttcttagccaaccttccatgcacacatcatcctgcggtcactgtcatggtctccgtttcccgtaagaagcaagcaaggtctcgctgtggacaaggctgattccagttggtgatttttacctctgggggcctggtgctgtgtgcatgcgtgtggcgggtggccgggatggtacaaggacttcttggtggcggtggctggctccaaatggagacactcgggtgtaacgagatcagataagcacgtaggccaggagctaagaataggattgagcacaggttcctggctcgggtaggggcatgtcagtgccagcaaagaagtcaccagcaggagccagagaatgaagcccaggctgggagagcggggccaggacccagggttccagggatggggcagagtccagctcagctcataagcagagctgatagtactcgttagggtagagggcaagggttaggacccagggcactgagagccca

SEQ ID NO: 27847 - DNA, 1032 bp, Artificial sequence
  DNA replication origin
gggatggggccgagaaaagactcagccaggcttgtggcttctatagtctcttcagggtcacctgccagaatgcagacaggaggaggccagcaaaggacagacaggcaggatggcctcaagcagggcccaggctccagttcaggctcaaggttatggacttccctgggcatggatggcctcgagtggacagtggccacaccattaacccctgccccgggatcagtgcgcagagaggtggggatgttccctagagcggggctgggcctgtcgggaagactcacggggtgggcactaccctgctgggcgatctgtggaggagagctggggccccctcatccccagggctgcccaggggccacccaactacacagtgagaccttcagccttggagaccagacttgaagcattcccagtcccagcctccagggtcctgcgatctaacagggcggacagccactgcttggtgtagaaaggggcagcctgaagtgcaagcgtggatgcaaggaagggcatcgctggcagcctgcagaggactgtgcagggctcccgggacaacaggaaggcatagcaggcagagggaactgcttgggccaaggcatggagctgggaggagtcgagtgtcggggatcctgagtgggttgtcaggggtcccgagttgagggtgaggggctgagaccacttctgtagaaaataaaggaggtttgtagaatgaatcggagggaggatacaagtgaatgaatctaactgtaactggcttaggggggcacagcagaaccagcggagacagcaggaccagccccgcttccctgggcctccccctccagcgtccccaccttcgtcagcagctgcaccagggaccagtgaggagagcggccacacagctctctcaggccagcaaggaaggctccgggctccagggaggctgggtagagaagcagcatgttggcctgcagtgaggcccgaggctctgcccctgggtccctgcccagctcctggatcctgacccagctcactcacacccaggaccacttg

SEQ ID NO: 27848 - DNA, 1387 bp, Artificial sequence
  DNA replication origin
aaagcgggctcgtccgggatttgaacccgggacctctcgcacccaaagcgagaatcatacccctagaccaacgagccaggacgacaaacgttctctgacgtctgtacttggaggtccacacccgcggttccactctccccgtccacgcgcacccccccagaccccgccttcactccacccctacccctccccgcccgggtcccggccacaccccaacctcaagcccatctgggagggttgcgcaggtggaggtttcggtttcgatcacaggaagctggtaggaggtgcagcgcctcggggaccagccccgggaagagctcctgtacgacccccgccctcaggcgcacagaggcggaccccgcaccctgggcaccgcggcgccgcctccccgagggccactcggctcccagcggctccaggcggccccagcaccgagaggagggccggtgaccaggggctgcggcccgcggggaggtggtctgtgtggcccgcgtgaggcagcggtctcgcgtgctgagccccagcccagaaatttcacccgatgtgaaacccgagtgcaggaccctgaggaggagaccccgccgcctcccagcaggccagcccgggcatcctaggaagggatcccgtctcccacacagaccccgggctcctgtcctcagccgagctccttcttggcctgagctctgcccaggcgaccctcgcagccctgggacctccgatacacgggccggagctggggtcagagttcatttcttcccaaacgggcggctccagaaacgctccaaacttttcttccgttttccactggcaagggacccagcattttactgggagcctaaggaggagaaaggtctaccgggcttgtccctgtggtgaggcctcgctgccggccctaaacagggatgagggtttgaaaaccctcacacagccctaagagagagtcacgccgagtttccccctggccatctccagtgtccttcgtcccttcagctcttgtccccgacgttcccgctcccgggagctgcaggtgccgcacacacccatgagggacggcagacaggggacacacaccgcaagggacggcagacaggaaacacacaccctcgagggacagcagagaggacacacacccgcgagggacggcggacaggacacacacccgcgagggacggcagacaggacacacccccacgagggtcggcagacaggacacacccccacaagggaccgcagacgggacacacgcccgcgagggacggcagacgggacacacgcccacgagggtcggcagacaggatacacccccacgagggtcggcggatatgacacacacccgcgaaggacggcagaccgcacgggcctggcggcgtcctcggtccgcgccgag

SEQ ID NO: 27849 - DNA, 1221 bp, Artificial sequence
  DNA replication origin
tagacctttctcctccttaggctcccagtaaaatgctgggtcccttgccagtggaaaacggaagaaaagtttggagcgtttctggagccgcccgtttgggaagaaatgaactctgaccccagctccggcccgtgtatcggaggtcccagggctgcgagggtcgcctgggcagagctcaggccaagaaggagctcggctgaggacaggagcccggggtctgtgtgggagacgggatcccttcctaggatgcccgggctggcctgctgggaggcggcggggtctcctcctcagggtcctgcactcgggtttcacatcgggtgaaatttctgggctggggctcagcacgcgagaccgctgcctcacgcgggccacacagaccacctccccgcgggccgcagcccctggtcaccggccctcctctcggtgctggggccgcctggagccgctgggagccgagtggccctcggggaggcggcgccgcggtgcccagggtgcggggtccgcctctgtgcgcctgagggcgggggtcgtacaggagctcttcccggggctggtccccgaggcgctgcacctcctaccagcttcctgtgatcgaaaccgaaacctccacctgcgcaaccctcccagatgggcttgaggttggggtgtggccgggacccgggcggggaggggtaggggtggagtgaaggcggggtctgggggggtgcgcgtggacggggagagtggaaccgcgggtgtggacctccaagtacagacgtcagagaacgtttgtcgtcctggctcgttggtctaggggtatgattctcgctttgggtgcgagaggtcccgggttcaaatcccggacgagcccgcttttttttttttttctgaacaccatcattttctcgcggtgaagattgaggagcttcacggagtctcggccgcagggaacttggtctctccgtggcagctgcaggcgccggggccgatccgacttcccgcttccgtccggcttgcggcccctcgccttgcccggctacaggaaggactcgcctgcgcctcctgactggagccttccacctgggagttctgagtgcgcctaaggcctggcgctgaggcagtggaccccagatccgggacccgaaaggagggcaaacacctccaccgccgcgtctgcctctgcggacgtggccctagatcccgggtggccatggaacttggtctgggcgtgtagttttcctt

SEQ ID NO: 27850 - DNA, 1029 bp, Artificial sequence
  DNA replication origin
cttcagtgtcgggactacactgtagaacacagttgctccgcagtaagcgttgccctcaggcctgccccaaaggcgaggcgcagcaggaggcccccgaggtagctggatctgggtctttctctgcgtcagaggcccacccgcggacgccccacaggccggcacctcctgagtgtcagggtgactggccctggcacccgccccgactcagggctgtggaagcgggtctgacccgtggattcctcgttcacacgaaatacctttgctgagccccgacttcgagcccagccagatcccatggaggcagcagaccctgggcatccagccccgttggagggtgtggcacagagccgcagctgccaaactggagcaagaaattgttgtgactcctgcccaaaggatgggggtgggggtggggaagagggagggactgcaggaactgcgaggcaccccggaaagaaaaccgtgtccccaccagggggaggtgggctggggtgggctgggttgcagggggccgggagaaggtgggaggcggccggcagtgacggcgggaagcagacaggaaacctccgtgacccagcggcctcctgcgctgggttccttgcctcgcgtcccacctgggcaggtgacggtttcccgttcctttctaggacccttagcctttgccgctgctgttcggctgaagaagaattccctagccaggttcggtggctcacgcctgtgatcccagtactttggaaggccgagggggtaggatcgcttgagcccaggggttggggaccagcctgggcaatatagcgagacacccgtctctacaaaaaataaaaatttaaacattagacgggcgtggtggcgcgcgcctggagtcccagttactcgggaagctgaggctgcagtgagctatgattgcaccatcgcactccagcttcggcaacagggcaagaccctgtctcagaaaaaataaaaattaaaaaaaaaaaaaagaatccccccctgagccctcagcacttgcatctccccaggttcgagtct

SEQ ID NO: 27851 - DNA, 1357 bp, Artificial sequence
  DNA replication origin
aagcttaaatgggctggggagagagggagagggagagggagagggagaaggagagggagagggagaaggagagggagagggagaaggagagggagagggagaaggagaaagagagggagaaggagggagagggagaaggagagggagagggagaaggagagggagaaggagagggagagggagaaggagagggagaaggagagggagagggagaaggagagggagagggagaaggagagggagagggagaaggagaaagagagggagaaggagggagagggagaaggagagggagagggagaaggagagggagaaggagagggagagggagaaggagagggagaaggagagggagagggagaaggagagggagaaggagagggagagggagaaggagagggagagggagaaggagagggagagggagaaggagagggagagggagaaggagagggagaaggagagggagagggagaaggagggagagagagggagagagagggagagagagagacagagagagagattataaggaattggctcacgcagatggaggctaacaggtccccaagtatgcagggtgagttggcaaactggagacccagcagagctgatggtgtggttctaatccggaggctagcaggcaggaggcccaggaagagcgggtgttttcatgggattctgaaggcacaaaatagctggtgtgccatctggctgaggcaagtaggctgacatgtttcccctgttggtggtggggatgacacatgcagagagaggacaggcttaaccccttaagcaggggaaatgcctgatgaacatgggtgttttaggggaatcaacacagttctgtacagatatgcaagcggggacagggaacaggtagctctcctgggcctggtctatgttggacctgatggtggcagctggcaggagatgaaacaaaacaacagtgagactttgtacttcaggtgaaagggtagtggcgaggtcctgcctggtagaaaccatgaggtcttctgaccctttttgtttacccttaagaaatcacagcggtggacgcggtggctcacgcctggaatcccagcattttgagaggcgaggcaggaggatcacttaagcccaagcgttcaagatcagcttgagcaatatggcaaaaccccggctctacaaaaaatacaaaaattagctgggcttggaggctgtgatgggaggatcgcttgagcccaggagcttgaggctgcagtgagctgtgttcactcctcggcactccagcttaggtgacagagcaagatcttgtcacaaaaaacgaaaacaaaaacaaaatcaaaacccattaaagaaggtgaggatggtggct

SEQ ID NO: 27852 - DNA, 1942 bp, Artificial sequence
  DNA replication origin
aactacatttcccagcaggccctggggttagactggccgcagctggagaggtgccagcccgtcgtggatgactagagccaaccacctgccttccgtcttccaggcagaaccacagagaggctacagccgtcctggcctccctccggccctgagagctcctctggcctgtctcaagtcttaacgtctcaagcgcagactgccggctccgaacggggagaccaggcttctgcaccggaaacaaggcaccggttgtgacgtcacagccgcagagcgcccgacttcccagaaggcaccgagtccctgccgttctcctcaactggcggcggcgcgaacgaatagtcgccggcgacctgtgagggcactcggaagggcgaggggagggctcgaccgctcgcgcctagtttttctatctctcccggagcctgagtctctgagccgtccccagcaaacgctcaggggctgcagaggccccgagaggtgaggggctccgtgagggcgggaaccaggctgaggccgcctctggggagcggagcgtgtccgttgctgagggagcaaggccgggtagggagcctggtgagcgcctcaggcaggggcgcacgctgagctttacggtaaaggtgttccttgaccagcggaagaggccccagagtgagcctggcccggcggtccttagtgggatgtcgcctgccgctctcagcagagctttgacggcggagaggagtcggcaggcggtgtgtggacacctcctcggccttgcatctgctccccgggagagtcaccaaccgcctccccgcccaaagggcaccggagggagcttcggttcgaggggtacagtatggccagattcagtgaccaacctgcttttaggcagatgtcctcggtattgaccccagatttcctgtcttctagcccattgctctttctccaagcctgatttaacctattcctggtgggttttacacaccgtctttctttctgtcttttctttctttttccttttattttctttctcttccctgattcccttcctccttctttcctttctcttttcctttctttttttagagtcagggtcttgctttgtcgctcagactgcagtgcagtggcgcgatcacagttcactgcagcctcgacctcctgggcacaagcaatcctcccagctccccagtagctgggaccacaggcttgtgtcgccacgcccagctaattttttttttttttatggagtcggtgtcttgctgtgttgcccaggctggtcttgaactcctggactcaagcgatccacccgccagggccttccaaagtgctgggattacaggtgtgagccaccggtacctggccacactttgtatttctcaggaggctggaccttggccttctccgctccacccttactcccttccctttggacttgaggtttgcacagtctctgtttttcattctcaggatcttcctttcacatcttcctaagcatatcttgttcaaatactgcgtttcagttatgatttccctatcccagctgtcgttttctttagatctcatgtagcctcaccagccatgccacatattggagtgcagtaatgccgtgcctggtcttttgggtaatccctggtttctctgtctacagcttggctctctggcagatttcctctagtaagaggtggctctggaggccccgcgaaacgagtgtggtgtgtggttgcaaggcatgatggctgcaaaagtggttcctatgcccccaaagccaaagcagtcctttatactgagagttccgccagactccaagctgggccaagacctacttcgagatgccactaacgggcccaagaccatccaccagctagtgctggagcacttcctcaccttcttgcccaagccaagcctggtccagcccagtcagaaagtcaaggagaccttggttattatgaaagatgtgagctca

SEQ ID NO: 27853 - DNA, 1785 bp, Artificial sequence
  DNA replication origin
tgagccaccgcgcccggcccgttgttttcctcaatttctaaactttaatatccaaggggattctctctcctctgccctgaatcttgggccctaaacgtgggacagcttcatcattttgcatctggttgtccttccagaatattccacacaagaaaacggcacagatgattccgcagcgtccagctccctgggggagaacaagcccaggagcctgaagactccagaccaccccgaggggaacgaggggaacggccctcggccgtacgggggcggagctgccagcctgcggtgcagccagcccgaggccgggagggggctgtcgaggaagcccctgagcaaacgcagagagaaggcctcggagggcctggacgcgcagggcaagcctcggacccggagcccggccctgccgggcgggagaagccccggcccctgcagggcgctagaggggggccaggccgaggtccggctgcgcagaaacgccagctccgcggggaggctgcaggggctggcggggggcgccccggggcagaaggagtgcaggcccttcgaagtgtacctgccctcgggaaagatgcgacctagaagccttgaggtcaccatttctacaggggagaaggcgcccgcaaatccagaaattctcctgactctagaggaaaagacagctgcgaatctggactcggcaacagaaccccgggcaaggcccactccggatggaggggcatctgcggacctgaaggaaggccctggaaatccagaacattcggtcaccggtaaattgtgttctttcctactttatatcggctgcagagaaagaatggctggccgggcacgatagctcatgcctgtaatcccagcgctttgggaggccagggcgggaggattgctggaggccaagactttgagaccagcctggtgaatgtagtgagacccccgccatctctataaacgaaattaaaaaaataaaaacccaaaggttgggcagggcgtggtagctctcgcctgtaatcccagagctttgagaggcctgcacgggaggatctcttgaccccaggagttccatactagcctaggcaacacagtgagaccccatctctacaaaatacaatagtggcacgcgcctgtagtcccagctgctcgggttcacttgagcagacggagttccaggctacagtgagctgagatcatgccactgcacaccagcctgagcaacgtagccagactccacttctacaaaactaaaaaaaaaattagctgggtatggtggcacacgcctgtaattctagccactcaggaagctgaggcaggaggattgcttgagccagggagttccaggctgcagtgagctgaggatgtgccactgcactccggcctgggcaacagagcaagaccctgtctcttaaacattttggggggaaaaaaaaagaaagaaagaatgtccgattgaaaaaggcaatcaggtgttatcagtggccaaagaatggagaaggggagctcacctctgcaggcgtctgcttgccagggatgggaggcagggcgattttagagtccagggaggggaagggagataggtaagcaggcccagggcagggttccatatgtgcaggcgctgtccccagcatgcttcttcctacatcgcatggacacaaaaccctggccatcttcttttaggggagggacctttagccttataacaatgtgtaaatgatcttaaggtaactggaagtcacctcttccagtttgcactggttttgctctgatcttaacttcctctggtttttggcaagg

SEQ ID NO: 27854 - DNA, 980 bp, Artificial sequence
  DNA replication origin
cccaatagggaatcggccctgcggccctcctgccactcgcccccaactatcacagtccacggcggagctggaggcagatcccgcccttgcagggctgggtaagagactgaaacttggagaatgaactgcaggcgctgcacatctcgggcagatttaaaattcggtctaaaatcggaagcaggtgccgcgaacccagacccgagcgctcctctgggacgtccagccgcagaagcgagcccaaagcccagcagggttctccgcgggactcggggtttcagaaccgccgggctcttgggcgctcgcccagggcgcacgcgcagtcgcgaggccgcgccgcggactgcatctcccagcaggccccgcgcagcaggccacgcggcgccactgactgggcgggcggctagctccctggcctccccgacatgccgaggagcccctggcttccggagccgacgaggccgcaggggccaatgggaccatcttcagccagcccagagtagccgaagcgggtggggcctggcttgggaaaggattcatccggggaagctgattaacaattcagatttccgggtctcaccccgacactgacgcactggagagcgcgtggccctgggatctgcgttttcccaagcgctccggagtaattctaacccaggttgcccgccagtcacaacgacctcaggcttgttttcttcgcttggatccagctgccctgcccccagtcactcccagaatttcagggcgcgccccgtggccccgcctctcgtctccaattggtccctcgctcatccagtccccgtaggccaatcttcccttctcattggtaggcggtgagtgtgtggagaaacctgacctaatgggcgctggagttcgcaaaacgtgacccggaaattggtcacgagcaggcgccgtgggcttgtggacgcctaacttgcgcgctgagatttccggcgtgggagcagaggtctgagtcttgcgtg

SEQ ID NO: 27855 - DNA, 1654 bp, Artificial sequence
  DNA replication origin
cagaatttcagggcgcgccccgtggccccgcctctcgtctccaattggtccctcgctcatccagtccccgtaggccaatcttcccttctcattggtaggcggtgagtgtgtggagaaacctgacctaatgggcgctggagttcgcaaaacgtgacccggaaattggtcacgagcaggcgccgtgggcttgtggacgcctaacttgcgcgctgagatttccggcgtgggagcagaggtctgagtcttgcgtgggtcctctatatagggtgagaagcgtggcgctcggttcctgcctcggggaagtcctggcgcagatgggccacggggccggcgtggcggcgcctgggaccgactgaggcctaggcgccggagccggccgcgcctgggctggagcggggctcctcggcctggactgggagcccccggccccgggctcctgctggcgccgtccaaccttacatgggttcagggcgccttcgtaggcgggcacggctggtttcgggctaaggcgctctggagacctgacgatggcgtcgggcccgggctcccaggaacgggaagggctcctgatagtgaagctggaggaggactgcgcctggagccaggagctgcccccacctgacccaggaccgagccccgaggcctcccacttgcgcttcagacggttccgcttccaagaggcagctggtccccgggaagccctcagccggctccaagagctttgccatgggtggcttcggcctgagatgcgcacgaaggagcagatcttggagctgctggtgttagagcagttcctgaccatcctgccccaggagatccagagcagggtgcaggagctgcatccggagagcggcgaagaagcggtgacccttgtggaggatatgcagagagagcttgggagactgagacaacaggtgagagagagagagagctgttttatctgtggtttgtttagccctgagcactgggacattgcgcccccggtcgaattcaagtaaattgccctgagtagaccttacgtggggaagaggacttgtgatttaacctggaacactcatcctccagattttcccccaaatgaacgaaagcagtgaagagtgccctgtttccacgcggaggcggtgtccctgcaacagttagtgttagccatggagttagatcgccagcgttcaaatcctcaatctgctagtactagctttgttactttggcaagttacttgatctctttcggcctgttttcctattcgtaaaatgaggatattaacatactttctagggcttagagggagagcagcatgtaaagttgtgaacactactagcttatgagtgcttagtacttgttacctgttgttatgttagggtccacggtctggtcttctctgcaaagctgggcctccgttaattgtgaactttgaaagataatttggcaccgaggccctgaggtcattggtccccagggctaccccaatttagcctatcctatagtgaggaatagaagcacctagaaaaggtggggagagcaaaagggagtgaggtgtatcttaagagctgtgtggggaaggtgtgctctgggagtgggccctttccctaacccctccccctgcacatgggatcaaaaaagcctttagtgtaaaccatttttctgttacctggg

SEQ ID NO: 27856 - DNA, 928 bp, Artificial sequence
  DNA replication origin
ccacgagcctcctccaaccgccgccccgggcctcggggctgccgctcccctcagcgtcggctctgcccccagaagcgaaggccgccctgcgcccggtcccggcctttccctgccctctggccggtcctcctcccgcggccgtcccgggacctgtgcccagacccctggggccacgatcacgccccagccgcccaagtcaccgcccctcccctcccttccagcgttcccgcccgggcggtgtatggtggctccggtgtatggtggttctcgcacgcacagccgcaggggtttcctctcctagactcgaggcggtggcgcacctgcaccctctaaaactcccccgtcggccctcgcggtctagcgggaggcgcggagggccgagctggggtgcgtgcgagcgggcgccaggaaagcgcggggccgccctaggggctaggcctttctttaaacagtgggaggcccacgaagtgtctgaagcccgaggctcccctttttgttttagttcgctctcttctggtaagagaataagggtcgggcaagaatggagaggggacagaaaaggaaggcagggcaactgaagaggcagagtcaacgcagaaggcgaagggagcctggaccagggcagggcagtgaggacgaagagtggagaggagagatccaggaggtggagcggtcaagacttacgtgggccgagacccgtctaaaatctcgtaggatgtcccccagggacactagccttgacctgtctttcctgctcttctccgccagaggcccccaaggcaacggtccagggaccttgcagcttgcctgggagatacacgtgcccaccgcagagactgagcccctgcttcacaactttaaacccagctcaaaagtcacgcactgtcctctcagacacctcccctgctatccaagtctcaaaggccct

SEQ ID NO: 27857 - DNA, 1445 bp, Artificial sequence
  DNA replication origin
cggagcccgcaacgagttatgtaaccggcaggggccgcagccgggacggaggcggcagcccgcggcacttccgcctcccgctccctgccggcagcgcagcccggaagcccattggccgccgcccccacgtggccccgccccctgaggccggcgctgccgccatgttgggagcgggcaggttgggagcgggcaggctccgtgcgaagccaggcccaggatcccgtatgcggggcactggtgagggccggctccttccctgtccctcgctccgggaggtcgccgagacatggccggccagacctctgggctccccggcctagcgtgtgcggacgccggtggcgcggtttccgggccgaggtcccgcggctctaccgagtggcccccccgcacaggccctggcaggcgcatcctaagctcgcgagggcctgcagcgccggggctggccaacaactgaaagcaggtgcacaaggctggctcctggccgaccacccggagccagctggcagcaccaccccgcgacgacactggattctcagccgtccgattctggcgaaaggcagtttagggctgtccctgagtaaaacaggcaacttaagctgccctccggttgtaggggttctataatgcaagatctaacgcgaagtttttgttgttgagacagggtctctgtctcccagcctggggcgcaatctcggctcactgcagcctccaactcctggcctccgcctcagtctcccaagtagccgagactacaggtgtgaaccaccatgcctggctaattaaaaaacaggttttttgggttttttgtttttttgtagggatgggaatgtcattatgttgcccaggctggtcttgaacccctggcctcaagtgatctgcccgcctgggcctcttaaaatactgggattactgacgtgagccaccacgaccaacctgggctgtatatttcaactccgagctttccagaatccaatttgaagagaactggttataagattcgagtcttggctgggtgtggtggctcacgcctataattctagcacttccggaggccgaggtgggtggatcacctgaggtcaggagttccagaccagcctggccaacatgatgaaaccctgtctctactaaaaatacaaaaaaattagccaggcgtggtggcatgtgcccataatcccacctacctgggaggctgaggcaggagaatcgtttgaaccctggaggtggaggctgcagtgagccgagattgcgccactgcactccagcctgcgcgacaaaagcaaaactccatctaaaaaaaaaaagatttgagtctgcgtgtcaaactgtcccctagtatccattgtcctactctgccatcttctccttttaaaaaataactgctttatcatcatctagtagtaacagaatcccacccccttcagcaggcagatcactgtcaagctagg

SEQ ID NO: 27858 - DNA, 1648 bp, Artificial sequence
  DNA replication origin
cgcatacgggatcctgggcctggcttcgcacggagcctgcccgctcccaacctgcccgctcccaacatggcggcagcgccggcctcagggggcggggccacgtgggggcggcggccaatgggcttccgggctgcgctgccggcagggagcgggaggcggaagtgccgcgggctgccgcctccgtcccggctgcggcccctgccggttacataactcgttgcgggctccgcgcggtcccacttcccggctcccttcgcctccaggatgcgctgagccctacaacacccccagcggccgccggctcccccacgaggtgaggtggcggggggcggccgccggggctcggacctgcggcggggcgccgagggggcggggtaggcggggaggccgcgccggggtcaggggggccagcgcccaccgggtacgagcgcgctggtgaggcaggcccggccgcgcccgcgcccccggcgcacggtcctcccgggagccggtttcggggacggcggcggggagtgggcgctggccagggacgagggttgaggaggtcgcggctctcatgctgggtgggagtcgggccttctgcctgggggttgcgtcagtgtccgaccccgcgatgagtggtcgggacaatttgcaactagagggtggtcctcatgggtaccctgtggggtgtcgcgcgaggtgaagggccaggccatttccgtcgggtcagcgatttccgccttcgccccgctctcgcctggcctggtcagggcctgttttggtacttgttgcgccgattggagtcatctgcgacttgtttgccctcctctgaactcctgaaagccaggggctccgtctaggtctcctcctagtcttattctcccagctttcgttgttaagacaaattccttacgttcctggccctttacagaccggccctacagaacccacacccccagctccgactttcttctccagattgggtacttcccagggagtaaagggaatctgtagcttttgtggtttgtcctgctgggaaaatttgggggtaagtggtgggccttctctggacgaccacccacaaatctgtgtgcccaaacggagacaggacccagggtctggacatcaggcaaggggtactctgcagtaaacgtggacattggccgtttcgtgggtttgttttcactctgccaagtccttgaggcgtacacttttgtgtcactcatttatcttgaaagaaaaggttaacagcccaacagagtagttcgctttggtatctggagtggtaatcagagtgccagaactggagagaacattgccgtgtacagatgtttgccttttaccagggcactgaaggcataaaacccttagttaatgcttaactgagtgaaccatgaaagtcatgtgactccaaaggtcgactctagaaatgcggcagtccatgtagcactgtgatgtagaaattctatgatatatgggtcagtgttcacaggcagggagagggggagtcttcaacatctttgaattaaaaagcatctggggcaaaaacaaataaatacacacatatcagtgaactgctttaagttcagttagagaaggtgagattaaagaccagaagaaactcgagggagactgctgtataagtcccagttatctttccaaacag

SEQ ID NO: 27859 - DNA, 1109 bp, Artificial sequence
  DNA replication origin
agggatgctgaggagatggcttgctctcacgtgggcagctgctcctttgagaaacaagccatgcgcagtgttagctgctgacatcctccacttttagcccttgagcccatttcactgatgagcaagacagtggcctgtatctgtcactaacgtgcttttctttttctcccctgttccccaaagacaggagtgtggagttcatgagtgttggatttttcaagctagtaaaccttgcagctgcaagtggtgtttaattcttgtggtatggatgagcacatgctaatctcccttgagcttctcttgagcagaagcctggtgtgctaacgggcaggactggggtggtgctttgagaggaagagggggaaggtggcccgagagggagatctactgagatgtgagctgcctggagtttggggtggggattcctggaggggctctggattttgcagagggacagctgttggtgcaccttcaccagtgtgctgggacagaaagtggggtgagtgggtgagtgaggaataagtgtttgaagggcaggagtaaagcagaaaggtggcagcaggtgttgagctgcaagtggttccattgcctggaaaggaggtggcagggaggcctgcccaagatgggtgcctgcagggtgcggacagcctgtcagaggtgcggaaagcctgacattgaaaatgtcagacagtgggtgcttgggccagagagaaagagcctgaggagctggaccaggggttggggggcggcctttagaagcagcgtctcatgcagccttcccagcgatcctgaggtaggtgggagaatcttcaggccacggctgagaagctgaagcgtgtggcgggagatccgtctcagaacacctgagatccctgcagggtctgggagcatgttaggggctcagagtgcaggtagggactggcagggaggagctgtgggcgggaagagagagaagggagggcagggcagtgtggccatggccagctgaacactgggagtctgctcctgaggtcatggatggaggccaggacacctctcaagccattaagagggtggcctttccaagcgcagcatgacttgttggtcttgaagcagtgccttcgaaggag

SEQ ID NO: 27860 - DNA, 1019 bp, Artificial sequence
  DNA replication origin
ggccatcttcgacctcttcactgagagcggcgtatcctggcccaggctgggcttcctcacgcatttcaggagcgcagcccagcgggccatgcaggcagaggacgggaggctggacgtgttcctgcgcttcctctccggcctcttgtctccgagggtcaatgccctcctggccggctccctgctggcccaaggcgagcaccaggcctaccggacccaggtggctgagctcctgcagggctgcctgcgccccgatgccgcagtctgtgcacgggccatcaacgtgttgcactgcctgcatgagctgcagcacaccgagctggcccgcagcgtggaggaggccatggagagcggggccctggccaggctgactggtcccgcgcaccgcgctgccctggcctacctcctgcaggtgtccgacgcctgtgcccaggaggccaacctgtccctgagcctcagccagggcgtccttcagagcctgctgccccagctgctctactgccggaagctcaggtggataccagggcagggggcaggggctggggaaggggcagaggagagagcagaagccgtcccctccccaccaccaagcttctctgtcagtctcctagggctgccgtaacagaggaccatgaacttggtggcttaaaacaactaaagtgtgttttctcgcagttctggaggccagaagtctcaaatcaaggtgccaggagggccatgcgctctctgaaacatataggagaggttctttccttcctctctagcttccagtgtttgatgggaacccttggcttaaggctgcgttacttcagtctctcccgtcgcctggtcatcttctccctgtgtctgtctccacatggtgctgtcctctctttttttttgagatggagtcttgctctgtcgcccaggctggaatacagtggcgcgatctcagctcactgcaaacgctgcctcctgggttcaagcgattctcctgcctcagcctccctagtagctgggattacaggtgcccgccatcatgc

SEQ ID NO: 27861 - DNA, 1527 bp, Artificial sequence
  DNA replication origin
gtgcaggccacggtgttggagaagtccagaggcgtcctgcactcatccaagccgtccaggatcaggagggccctggctgggactgccaccgccaggctgggctccccgacgtgcgggaagaccgagcagatgagtcggtcggcacacagcttctcgtgggtgttgagatcccggaaggtcagaggcagcaccagcgagaagtccttgccgacctgcccatgggcccagaggcggacgaagtgcctcaccagggtggtcttgcccatgccggccaccccgatagtgatggagacccggggtgggacagacacccgggagagaggcaggaagagccggtccagggcgacggtcctggcggggtgcccgcccccgcgggtggcctccacctgtgtgaagtcgtgttccctcagctgcaggtccgtcaggccctccaccagcaggagggaggccagcctgtgccagggtccgcccagctccgggccacctcccaccttgctcagcagggccttgcggtgcctctgtatccttgagtctgcgggacagaggccagtggggaggtctggtaagggaagagtgggcacaatcagcccaggtgttccccaccccgcgtctgcctcccaagccggtcctaccattgctgcagggccccagcggggcatccggtgtcctatccagggcctgcggggcctgggagccttgactgcccttcccagccagcagatccatgagggctttcacctgctcggctggggagcccgtaccgtggccctggccggcctccctgcccgtccgcacctcttgcttcctcatggagtcggggatcacctccaggagctgtgaagagagggcctgaacctgctgcctgccgtgccccccatccagcagcctgggacaggtgagcaagtccccaggaacggggtcagggatcccctcttcctctttcctcagcctttgggtggcccactggcctggcctctgagaatggactggaagggccatttgttcctgggtggtagcaatgatcacacgaatgcaggggcccagtggatgataactggggccctgagcttgtaccccggccctgccacttaccagataggtgactgagggcaggctgagtcacctctctgcgccttggtgtcttcatttgtgacctggaaatgatgatgaggttacaagtaagtttgctcaaaaggagggaggaatgaaagaaggtactctgttggaacatgtgggaaaaagcaaaaaaaaaaaaaaaaaaaaaaaaaaaaggcagcagcagccactctggggacgctacactgtgtgattctgactaacattctggaaaaggcaaaagtatggagacaggaagacagtgaaagaaagggtcagtgggggccaagggttggggaggaggggtgaatcggtggaacacagacaattcctagggcagtaacatgactctgtagggtactacagtggtgggtccatgtcattatcattatacatttgtccagacccacagaacgtacaactccaagagtg

SEQ ID NO: 27862 - DNA, 1209 bp, Artificial sequence
  DNA replication origin
gctctaaagtcagacggagaaccccgatccccggactggcccggacggagaccaccgtggggatccggatccgccaccctcctccctccaggcgggccccggcccctctccacccgagtgcggctcctgcctctccgtcggggctgcgggcctgccgaggccacggagccagcgagggagacgggcgagaaaggctcttctcccttaggaaagagagaacggcccgaaatgacaggacctccgcctcccgggtgccgactcccagccccacagcccggctcctcctacctccggcgccgccgcggcaccttcttaacggagactcgcgcgcctgcgcatgcgccgcccgcgcccccgcggagcattgcctgcgcgcaggcgcagagcgggcgcgcgcggtggtgcggcagcctcgcttccggtcttcctctgcggcgccgggcgcgggcccgcggcggccagcgcttccggtcggcaggaggcggggcgaggcggaagcggcgcttgcttcaggtggagtctgttagtttttgagaaagagttagggcgagtttaaggcactgtggcagctgtgagataaagtctggttcctccccagctggctcaggaaatgttcgcggatacaacggcggccccctctgggcatacctgcctgtggagcggagagtggacggtgtgagggggaccgggagaggcaccaaatctggcctgggggcccgagaagcttcctctcaggtggggtggcgtgagagtcgaggcctggaggtcggggagggttagctacgtgaagaggggattctgccgcgcttcaggtgcctggaggggatgcccgagctcttccgcagggctagggtgaagccagccagggcctgggggaaaggtagcagaggtttgccatggcttggtatttgagggactttacacatcgtattaagggtttgagcttcaacttggggtcgtcgggagccattgaaggttttttgttgtttgttttttgagacggggttttgctcttgttgcccaggctggggtgcagtggcgcgatctcggctcactgcaacctctgtctcccgggttcgagcggttcttgtgcctcaccttcccaagtagctgggattacaggcgccagtcaccacgcccagctaatttttgtgtttttagtagagactaggtttcactctgttgcccaggctggtctccaactcctga

SEQ ID NO: 27863 - DNA, 987 bp, Artificial sequence
  DNA replication origin
gtaccccgccacgcgcccgagcaggcagctgcccggacagcccggcgcccgccgtgacgtcaccgccccgcgcccgaggaagccccgccccgcgcagccccgtcccgccccttcccatcgtgtacggtcccgcgtggctgcgcgcggcgctctgggagtacgacatggcgcgcgagctgcgggcgctgctgctgtggggccgccgcctgcggcctttgctgcgggcgccggcgctggcggccgtgccgggaggtgagggcgtcctggctggacgggcagcgggcgggccgggccacggagacggcagggacgtccctgtgctccggggagcgaggcgccggcacctgcttcacaggcgtgggaggtccggcgaggccaagcgcggcagacgcgtttactttcgctccgctcctcgccagctccagcttggctgccttttcctcggctggactcccctcgccacccgcccatgggagccctgaaggaggctgggtcttggggggtcgcggggtcgggcggagcggctgcggggtcgtccctcctggagcttcggtccagtcaggtagcgcacgtgcaggtggagccgctgcggagcgcggagtctttgcgggtgcatgttgcggggaatggactcactcggggtgatcgtgctagttccatggatcgtgctttacccctccccgcctcccagtagcgcactgagggttcatttgttaattcgttcattggacgcacatgtgagcgcccgctcagtgcccggcgccgtgcaggttctggggacgccacagtgaacaaaacctatagcagtcatccgggtccccagagcaggtggactcgatgtcgttgacgcagctgtgtcctcggggcctggaattgatggatgcgccaataaatgtttgtaaaacagagagaacgaccctaacctctgctttcccagtccccactcggaggtaacaacagtgaaagtttcggcattgcttcggggct

SEQ ID NO: 27864 - DNA, 1083 bp, Artificial sequence
  DNA replication origin
ccggagcacagggacgtccctgccgtctccgtggcccggcccgcccgctgcccgtccagccaggacgccctcacctcccggcacggccgccagcgccggcgcccgcagcaaaggccgcaggcggcggccccacagcagcagcgcccgcagctcgcgcgccatgtcgtactcccagagcgccgcgcgcagccacgcgggaccgtacacgatgggaaggggcgggacggggctgcgcggggcggggcttcctcgggcgcggggcggtgacgtcacggcgggcgccgggctgtccgggcagctgcctgctcgggcgcgtggcggggtactacccgtctcgtggacggtcgggcctgggggtgggacctccgtgaccttggatcgcgttgtcaagggcgacgggccttgcgcgcggaggtgggggaggtggccccgccgcccccggcccacgctggccggctgcgcctagctgtgcgcattcctggaatggggcggatgtcagtatccacgcgagggtgtggaggcgacgctggggaagaagcagttcccgtgtctgcgacctttgtgaatcccggccatccgtctaggccgctgcaagtctcttgcaaaccaagactggacaaaaagctaaagcgaatgaggaaggggattccaggcttgactggctactactccaaaacctgaacccagtgaccaataccaccaggaaaactgcggttattcgtttattccacttctcttgtccttgtcgagaagagtcaaactctaaagtatttagaaggttattctgagccaaatatgagtgtgcatggagggaggcacagtctcaaaaggtcctgagaacttggcccaaggtgcttgggttacagcttgcttggttttatacattttagagagacataagacatcagtcaatgcatgtaagacataggttggttccgtgtggaaaggcaggacaactcaaagggtgaaatacttagaggtcataggtggattcagatactttctgattggcaattggttaaaagagttgagttctggttgggcgcggtggctcacgcctgtaatcctagcactttgggaggc

SEQ ID NO: 27865 - DNA, 832 bp, Artificial sequence
  DNA replication origin
aacttgtttttcccgttaaaaaaaggcatgagtcaccagcaatgacgacaaaaagaatccaaacaaaacccccctccccccaaacaaaaacaaaacggaaaaaaaagaaccccccccacccccccgccaaaaaaaaaccaaagagagagaccagatatttaaatcaactggtttttaacaaaaaaatatattctttgtattgtttctttaaacatcaatccacccttccatggctcggaagtcgcagttccatctaggaataaaaagaacctagatgcctggattttcagtacaaaaggtccaagaacatgaaagggaaaaggtgatgctctcacaatgctacaagccctccacaaacttctctagcgtgtcccccgtggtgtccccgaccagggacagttcgctggacagcgcactcctgctgggggtgttcagctgggggagcattgcactctgttcggggttccccaagtgtccctgatctatggagctggccatggtgactgcgagtccggggtggggggaaccagtctggggtgagacgtggtgtggcgaaggctggggctgtatccgtggtgacgggctggaatgtggaggctgggactggggccgtggagactggacaggggctggagaccgcacctggttactaagggacgtggcgatctgctggccagggagatgcgaggcctgtggctgtcctgagagcatgtgttgctgggggctcatggggttcggctggcctggggacccaatctgctgcttcatctgctgttgctgcagaatccgctgctgcagggcttgctggatgttgggggtgctgtctgccccc

SEQ ID NO: 27866 - DNA, 1008 bp, Artificial sequence
  DNA replication origin
tgccattagctgcgggtttgatttgagaatgttcagcacctgctgttgctgctgaggggagctgggcgacttcagggtccgcagcaggtcttgcagagcgctgggtgagatgctcctgggtggctgcacgctgggcatccggggcccagccacggccgcctgggcctgcatggatatcacaggcctgggcaagcctggcatgggctgctgctggggaaggggcgcctgctgccactgcccgggaggcatgctgggcatgacgggcccgctcacctggttgggtcggggcacattcaggctcacgggggccatctggctccccggggtccccatgcccgtgcgtcctgggggcatgctgttgttgatgttcacccggtacaggtgctgctgctgctgggcctcacgctcgatctgccgagccgcttccaccgctgcaggagggggctgggccgggggtgggggggccggcacctggctggtaggcttccctgtggacaccgtggtggggggctgagtccgggccacgctggggaagccagctggtgacatgctcacgggtgagggttggggctgggcagggggctgcggcgtctggggtgtgctgggctgctgtgtgggggtcccgggcggtgctgaggtaggagaaggcagactctgctgaggcacgttgcgggtgttcatggtggccatccgccggcgcatgagctgggcctgctgcaggcggtgctggatctgctgctggcggagcttgtgtttgatgttgaggcagaagggcacggggcatttgttttcttggcagtgcttggcgtggtagcagcagagggcgatgagctgcttgcacaccgggcagcccccgttggtcttgcgtttgcagcccttggtgtgctgcaccacccgcttcatcttctggcaggatggcagcgagcagttggcgttgcggcactggcacgcgtgcaccagcgactggatgcagcgctggatgctcagccggcgtgactcctgggggct

SEQ ID NO: 27867 - DNA, 757 bp, Artificial sequence
  DNA replication origin
gcttggcgtggtagcagcagagggcgatgagctgcttgcacaccgggcagcccccgttggtcttgcgtttgcagcccttggtgtgctgcaccacccgcttcatcttctggcaggatggcagcgagcagttggcgttgcggcactggcacgcgtgcaccagcgactggatgcagcgctggatgctcagccggcgtgactcctgggggctctttgactgtggctcgccctggctgctgccctcgtcatccaggcccagcccccacttcaccatcttatgggcatggctcttcgtgttatagcagttgatgcagaggtcgtagtcctgcaagcaaggaaaggggacaggccggtgtcagcatgggacccagtaccaccaggcatcctggctgcttccctccaccgctaagtctgggtctgtgccaggagacccaggcaggataggagacccagacaggatgcgagcacggacaggtgggagacccggacagggcgggagcacggacaagatgggatcatggacgggatgggatcatggacaacatgggatcatggacaggacgggggcatggactgcctatgtgttgctcccaaggaccttcactcctggcaacagccctgaaggctcaaagataacctgacccatgccccaagaacccctggcctgtaagctcacggacagtagacaccagcccccttccttccgacttcctctgacctgggagtcacatcagcccttgccacagcctgtccaactcct

SEQ ID NO: 27868 - DNA, 762 bp, Artificial sequence
  DNA replication origin
tgtctcgctctgttgcccaggctggagtacagtggcgtgatcttggctcactgtaacctgtacctcctaggctcaagtgatcttcccacctaagccttctgagtggctgggactacaggactacaggcacacaccaccatgcttgtctggttaaaaaaaatttttttttgctggagacgaggtctcactatgttgcccaggatggtcttgaactcatgggctcaagtgattctcccaccttggcctcccaaggtgctgaaattataggtgtgaaccaccgcgcctggcctgacacacaatttttatgggaaaattatcttctaagagtcttggcccaaaaacagcagagacagagaggcttaccggtgtgccaggaggctgggcgtgcacaggcgtcggctgttgctgcgatgactgaggggtagccacagacgggggctgaactggggtttgaggctgcggggtcacctgggcctgggctgctgcctggactgtaggggtgctctgggtttgggtagcactgggcactgagccaggagtcggggtgggagtctgcccggaagacgacacaggagttgatggctgagtgggagctgctggctggggaggagtcatcccaggtggtgtcgtgtgctggagagatggcatgccagcagccgtggaagcaggaggcggtgttgggtgcagtggtgactgtgtcactggagggcaaggtagctggctggcctgaggccccagcatgttgagagggttaggaagagc

SEQ ID NO: 27869 - DNA, 1329 bp, Artificial sequence
  DNA replication origin
ctcggcgcattgtttttcctcacggcggcggcggcggcgggccgcgggccgggagcggagcccggagccccctcgtcgtcgggccgcgagcgaattcattaagtggggcgcggggggggagcgaggcggcggcggcggcggcaccatgttctcggggactgcctgagccgcccggccgggcgccgtcgctgccagccgggcccgggggggcggccgggccgccggggcgcccccaccgcggagtgtcgcgctcgggaggcgggcaggggatgagggggccgcggccggcggcggcggcggcggccgggggcgggcggtgagcgctgcggggcgctgttgctgtggctgagatttggccgccgcctcccccacccggcctgcgccctccctctccctcggcgcccgcccgcccgctcgcggcccgcgctcgctcctctccctcgcagccggcagggcccccgacccccgtccgggccctcgccggcccggccgcccgtgcccggggctgttttcgcgagcaggtgaaaatggctgagaacttgctggacggaccgcccaaccccaaaagagccaaactcagctcgcccggtttctcggcgaatgacagcacaggtgaggagggggtccggggcggcgggggcccggggcgcgctgtcacccccacctgaaagagagcgtccgggggtcgtggtcgcggataccgatcgagccgggagctcggagcaggccccgcagcccgttcccctcgccccgcgcgggagggtggaagttcgtcgcaggactgtcactgggcccgagttggtcagcacacgcccggtgcactcggcctccccgcacccgatcagccctcctcgcggggaccctagtggcactccaggagggaagaagtaaagtgcagcgtgtgggtttgtttggtaatgtcctacgcatccatccgcggccgtgtccacacgcgtggccgtccagaggaatgacagcggagggtacctttgatgcttagagaaagcaagatcgcggccaaaggtagggcagtgtgttttctggattggcgacacattgaccaggctgcattcagaggacactcacagcagccgccagcttgcgagttagaaccgaagtttcttggaatgagtgagttccttggaaagatgcttagtgcttattttcaaaactccttgttttgtgtgtgtgtgtgtgtgtgtgtgtgtgcgcgcgtgtgtgtttttagtcaactagtcattccatttttcaaaacccaaacttcgttagcaagatgtcatgaaagttgctgtggtgtgtttcatttccatgtataacttcaaaagaaag

SEQ ID NO: 27870 - DNA, 1217 bp, Artificial sequence
  DNA replication origin
ttccagagcctgaacggggagggggtgggggcggggcacgccggtgcgtcacccccccgcggcgtcaccacgcacggcccccgccccgccccctccacctgcgccggccgtggcggaaagagccgagcgtgctcgggccgaagggctgaaggcgcggccgccaagcgtagggaagctggcggcccggcgcgggccaggcctgcggggcgcctgggctccgggctgagccacagcttttgttctgatggcgaccaggcgtagagggccggggctccgggccccagcgggctccgggagcggcggcctggccgcgggctgggctctcgggcgcggattcgacgccagcccgggcccgcccgtcccgctggggcggcgctgcgtgttcccagctcctcgcgtccccttccccagaccctcctaggtggcgtcggtcgggaacggtcggggcgaccccagcccaggccgcgccactagccttcgccgccggccagggaagtggaatggcctctgcaggttacagaccgcccttgggtcctgccgacgaggtgggcggatggggaaactgaggcggggggcgagcaactgctccaaagtggtcgaggcaggaagtggcagggccgggattcgggtcccgccctacctcgtgacactagggagtgagggggcctcacgcctgttcgcatcccaaggcggcagggcagacaccctcacctgtgagagcggggtggcgagggccggcctgggcggagaagggcccgcgcatcggggcttaagcctggacgctcaggccgcactccccgccccaggcaacttgcctggcgcctcgcaggtgccccagacaggggtgcgggcctggggagtcccccacgcgagaccacagcccgcgggacacttctacgaatacccgaggtgttcccatcccagttagttatctgcccctccaaacttgcccggcttcctcataaaggtatcagcagctccactgtttcctaagccagaaacccgtgagtcagcgcggactcctccctctcacccgccacgcgcccctctacccacggtctttacctgggagactgctcctcccgcactgtcccggtggctatggtggcagctactcacttaagtgttctttgctctccacgttgctccccacgcagcaccagagttaacatcccgaaaagagagggagaaaatctgtttaaaacaactccctggcc

SEQ ID NO: 27871 - DNA, 1302 bp, Artificial sequence
  DNA replication origin
aacatcttgggaggcagaggcaaggggattgcttgagcccaggagttcaagatcagcctgggcaacaaagcatgacctatctctacaaaaaaatttttaaaaaaattttaaaaaaggaaactggccaggtgcggtggctcacacctgtaatccctgcactttgggaggcgaggttgggcagatcacctgaggccgggagtttgagaccagtctggccaacatggtgaaaccctgtctcgactaaaaatacaaaaattagccaggcatggcggcatgtgcttgtaatgtcagttactcaggaggctgagacagaagaatcgcttgaacccaaaaggtgggggttacagtgagccaagatcacgccactgcactccagcctggacaacagaacgagactccatcgaaaggaaggaaggaaggaaggaaggaaggaaggaaggaaggaaggaagggagggagggagggagggagggagggagggaggggagggggagggggaagggaggggaggggaaggaaagagaagaagaaaggagagaaggaaggaaggggaagggaagggaaaaggaagggaaagggaaagggaagggagaaaaaaagaaagagtggtcacggtatttggtcacctcaagtcagctgagtccctctgcaaaagatcacccctctcaagatgaccatctctacacaattattttctttccgggtctgggaagctttcccttctgtgtccctttgggccttgtggcagtaacagctcagctgctacaagccctaggttgctgccctatcccttatggtttccttgcaacccgccctaactgtgtacgcagttcctctatgaaaccttccataagctggctgattctacgggggctctgcctgctataaccttaaacccaggaaatccacttctcagtgttcatctggtgatgctcttaggtgcacaaggaaacctgtacaagaacattaattgcagccccgtttgtaacaggaaaaaagtggaaacaatctaccagtcccttaggaggagaatagatcaataaaatgtgctttgttcctgcagtagaatacaagacagcggctaaaaggaatgaactgaaagatagcactcatcgggatgactattatcagaaaagaaaagaacaaaacagcataagtgttggtgaggaagtggagaaattggaacccttgtacactgctggcaggaatgtaaaatgatgcagctgctatggaaaacagtatgggagttccttatagaatcaaaagtagaattaccatatgagacagcaattatcccacttc

SEQ ID NO: 27872 - DNA, 1855 bp, Artificial sequence
  DNA replication origin
ccgaccccggctatgggaccacagccacctgttcagccttgctcagcgtcagctctttggtaaaaggaggataatcatcagcttccctacagcattgctatgagcattaaatgagacgatattttgccttacgggccaccaaccagccaactgccaacttgcaagtccactccgggagccatgtctgggacattaacggatattcactgtcccttggaggctgacggaagggggcacctcccaccccacgaggcatgaactggctctactgggctcaccagggtctctctagagcccaagccaggacaccacggagtttaatgaagacctgctggaggaaccaagggaatcagagtgagaaatcccttttgttccgggtggggagggcatccactcttgacttgggaacactcagaggttaggtttgggcccagaggagagaatgcagtctggaagccgccaggattcaaaccaggctctaggttcttgtattattccttccagcaaccccctaaggagcacttgtgagcgctgggactctgctggaggctgtgaggaggggctggaggagagagatgggtgttgggactgtgctggaggctgtaaggaggggctggaggagagagacgggggtcctacctcacagagctgagcatctagggagggaggaacacgaatccagaaccacacacggaaagattccaaaatggggcacacacggagaaggaagtgtatgaagggaagtacaatccagtctgcagtcggggagagcttcttggaggaagtgggattgggtgatgggctgagaagtcaagtacaaggggttaaggcggtgggggcgggagagggaacatggagccggagttagagagagaggtgaaggcctcctgggcccttctcaggggaagaaagcagggagggcaacagagaagagtctcacccaagactccaggacaggtgggacgggggctcttccagggcaggtcggtggggagttcccttccagggcaggtggggggttcccttccagggcaggtgtgggggattcccttccagggcaggtgtggggggttcccttccagggcaggtgtcggggttcctttccagggcaggtggggaggggttcctttccagggcaggtgggggaccccttccatggcaggtggggggggttcctttaccagggcaggtgtgggggccccttccaaggcaggtgggggggtttccttccagggcaggttgggggtttcctttcaggacaggttgtggtgggggggccccttccaaggctggggatagcctggagatgccacggcagaggaaaggggctagtaatggcgaggctgcgctttaagacaaaggactaaagaaagggtttttttcctcctttgcaaagagacatttcatgtacagttgccacttagggtttacagagtgtgggaaatcaatgttcgccttcgtgttcccatcccttggtaaagcacaaaactaacagtgaatgaccatgtgagaacaacaaacacattctttagtaaaagcgcaaggagaaatgaacgcacctcttcctgatagctggtcctgtaggatcgctccagctcctgatccaggaagttcaggctgaactgattaatgggcggcttaaaaaagtaatctttcatcaggctagaagacacaacaaatgcagtcgatcaatacccagcaccataactgtgccaatgttttcagatcataattagctaccaaaacgctgctcattaggtatattacaacagctgcgtctaaaagcgcctgtggaacagacgccactcagctgccccttgttaaaacagatctgtggaaagtccttcgcacctca

SEQ ID NO: 27873 - DNA, 1517 bp, Artificial sequence
  DNA replication origin
ctcacacaggcggtcgaagcgaccgaacagatcgttcaggagacccaccagggcgtgggcagacttgttggcactcatcttggtgaagcccacgatatctgcaaataaaatactgacttcttcgatctgctgcatcttaaaagggcggaaggctataggagctttttggatggaagactttttcttcctgttcttggggctcgaggtggcatgcctcttgacagaattctcactctcctcatctccctgcttcattaagtcatcggctatgattcttggcatcacggaatgaatcatcctctctttgagggctttttccacttccaggtccttcccgtgcataatggattgccccaccttgaggaaggtgctcctggacctcacctgggacatgacgaacaggtggaccccgatggcgtggatgcagccgtggagcagccccctgctcagcagctcccagtgcagggccccggctccgggcgaggggaagcaggcttcatcccggaaatggtagccaaaggtctcgaaaaggacagagtaggccacccccagacacaaactcaggtacaaaggtaagtgcatgacggtatagagcaaaaagagcacttcgatgcacatggagaagctccccacttgagataagcaagtatctgtgggccgggctgtggccgtaaggttggagctgtcgccgcgtcctgagacaggcgtcaagacctggaactgcgcagccagggtcagggcgaacaccagcagggtgagagccagcgaggtccacgcgtaatgccgggcgtacagcttggtgaaggtaaacagaaagaagcccacacacaccaggaggaagcacagcgcgggggcgaccatgacgatcagtctggatctcatgtggaccgcaaaatagatgctccacagaaggcaggcgaagccgatgtagaagagcgcataccggaaccggcgctgggtctgcgggaagcagcgctccaggcaggcctcctccaggttcaccgagtcgaacttggggtcccaccagcggctggaggccctctcgaacagctggggcagcttcttctgcctgcgcagccggcctccgccgcccactcgccgggggacgcccccggagtccccagagctgctgcagctagaggagatgctgtatttgcagtgcttggggtggctgttggaggacagctgcttggggttgatcttgacgcgcacgctgttgctgtccccgctggagtcgcagctcacctcggtgctgtggtgatgcagcagctgctggtggggtggggaagccatgttgtcgagtcccggggcctgccccggccggggtcaccagtacctgccagcaaaacggggagagttagcggcgctcccacctaggcatgcacgcctagaggcccgggacctgctcctgtcctaaggggcggctccagcacgcgacctggacaggcaccatctgttcctgtggttcccggctcagcggtgctcccaccgcccccaccgcccccaccttcgaggcg

SEQ ID NO: 27874 - DNA, 1545 bp, Artificial sequence
  DNA replication origin
ccggccgggacgcccgcccgcccgcgcccacgccgggggccgcctccccgagctagagatgcggccgccgccgcgcccgccgccgtgtcccccgcggccgctgcctcatgtcggaagagctgccgccgccaccatctccggcccctgccccgcccgctgtcactgacagacgcgcgcccgcgccgcccctcgcccagccgcagcgcgcacgcgcggcccgcgctcgccgccaccgcctcctggccccggacacgcgcacgggccgcgcgccgccccgccttggtgcgcgcgctgggctggggctgcggggcggggcggggcggggcggggcgcgcgctcggctccgccccccgccccgggcggcgccgcttctaggcggcgggctgtggccgctgtccgcgctccgggcgctgtgggcccgccctccctcggcgtcccagaggccgcgcgccgcccggggtcccgaccctgcggagagacctgaaggcgcctgccgtggaagaagccgctggccgcaacgtttgggaaatcaaaatgttgccttcccactcggcacgcctttgggataaatcgaagtttccaaccgttggatttccctcccgggaggctccccttgctctgtaagcaatgaatgcgggccccggggcactcggcctgccctggacctgctcacggggcgaccttcacgggcctagcctccaaagctgggcccaccgacgaccacgttcccccgccccaggggtagtttaccttgctgtccttgagcccttctccccctcctcatgaactactgcttttccttttacacaaatgagactttcaaaggagtccgcgtcccataatggcagttgtgcattggcctccataaacattgccacgtgtaaataaaatcctattctctctagcatgcagatcccgaccccttctccccacactccacagtgcctcctgccagtcacggggctctcttccatcccctccctcgcctcccaggcccagcgccggggcccacaccaggtctcactgttgaattagaaaataaaagtaaaatgtgatctgtccatgcaatggaatattattcggctacaaaaaggaatggagcaccgatgcatgctgcagtgtggaggaacccgggaaacgttatgctagtgaaagaagccaaacaaaaaaggccacatagcgtatgattccatccagatgaaatgtctcgaattggcaaatccgtagaggcgacacagattggaggttgccaggtgctaggggaggaagataagcagcttggggtttcgttttaggatgatgaaaaagtctagaaatgatccaacaggatgaatctacatactgcccttgaatcatacactttaaagtggtttaggccgggagcggtggctcacgcctgtaatcccagcactttgggaggccgaggtgggcggatcacctgaggtcgggagttcgagaccagcctgaccaacacggagaaaccccatctctactaaaaatacaaaaattagccggacgtggtggcacatgcctgtaatcccagct

SEQ ID NO: 27875 - DNA, 917 bp, Artificial sequence
  DNA replication origin
cactgccttcccttcgggctcggccccgccccctccgggctgcgcgcctcggaccgagtccgggactggggtcagcgcaggcgcagacgcagacgcttagcggcggcgcttccagaacgctgcgctcgggagagcctcggggccggagtcgcgtgggcgctgggggcggggcgggcgcccactgcctgagccggatggcagagccgtctctccgccagctcccagcgctggctcgcgtccctgggttccgagcccagcgacgcgcaagctccgtggccgccagcgccggccctgccccctcgctgctgacctccgccgcttcacgccgcggactcagctcccgggctttgcggtcgctgccggtgggatggggagggccgcgaacctctgtcctctcaggcattcaccgcgtggctgggagggcgccaggaggccgaggccggggctgccatgcgctcccggtgcctcaccccgcaggtcggtccgcctcgtgggctgtggggcagacgaccgggaagccccgagatctccagatcctcgatcgggaccgaaaaggccctgaacttgtgcagtgacttgccattgagtccgggaggttctggagacctgggtgacggaagaacgcccaaggccgactgctgccctcagttatcggggtgaggtttccacctgaggccggcgcccagggcaaacaggaaatgcgagttttaggagattctcctaccggaatgtcacctcccttccccgccagaaacgaaccgccctctccgccagtaattgaaaaccgaagggcagcccttagcgaatgaaaactccagaaaccaggagggtcagggagggtcatcatctgaatagaatgactcttgtggctcttggggtttcctgaatcagtcattttaggaactgaaaaggcctta

SEQ ID NO: 27876 - DNA, 817 bp, Artificial sequence
  DNA replication origin
ggaccgacctgcggggtgaggcaccgggagcgcatggcagccccggcctcggcctcctggcgccctcccagccacgcggtgaatgcctgagaggacagaggttcgcggccctccccatcccaccggcagcgaccgcaaagcccgggagctgagtccgcggcgtgaagcggcggaggtcagcagcgagggggcagggccggcgctggcggccacggagcttgcgcgtcgctgggctcggaacccagggacgcgagccagcgctgggagctggcggagagacggctctgccatccggctcaggcagtgggcgcccgccccgcccccagcgcccacgcgactccggccccgaggctctcccgagcgcagcgttctggaagcgccgccgctaagcgtctgcgtctgcgcctgcgctgaccccagtcccggactcggtccgaggcgcgcagcccggagggggcggggccgagcccgaagggaaggcagtgcgcatgcgcggggcgagccggccggcactgtcacagctgagcggccgcgagatcggtccctgtccgcagggtcgggtagtggccccctcggggacagcgtgtgaggattcgggcgcgaaggacggggtcagattcagccaggtgcccactttccccacggtcacgaccctggtccagaactgccctgccccgggcctcagtttccccactaaggagaggaggcgtgccggggaaatctgaggccctccccagccgcgaccttttccctcagacgaaggaagagtggtcgtacccggccgcgatcaccgaagcctccagccctgtccccgcac

SEQ ID NO: 27877 - DNA, 1108 bp, Artificial sequence
  DNA replication origin
gagggggcggggccgagcccgaagggaaggcagtgcgcatgcgcggggcgagccggccggcactgtcacagctgagcggccgcgagatcggtccctgtccgcagggtcgggtagtggccccctcggggacagcgtgtgaggattcgggcgcgaaggacggggtcagattcagccaggtgcccactttccccacggtcacgaccctggtccagaactgccctgccccgggcctcagtttccccactaaggagaggaggcgtgccggggaaatctgaggccctccccagccgcgaccttttccctcagacgaaggaagagtggtcgtacccggccgcgatcaccgaagcctccagccctgtccccgcacggatgctggaagcccgtccacgccgcgcggggagtggtggcccgggtgctcctacgacctgggggccctgtcaccgcgatcttaattgattcccaaaggatccagaaaagggacacattggcgcccgcccagggcgggcggggtcccccgggcggccaggccgatggggtggatgggcttctgctcgcggccgccttgtggggcgctggcatcggattggagtggggcagcatcgggggaggacagagaccccacgctccccccaacgcagcagacccaggggcaggcccttggctcctgcatgccacgctccggcctccccatatcgccctagcaccgctgcccgctggtcttcccttctcagaaacctgcagtggcctcaggcctagactccctgggcttcccctgaaggcccagtattccctaattcacctcctctcaccttggctgctcttccattcccttatccccgccacacacagcggtcttcccttgtctgcgtctgggcgccctcgatcttcccgtgctccacccccctaatctgtgacccaccaaacctgcccatccctcaaagtgtagctaaaactccactccttccccaaccaaactccatagccccacagtgtgtctcagtattctctgaagagccctgaggttgtgtcaattgattcttctcaacagaagtaatccattacataatttatcaacttatatgcattgatcaggctttgcaaataatta

SEQ ID NO: 27878 - DNA, 878 bp, Artificial sequence
  DNA replication origin
gtgcagagcttccggaagccacaggaaccacaagtcacagggacagaggggcccagcctggcccggaggaattgaatacagagtccatgggcagtgagaccctggatatgaaggcagaggagcccgaggagggacatcagggggagggagagtcccatcattgttgcccagggtaggaattaattccctaacagcaaccccgtcccttgggcagctgcattctccctggaagtcttgtgtgtaggggacaggcagggacagaaggtggcagagggtggcaggcccttttcacagtcccggcccggggaggtggcttcaggctgtgcattggccactggcctccagcttggaggggccagtgagaggggtcagaggggccctggtacttccgagtcaggggccccagaacctccccttagggtccctgatgcgccgtagcccatgccagtgcctcagcctaaaggagcagcgagctaatggaatgattggtgccccggggccagcgggtggagggacgtgcagggaatggatgggggtgggttgggaacttccctggtgattcccttagtgggctaggactggggtctccccttgaagactaggctgtaggaagcattgcagaaccaggactgaggggtcaggatcatgagatgagaactcaggctgtgaccgctgttgactctcaagtgcccacctaaagcagccaaagctgccctcaaagggctcggggccaggagcagagggggaagggccgggctaagctctcgggcagtgtgagaattgcagccaatacgagggtcggtcaggcaccttcatggctgcatctgcttagtacatggacttagaccaggagtggggctttcagggtagaggtcgag

SEQ ID NO: 27879 - DNA, 972 bp, Artificial sequence
  DNA replication origin
gggcagccctgggcctggcgaggagcctgcagtgccagagggagcccctgacgtcgcggctgttgggggagagtcggagccagatattgacacacaagccagtgagggcaccgaggaccagggggagcccggcccagctgcagaggccagtgcagagcctgggggcgcccaaagcgttaaggcaggggacactgaggagaaccagtccccagagatgactgaggaggacgcagatgaagcctcctctgaagaggaaagtggtgatggaagtggaagcgaggaagaaggaggagttccctccgaagaggagtccgaagaggacagcggcgatggggctagctcagaagaagcagagggcgcctccgaggaggccacggagccccaggaggctggggagccccaggaagccagggagccccaggaaggcggggatctgcaggaagccgaggagtcccaggaaggcggggatccccaggaagccgaggagccccaggaaggtggagcgccacaggaaggcggggagccccaggaaggtggggatccccaggaagccagggagccccaggaagccagggaaccccaggaaggtgcagagcttccggaagccacaggaaccacaagtcacagggacagaggggcccagcctggcccggaggaattgaatacagagtccatgggcagtgagaccctggatatgaaggcagaggagcccgaggagggacatcagggggagggagagtcccatcattgttgcccagggtaggaattaattccctaacagcaaccccgtcccttgggcagctgcattctccctggaagtcttgtgtgtaggggacaggcagggacagaaggtggcagagggtggcaggcccttttcacagtcccggcccggggaggtggcttcaggctgtgcattggccactggcctccagcttggaggggccagtgagaggggtcagaggggccctggta

SEQ ID NO: 27880 - DNA, 1002 bp, Artificial sequence
  DNA replication origin
aaggaagggtgaatggaaggatgatggatggttgaatgtgtggatgaaggaatggaaggatgaatggaaggaaatatggatgaacagatggatggaaggatggaagaatgggtggatggatgaatgatagatgaatgggtggatggatggctgaatggatggatggatggaagaatggacggatggatggatggatggaggggtagatggatgaatggaaggatggataggaagaagatgaatggaaggatggatgaatggatgaatggatggatggaaggatgaatggatgggtggatggatgagtagatgcatggacgggtggatgaataggtgtgtgggtggatgagtgggtggatggatggatgaatagatggaagaatggactgatggatggatggatgaatggatggatggatggatggatgatggatggatgaacagatggatggatggataaatgggtggattgatgaatggaaggatggatgaaagcaaggatggatggtggatgaatggaagggtggatagatgaatggacagacggacagatagatgggtggatgggtggatgagtggatgggtgggtggatggatggatgaagggatgggtggatggatggatgggtaggtggacagataaatggatggatgacggatggatgggtggatgcatggatagatgggtggatggacagacagatgggtgaatggctgggtggaaggatgggtggatggatagatgaatggagagattgatggatgggtagactgatggatggaaggatggatgtgtgggtgcgtggataagtgaatggatgatgggtggatgaatggatagatgagtggatgggatgaatgggtgggtagatgagtagatggatgatgggtagatgatggatgggtggatggatggattggtggacagatgggtgaatggaaggatggatgaatggatggatcgatggtggtggtggcaaaatggaagaccttccgtcaacc

SEQ ID NO: 27881 - DNA, 757 bp, Artificial sequence
  DNA replication origin
cttacttagctctctctcctgggcacatgccctgctccaaacccaaatccaggcctcatcgcagcataagtccttacctgtaaacatcgctcgtatgtgcaaccctgtcattcaaacacctcaacgtgttccatcattcgtgaacccatccctcgtttgctgcatccctgctgtttttgaagtatggtactaggggaattgagacaggcattttgtcctcagtgcttatagtccagtaggggagaggaggcgtcttctcccttgcacgtagctgaatctagtcaaatgggacacacatcagtgtcactggggaggcacaggaaaagcaaggtggggctgaaggcagggaggagaccatcctgagctgagtggatcggatcagaaaaggttttacggatgagggaatatttgagctgggccttgaagaaagcaggattcagaacagaaagatggcaggaagggaattctgagttgagggaacaagatgagcaaactcacggtgccagagcaacggggctctggtgagacccagggaaggggagcattgttctgtcttgcatgaaggcgggcagatggaagtggggtggcgggacgtgttcggaaggcaggggtggggctgaagtgtgaagggccttgttaggctaagcagggctttgctctgtgggcagcgggtcactaccaagggctcagggaagatccgtctggcagttgtttgtaggaagagtagggagggggagactgattagtcagccatgcc

SEQ ID NO: 27882 - DNA, 2199 bp, Artificial sequence
  DNA replication origin
agcatcatgcgcaccgagcgctccttgtccagctgctgccgcagctcaatcatctcccgccgcaggtcctccgccttctcgtcctcccagatgtccggggagcctatgccttcgtccttgtcctctgcccgccgtcgcttgggggacgagccgctcagctcctggggaccccaaggagtcggtcagtgtgcctgacacctcggtaccaccacggagattggggttccatcgcagccccccaaagctgcccaacacaggtgaatcttcattagggagccccttctgcaagtccaacaaaccagccaaatgccaggagaatgggctgctttacataacagtcacctggctccttccagagcccactccaccgcacttgaccgatggggaaactgaggccggggcaggaaaaaaagtgcctggaagtacttgtcagtgggcaagaaggggcctgcagccacacctgagtcccaggcccatggctgggtccaaggcatgcccatgccagggagagggagccatgaaggacagggcgcacctggatgaagcgcttgagctgtgtgttctgctgcaagagcctggtcttctcctgctccagggagaagatgtactcggctgtctgctggagaatggctgcctgagggcgtggaaaagccgagagtcaggctggcagtgtttaccagagctcactttcctctcccagcgggaacctgccggctcctccaggaagccctccctgctctcacccaccttgctgagcttctctccgtctgtgtgggggatgagggtcttgagggactggaatcccgcgttgatgctctgcatgcgtctccgctcgttgctgttggcgatctcccgccgaatccgccgctcctggtcccgctgagtctcgggggttagtggaatgttggcaaggctgccagagaggacagggacaggctcggccaaggcgccctcttcatcattcatctccagagggccccagtggaaactgcatccctcccctgctgcaaaagatgccaggccacccccagagagtgatggaggggtgctctctgggacaccggggcggactgaatcagctggctgcgggtaagatagtccgctcagaacccaccccgggccaggcacagtaatcccagttctttgggaggtcaaggccaaggatcattgagcctaagagtttgagatcagcctaggcaacgtagtgagaccctgtctctacaaaaaaataaaattagccaggtgtggtggtgcatgcctgtagtcccagctactcaggaggctgaagtgggaggatcgcttgagcccaggagttggaggctgcagtgagctatgatcacgccactgcacttcagtctgggcaacagagcaagaccttgtctcaacaacaacaacaaaaacccatcccctccctggctttcctcacagggagcagtctctcctccggaacagaattcccagtgtgtctgagcatcaaaacatccaagagcttagaaactatgcagacgacgggtgctggccccagcgtctgactagcaggcccggtggggcccagaaacgtgcgtggtgtgattctgatgcacgcgggatgcagacgacattcagggacgctgtccccgctcctggaacacttctgagtgatttgctaggcacctggagcgcctcttcagcgtctcaggctttgccaccccaggactgaggaagacgtccccactcccttcctaccctcacggccacgcctcccaccacaagccccagccccgctaggctaagacttcacagaagacaagtaccactcactccccaaaaagacaccaagccaacaacccctggggacacggctccccacagcccacccactccaagagatagacccaccctgcgccggagaagcgaggctcccaccatgctgtggggagcgctgctgacccttgcaggagcagtggccagtgcggtgagaaggcagcctgggggaagagggcgtggctgctggctgggggcgtggcttcggacgagggcggggcgtgtgcgccagggggcggggctgcgggccagggtgcagaggcagcggttgtgggcccaaggccacgctcccgagggttgggcttgtgtgtggcctggaggaggcatgtccccctccctggacctcccctgcaactccccccgcccctggcctgatggcttccagatgctgggctc

SEQ ID NO: 27883 - DNA, 1394 bp, Artificial sequence
  DNA replication origin
ccgctaggctaagacttcacagaagacaagtaccactcactccccaaaaagacaccaagccaacaacccctggggacacggctccccacagcccacccactccaagagatagacccaccctgcgccggagaagcgaggctcccaccatgctgtggggagcgctgctgacccttgcaggagcagtggccagtgcggtgagaaggcagcctgggggaagagggcgtggctgctggctgggggcgtggcttcggacgagggcggggcgtgtgcgccagggggcggggctgcgggccagggtgcagaggcagcggttgtgggcccaaggccacgctcccgagggttgggcttgtgtgtggcctggaggaggcatgtccccctccctggacctcccctgcaactccccccgcccctggcctgatggcttccagatgctgggctctcagcagaggctgccggccccacccgaagccgcagccccggcctcttcctgaggggccctcccggggtgccctgttccaggactgggccaagggggctcatgcccctgaatgtgggagaacaggaaaagggttctgggcagctcctgctccattgatgaaggcagtctggggtcaaggggctgccaagtctaactcccctgctgtgtgccctggccccttcgccagcctgcaggcggaaaggagtttgcacggaccccggaggcagcacatctgcaacagctggaaacagccgtggccttcctggccccacccagcctgcccatctgtccagccttggctccctgtgggaccctggacgcatcgctgccccttccccggcctcggcttcctctcccaatagagaggtgtccaacgccggaagtctggatgcaaatcagcctccttccgtcctcatcaagccaagccccctcctccatcaggacccaaaggcccagggcctgcacccagggtacaagtctcttacagggtcttgaaatgtccgcactgcaaaaggggcccgggccccccactttccatgagactttagggtgcagggcagagaggggatggttttagggtcggtcagctggatgtcagtgctctcacttctcccggttcccctgccctgaagtggaggtgatagggggactggagcaggcctgctgcacggctgtgtgtggcccagccttagggcggagtccaggctcccaggcctggcacaaactcagaccataccatgtctgagaggccagcaggccaaggggaccaggactgctctgcagtgggtggcttaaagctggggctctttggaggtaagaggtgggaagagatgtccataggaagccacaacacaaggtaagtgcaatcttgaggcatcaccatccccctcaggagagatgtggggagagacccctg

SEQ ID NO: 27884 - DNA, 1139 bp, Artificial sequence
  DNA replication origin
ctgtgtgtgtaggacgtttacagaccttaaccgtaaatgcaaaaccccagaaagagctatcagaaactttcaggcatttgcagaaaaatccactttattcagtgcagtatcacctggaaatttcaatcaaccatccttcatcaacaggaacccctggttggtcagccatcagaagccctggttggtcagcattccaccaataagaattcctggttagcggcactccaccaatcacaacccctggttagctcctattccaccaatcagaagccttggttagaatgcattctattaaaggactctgtcggcgggtacttccagggcaatttaggtgagttatatttgagggtcttggtggcagattcaggtcccacgaggaactgtaccttttggggggaaatttgctttcttggatttaagaaagtgcttaacctaagttaagcactaggttagccagcagctggtttctgagccaggagactgggctgatggctttggagaggaaggaggcaggatggagcattggagaagctgggccggcagattctgatgcagaggaggaggcgacacaggcccctgatcccagccccagctcctcttccttgtgagaacttccggctggggttttcgggactggggtctggtggtctcctttggtctcccagttagtgggctgccttgcggggaagggacggaagaggctgagggtcagctcccaagagcagaggagttggtgggacttgggccgggaggtgcagaagggtgcatctggctgcaccctgccctgcccagctgctgggtgtgaccttgggcaagtcacctcacttgtgggcttgtgttcagaggggcaggggtgatggctgagcttgcagtcacacacccgcttctgataagtggcgggctgtgtgaactagcagtcagtagaggcgcttcagtgggttggcatctgcaggttgctgttgtgccaggtctggctacttgaccttgggatcatcaccttccttcccacgaccctgcattgcttgctcactgtaatctcggccaccccactgggttttgtgagaatcaggcagggaaaaatgtcaacgaggtctgtgaataataaaaagagttacacgattacagcgatttccgaatgc

SEQ ID NO: 27885 - DNA, 1224 bp, Artificial sequence
  DNA replication origin
ttggagcatgggggccccaagcggccccggccacttttgtccgctgcaggcgggcgagtcgcgacgtttgtaaattgcaaacagacccacgtggttctgcagcagtcccggccatgcttggtgctggtggccttcccccccgcgcttcctctttccccctcctgcggcggcttccttcctctccttccttcctcgggatctgaggtcgtccccatccaagggggtctgggggcccggggcgcgcgtgggggtgtagctagggcggctacaatgcagccatgccgcggctcccggcgcggggtgggggcggggagccgggcactgtgcgtgtttgcagagcggggctgcagcggggtcgggggcgtgctcgcgtgtgggtgttgggggtgggcggaccccgaggggcccgcgcggccggtaggggcgccgcggcccggggcacgttggctgccgctcgctcgcccgcccgcgcccgggcgctgtttactagcgaggcctggacgtgactctgcagccctcttggagtaggcggacctctgcgcgcggcctcgcgggagctgtagttctccgtgtcctgctggtgcagcattgtgggatttgtaggcgctcctgggccacgctttccctgcacaaagctcggcccccgcgggcacgatgggcaaggcaggccaggtgggcaggccatttggggaagggacacctgaggccgcccctagcctcgcagggcagcttcccgccgcacgtgggtttcctctgcaaactttcccatccaacgcccctcccccctgccgtaaaccgaaagcgtcgggtcccccagccgggtgggtggcccgaggtccgcaggcctccccagaagccactttgcaagctttggtcctaggttgctctaaacccaaagggtgatggactcaaggaccacacacagccaaaccaccccgcacacttcttaaaatgcacatgcctggaactctgatcgctggggcccggacatctgcattttgaacgaccccctgggcgtggtgtgggggaggtgggcgttctacggcgtgcgcaagtttgggacctgtggcccctttcctgccgcgctgctccaggagcgaaatggctccccagggctggagccacgtgctctgccgcccgaggcagtctgggcggggattgagggaggaggagcccgccggtgtggcacaggctggtggacgctagcgcctgcagaatccggcc

SEQ ID NO: 27886 - DNA, 759 bp, Artificial sequence
  DNA replication origin
ccacacgcgagcacgcccccgaccccgctgcagccccgctctgcaaacacgcacagtgcccggctccccgcccccaccccgcgccgggagccgcggcatggctgcattgtagccgccctagctacacccccacgcgcgccccgggcccccagacccccttggatggggacgacctcagatcccgaggaaggaaggagaggaaggaagccgccgcaggagggggaaagaggaagcgcgggggggaaggccaccagcaccaagcatggccgggactgctgcagaaccacgtgggtctgtttgcaatttacaaacgtcgcgactcgcccgcctgcagcggacaaaagtggccggggccgcttggggcccccatgctccaaggaaggagggtcccggggcggcgcggacccggcgtgtggggctgcagccgtcccggcagctaagaaaggctagcggggtcggcggcgcgggccatgcgtgcgcacacgcgcgcccgcccgggcgggctggccgggggctgcagtggtaggaagggggtggggggaggaggagtacacacctacagagccctcctatcacttctttctctgttttcctgaaatgttgcaaagagggcaccttctgagtgggcaccatgaaatactccatagcgatcggcccccctcctctgcacgagccaggtcccgcgatcagccggagaatgcaagatggaaatccgaatcaaagggcagcgccggacggaggtgcagaatcggccggtcc

SEQ ID NO: 27887 - DNA, 2594 bp, Artificial sequence
  DNA replication origin
gccccggggaggaggagccgtccctcccttggcccctcccctcctgccttccgagggaggagacccccccagggcaggaacgagggggcggagaagcgcgagcgacacatttttgagtcgtgaccaagtggaaactccctccccgaggcggaagctgggggcgccccactggggcccaagcctccgccggggcgggattccaagccaggggcggggcgccgccggtgacccgggccccgcctctcgcccgcctcatgaatatgaacaagccggctggtgagcggaagtgcgaggcggccccaggctggctggctctgccgctgagaggggggcgcgagtccggggggcgtggcctggctcggacgccccgcccctacccccacgcggggcctccttccggccggcgcgccccggacgtgacctcgcgggcgcgcgccgggagccgccagactgggcgccgacagcatcctccgggggtaggcgcccacagtcattctttccatcgctgcggacacgggagtcagaagtgaaacagtcctgtcctcgtggggcttacgttccaggcgcaagagccacaggtagtcgaattgggaaaccgcctcggatgtcacataagcgcccagggaggacagggcaggacagggcctccctggggaggtgacttgagtcaagactcaaaagagggaagcgagggaacaagccatgcgaggaactaacgaaggaacattccagaaagatttcacatcccaagcctaaggtccaggggcagcaggcattgaggcggatgtggctggagtggagagaaagaggaattaaaaggatggagtaatgacaataatggctcacattttttagcaagaggtgggttcactacctatctgtcgttatctggggggaaattaggctctgggaggtcaaataacttgcccaaggtcacacagcttgtaagtggccagaccagcattggaacccaaggggacggatgtctgaaacacacccaggagtcccaaggtgggatgaccttgaccaagacaggccctttaccccttgcctcagtttcatcccaaagagctgcccaaacacagcttaaaatcagggcacagagcaagggtgtagctgagtgtgcgtaacatctgttctcctgggagatgcttttgttgtctgggaagcacttgtcacctctccaggctctggagcaggtacaagtggcttcggggagaaagggtgggagccgggaagaggctgcttctggtggcaggaggagagagggagtgggtgaggggccccgggctggctgagtgctctggagcatgacaaaggcagtgtcagccaggcagctgtgtccgccactagcaaccgcgcaggcagcatcccccgccatccctctgagcctggagagattgaaacacacacagtcagcgtgcctgctgcccaggtgaggtgcagaaggcctgggggttgccagtctgggctctgccgcgagaaagtggcttttctgcagccggaagcggggaggaagtgttttcacccttctacaaagctctgtctctgcctctggatccacggtgctgcaggcctgagggctctcatgggtacgggcctggtgagtaatctagaatttgccccttccccagcctggtgcagcctctagtctcggccttcacgctctgctgtaaaatgaggctgggtcaggagtgggacccatcctccgtgtttgaggagctgggctattacatgagcccctacctgaggtcgccagcgagtcagaggtcctggtgggaccagaccaaaatggaacctactatcgggcccattttgagagggagacagagagaagttaaaagtacatgcacacacagctctaaagtagcagagatggcattcaagtccaaagcctttgactccaggacgggcacagtggctcacacttgtaatttcagcactttgggaggccgaggtgggaggatctcctaagcccaggagttcaagaccagcatgggcaacatggtaagaccctatctctattagcggggcgtgatggcacatggctgtagtcccagctactctggaggctgaagcaagagaatcgcttgaacttggaaggcagatgttgcagtgagctgacagagcaagattccatctcaaaacgaacaatcaaacactagtcttgcccggcgaggtggctcaggcctgtaatgaccagcctggccaacatggtgaaaccccttctctactaaaaatacaaaaatttgctgggcatgatggcaggcgcctgtaattccagctacttgggaggctgaggcaggagaatcccttgaacctggtaggtagaagttgcagtgagccgagaccgtgctattgcactccagcctgggcaacaagagtgaaactccgtccccaaaaagaaaaaaacactagcctcaagccacagccatgtctccaaccttcccggccaggtttctcaaaagagggggctacctgaggtcacccactcctgccgaactccaggtgggcttcctcatcccttgctctatcctaaactgttccttaagtgacagttcacaccctgacgtcttccaagctgagaccccacc

SEQ ID NO: 27888 - DNA, 2190 bp, Artificial sequence
  DNA replication origin
tgggagaaagagcccgcaaatggtagctattatgaatgaagcagcccacagcgggcagagcccagtcacaaggcaggagtgatggagggagtgagatcaggatgacttatcaaccctgagccggtggcctggcgagcctctctctccattggcgctggctggctgagcctacagagctggggctgtctgcgggtggggtgtttattctaggaagcggccctggctgcttctcattccctgccccagggagaaaggagggcttcaagtcagaaccgaagccatgctgggcctggcatgtacaacacagcgccacctgcccgcagggcccagagctgaaaatgcccaggaggtgcagccccaggggcctggctgggacttgcagatgtgagacactcccagggtgacccacctgactccccaagaacctgtcctgcaaagcctaaaatgctcagcttttggaagtctagagactgggtcctgcattccagggcggggacgggatggggcgcctgggctaggggggagagttctatcagaggtggggatgtccctggtggcagcgctgtcacccttgggctccttcatcagaggcttgcttcatggaagccatgtgagctatgcagttgcacagggctggcccttagaagggcctgagtgtggctgaatgttctgctgtcaccgtcttgaaattcttaatcattttagaacatggcccgcgaattttcattttacattacgcagcctgtcctgccttcatggtttcgtttctcctagcatgtagcttctccctcccatcagtgtggcgcacagacccaaccttcagccacatccagcaagacaggagtgccttaggtaagcctcatttcctgaaaggccgtgggagacatgcacctgccaccccaacccagcaggaccaacctttctggaaaacctgaggccggctgtgtgacgtgggtgagtcactcaactgctctgaacttctcggtatcataatattgcacagatccttgggaagtttaaaagaggtagttttgggctgggcctggtggctcatccctgtaatcacagcactttgggaggccaaggcaggtggatctcttggggtcaggagttcaagaccagcctggtcaacatagtgagacacggtgtctactgaaaatacaaaaattagctggacatggtggcacacgcctgtaatcccagctactcaggaggctgaggcacgagaatcgcttgaaaccaggaggcagaggttgcagtgagctgagattgcaccactgcactccagcctgggtgacagagcgagacgccatcgcaaaataaataaataaaaagtaaaaaaggtagttttggttgggcacagtagctcacgcctgtagttccagcactttgggaggccgaggcaggaggattgcttgagcccaggagttcgagaacagcctgggcaacatactaagaccctgccccatctctacaaaaaattaaaaaattagctagttgtggtggtgcatgactgtagtcacagctacttggacagctgaggcgggaagattgcttgaacccaggaggtggaggctgcagtgagccgattgtgccactgaactccagcctgggggacggagtgagacccagtctcaaaaaaaaaaaaaaaaaaaaaaaggccggtcacagtggctcaggcctgtaatcccagcactttgggaggctgaggtgggcgaatcgcttgaacccgggaggcagaggttgcgatgagcccagatcacgccattgcactccagcctgggcaacagagcgagattccaactcaaaaaaaaaaaaaaatttaagattattgcagggctgggtgcgccgtctgacgcctgtaatcccagcactttgggaggccgaggcgggcagatcacgaagtcaggagttcaaaaccagcctggccaccatggtgaaaccacatctctactaaaaatacaaaaattagccaggcgtgttggcgcgcacctgcaatcccagctactcgggaggctgaaggaggagaatcgcttgaacctgagaggcggagcttgcagtgagccgagatcgcgccattgcactccagctctgggcgacagaagactgtctgacggggtaggggaaagattgttgaaggcgctaacttggagggagaggagtccgcccgggatccctaaggacctgccc

SEQ ID NO: 27889 - DNA, 1694 bp, Artificial sequence
  DNA replication origin
cgtgcgcgtcgggggagggggcggcgggagccggcgctgggccgagggagggggaagggagggcggcgcggccgcggggagcgggcaccgggagggaggggtgagggagggaagtggggcgccgagccgcgcgcgtcctcctcggccccatcctcacgccaccccccccccgcggccccgcccccggcccgagggcagcgctaggacacggccgggaggtggcctgggggggcgggggagcccgagacgtcccgccctcggggaagcccgaggagggggccgggcgcgcgggcccagaggaaaagccccgcagaccgggaagatggaggaggtcgcggcggcggagcgggcggggacccctcgcctcctcccgcggggtcaccttggccaggcccccctgcggccccgggcggcggggaaggcggcaggaatgcctctctgcgggccctgatttctccgcccagcccagttccaggaacgcgcaggcagcgcccggcgggcagaggtcccggatcccgatgccgggcggcgcaaaccagttttcggggcccggcgcaacccctcacgctggtgagacggcgggcgactccctgccgtgccctcggtctcagtttccctcacggtagaataacgacgaggcccgatgccgagcaatccgagcttccgcttggttcctagcttggtcccagcatttgggaccacctgcgtccactagcccgagcgccgcgggaggtctagatccctcctggacatcagcaccctgcgcggcgcccgcggccagggcagcgagtgcagtgagcggatacacgcgagggagaagccccgcacccggcccagctgttttctgcctcgtgttgaaccacagactcgcgttcttgagtgtgttttgtttgggctaatcccgtgccccccgccctgttatcttcttgctgctctgctgtatgctggcaaattgtagttcaaaaaaacagccctcctgctgttggacaccccctcttcccagcgcagttggccttgaggagcctaggagacgaaaaaggcatcccagaatcagcatcccctagaggtgaggcatctgacgctggttttaagtccgtcttcattcgtgcatttgatgctgcggtccccgccagagcccgaagcacgtggctcttgatcacaaggcatccatggcaggcacaaggcttggcacatagtaggtgctcctgggctggtgcccagatggacacatagcaggtgctcatgggttatgtggacacacaatcgatgctcattgcattttaagagaatgcacacatagtaggtgctcatgggctggtgcccagatggacacatagcaggtgctcatgggttatgtggacacacaatcgatgctcattgcattttaagagaatgcacacatagtaggtgctcaggacgttgtgggtgaatgcacacatagtaggtgtggactcgtaatggatgctcatgttttggtctaatgaacacatattaggtgctcatgacctgttgtggaaatgggcacatagtaggtgcgcaggagctgtaggttgatacctggaagggatgtaggaaggccgtttgcctggagcaaaggctcggaagttggcgatttggaggtgacctcccccagcctccaccctcacctcaccccggtctcctgagtgtggataatgtggagtgtggccgggtta

SEQ ID NO: 27890 - DNA, 3457 bp, Artificial sequence
  DNA replication origin
cgaagacaaagggcacgaggagcccaagtcacccgccccccagccatcgaactggaagagtctcagcccccacccatcccccagcaggggctgctggggcagatgggaagcccccacccctcagctggaatcacttcccatctccatgccccccaggcccacttagcctggccaccagctaaccagaatcctccagcccatctgggggagtgggggagtggaaggcgagtacccggcctccgtgcctgcccagcctcacccaggggctaagccggagccaggagagaaacctgggtctcctccaggctgtgccctgcagaccctgccaccatcatcaccatgatccctctccagtccctgggatcaaagcagtgcccccacgctggccccccagcagagtactagaggtgcttgttggaagcgcggagtccccgcccccagccacgcctgacttagaattcaccagggtggggcggaggcggccacctcagaaaccactgagaggcagatgtggcccgggagactcgctagggctgtggtccccacacccagggctggcagcaggctggggcagggcgcaagttcccagagacgtgaacccccagatacacatcagggcctcaacccatctctgtggaccctttcatagcccctgggaagggaggcaacttaggcagagggtggagagcatctttcagctggtcccacagatcccctagccagcagggagagggtctcttactgctcaatacacagccccgccaagctggggatgccccctacccctgagaagggcatttatctgggtgaggggaagaccacccaggaccttccggggttcccctgtggtctcagtcacctgctgtgaaataaagtaacaattatagccatgaggagaggaagggattcaggggacacttttctctgcagccacccccgccccaattccacccagcacagggcctctcccatggaatcaatttcctccttaggtgccagagacccctgggcctccccttagaggcaggaaccttcggaggcagcctctggggctgggggtcaggccaggcgacccacaaaagtgcctccccaggagcccccccaagatgccccacaagagctccacatctggtcccccagtcacagctgtcgccaccctccctcatccagagattgccccaaaccctggccggcactggccctcaccccctggtccaagtggggaattcagattccaggcgagtggagcgggtggctagaaatacacatgggaaattgttgccgggaaaacacattcttcctcctatatggctgcccagaccctgagaggattaggtggtgagaggacactcccaccgcccggggccaaggccaggccgggaaggagggtggaggggagagtgggggccttggaaatggggtccaggcctccctccaggccccaagaaggggccctgggagacctttgttttccctccggcctgttcactctcagccctctacttgtcctccctgcaaggggagttcaggcgggggaagaaatcgctgtggctacccagttgcagctgggtttctcagaaacaaaagctttggggggacgcggttcacacgattgtttgcaatgaggttttgggatgtctgtggcatccagttattcatccgggctccaccctcggataattgagagttggcttttgctggatttacaccctctttcctccccctgacccccctccacccaggcttctcatggactctgggagctcacctggtctgaccccttggtttcatagacaaggccgggagaggggaggagtctgacccaaggaccactggaagttggtggtggagccaagacttgaacccagggcaggagactcccaggccaggggctttccccggtcaccctccaagctgtgactgggctccagccaatccccagaagccactgaccccaaaagcagcggtgcctggaagtggggtgactcactgtctggcttcccagggcaccccctccccattggtgagggagggactggcaggtgtccctgtgtagagagccaggagcaaggagagaactccccagggggcctgggccagggtcactcaggggccgaagagccccagctggagggatttaacaccaaaggtcaaaggtcacagacagggaagggcgggcaggcacagggggtcagcgctaatggcagctccggaaaggagggggaggaggaaaggctaagaaaaacagggttgcttccaaggggtccgcacaccccccaaaacaccatcccaagtccctggcactgtctcctgcttggctggctgcagacagggccaagttgagctggaggtgggcagtgaaatgggccaggctggagcttggcaaagggtgtcctgggaggggcctcccaggtgcagcccctccccctgtgcaggccaggccagctaggaggcccagcctgggctctggggagaaggagaagcagagggggaggtccgaggtcacccgggatgggtgtgtgggctgggcctggacagctgtggcactgtggcaccagaatggggcttggggaggggtgacccaaggggccagtttcccctcccctgagcccgggggctggaaggccctccgaagcgcagtgtctctgggcttcctccccagccgcaggctggccccaccttccctccaggatgccaggacacgcaggatggcggcctactacccagggtgccagcctccaagaaccatggcccaggccctttccatggcccagaccaagcccaggccttggccaggtccccagccggcctggctgccccctcagtgtcaagcgttccctccagagccaagatcctgggctgtgatggctgggggcccagggcccctcccagcatcccttccagcttcccaggccccagggcagggctgggcaactccttgaaaccattgcttcccggccaccctctggccaggctgggcgggccctcctggacaggcagacaggctgcacgctgccctgctgtggcccgagtaccctgctgggcagggcagcatgccaaggcctccaggtgccagcctggattccagccccatcccagggggccagcggggaagctgtgcgtgcttctcctccctcgggatgcacctgcctcgccccctcctccacccgctccagacccgccctccggcgagtatggaccccttgccatctcctccctgccaggccggtcgcctgcgtccacccggaccgcaggggagtaacaagtgcctgacttgtcccaaactcccagtcctgaccccccagggacgccccttcccgaggtccaaggaaggacccgggcttgcgaggggcagcaggagggagactctcccggccaagggaggaggcaccttccaaagcccttcctagcagcagccccggcgcggccgagaggaggggcggctgccccggacaac

SEQ ID NO: 27891 - DNA, 1304 bp, Artificial sequence
  DNA replication origin
caaggtcaaggctagaagcaggggctggtctcctgacatagatgcctctttctccctgtcccaggcaagggacccaggaacagagctggacaagggtgtggtggcccctaggaaccaccctggccagctgggatggtgggaagggcccagatcccccccagctccatctcctgccacgccctcccagccctggcccccagccccagatagctgggcaagagcaggcccagcagggcaccgcacacacaggactccagcccatgccctcctcctcagccacccgcccctctctgctcgcctactctggaagaaagcaagtccagaagccggggacagcctccaaagccatcgaggtccttttccttccaaaggggaacacccactggcaggatctgccaggcctggtggctccaggccctcggggcccagtggccctagaaccaagcagggtgaccactaggtgctccggggggtgctgggggaggccggggctggcagggagacgagcaccagcacagggttggggggacttcagaatagggaggacaatggaggcccctacagccttgcggggaggggacatcccagctcagagtcggtctgcctggaagttggggtggggaatgggggctctggatgaaggtgggagtggcccaggggagaactggcccaggcaggccgggacttgctagacagccccaggcagacgatgcagggaaggggagaggcttcttccagacacgttggcccccgtcatgcccttgcagtggacgtggggggcaggagtggagctggggggattcccaggctaaaccgacatttcaggggtcagggccagacagccccagactccagttcccctctgttcttccccgattgggagtgacctcgggccaaaccctcaaatgtctcagagcctcagtttccccccaccggcctccgacgacctcttgactaccagggtccaagcgaggctgccctgggagcgtgctgtgccagcggtggggaccctccatgtgacgggcaggactgttttccggaggctcccggccgggggctgactcagtccactcagcggtctcctggggcctctgctggcttcccacccgcccttggccatgactggaggaaggggccagggctgggtctccgtcccttccccggcagccatctgccaaggctggagtccgtgtgcacgcacatgtgacactcacaggccggcccctccctgcggtgggcactacctggcctctcaagcaccgaagacaaagggcacgaggagcccaagtcacccgccccccagc

SEQ ID NO: 27892 - DNA, 1889 bp, Artificial sequence
  DNA replication origin
gcgcccagggcagcgcccccacacgcaagggcccaggggttggggcgagggctggggttgtcggtggggggtgggggtggccgcggaaccggccgctgcgcggctcctccagctgcaaaaggaactaattagagcggggcgagcgggaggaagcggctgcggcgagggaggaagcgcgcgggggcggccgcggggaccaccgggacggcgggggcttcgggggaccgggccctgcccttcccacccaccgcagggcgggggtcacccggagggtgggctgggcgggccccccgccaccctggccgagacaatggctgctattgtgtgcccgaccgcagcccgagcagacggcccccagctgcagcgctggcggagccacccggccccccgcccgcagtccccggccaggccaggtagccaaggatcccgccctggcaggcggggccggccactgtccccaccctccctactggaaggcacggggcgacccagcacactcagggaaactaaggcccggaaaagacagtctcttccagggccccttggcctggggtgggtcatacaccagagggggtaaaggaccattaggtactgaccacgtgtcaggcccatctgtccatggattcaatgacccctctacaaccctgcctggcagtagctgctgtcattttcccgatctcacagatggggaaactgaggcttgagatcactaggctaatagggagctggttggagtcctgctctgaataaagctccttctaggccaggcgcggtggctgacgcctgtaagcccagcacattgggaggccgaggcaggagaatcccttgagtgcaggagttctacaccagcctgggcaacatggaaaaatcccgtttgaagtaaaaaaatcagccggtggccgggcacggtggctcatgcctgtaatcccagcactttgggaggccgagggcggaccacctgaggtcaggagttccagaccagcctggccaacatggcgaaacgctctctctactaaaaatacgaaaattagccgggcgtggtggcaggtgtctgtaattccagctacccgggaggctgaggcaggagaatcgcttgaaccagggaggcagaagttgcagtgagctgagatcgcgccactgcactccagcctgggcgacggagtgagactccatctcggaaaaaaaaaaaaaaaaaaaaatagctgggcgtggaagcagggacctgtggtcccagctactcgggaggctgaggtgggaggatcgcctgagcctggggagtttgaggctgcagtaagccgagatcacaccactgcactccggcctgtctcaaaaaacaacaaaaaaagctcctcctttcctgcttgggggagggtggctggcaggccctaagcctgtggaggtgcagggtgcactggggggctgtgtgcacccaccctgagaaccacttggtctctttgcagaaggaagcgggtcctctgtaagatggggctgcatccctgccccgctcccagcagcatggggtcaggtgagtgaccagcgtggcagtgttgtcaagggcaatgtgaggaacaccccttgccttggagtgtcctgcgagtgcgcttttggtcagcagtggccatttagctgagaacttggagacaaggcctcaagatgcatctctcagaagtctatgtggtcacctttgttttttttgtttgtttcttttttgagatggagtctcactctgtcacccaggctggagtgcagtggcacgatctcagctcactgcaagctccgcctcccaggttcacagcattctcctgcctcagcctcctgagttgctgggactacaggcgcccaccaccacacccggctaatttttttgtgtgtatttttttagtagagat

SEQ ID NO: 27893 - DNA, 2072 bp, Artificial sequence
  DNA replication origin
ccagcccaccctccgggtgacccccgccctgcggtgggtgggaagggcagggcccggtcccccgaagcccccgccgtcccggtggtccccgcggccgcccccgcgcgcttcctccctcgccgcagccgcttcctcccgctcgccccgctctaattagttccttttgcagctggaggagccgcgcagcggccggttccgcggccacccccaccccccaccgacaaccccagccctcgccccaacccctgggcccttgcgtgtgggggcgctgccctgggcgcatcccaggctgagtgctcgagagacgcggccctgggctctgtgcaccctccacgctgcgctgtcccaccggggggaaactgaggaacggaaggctccaccaggaggcgcagaggggcgtggggccggcgggccttgcgctgcgcccggggagcatccacggggtgcccccacctgaccgagagccggctcctgccctcgggaccccgcagtaattagcacccaggcctctggctgagcttgtccagagccaggctgtcggccttacgctggggagagccacggccacccgctcatgggcactcactcagggttccctggttgcaggcccgctgctccccgctctgggcctccgaggctttcaggagagcaggaacctagctctcgcctgcccccttcacccagccgggaacaaaagcacagagcagagcccagaactggctgctgccggtcggggcgggggtggaaggggaggctttaagcctggccaaggtcagaactgaagcagggtcactgaccgtctcccctctggggtggggcctccattggaggaaaaactctgggtggggagggcctggaacagggatgctgggaggtgtagggctgggggcagctccttcctttcccgggggcagggacgcaggccgtgtgccgggctctggcctgcattggaatgaacccctgcctccctggcaggacccagtggcaggaagtgtgtgggggtgcccctggggactggacctgctgatgaagggggtgcattggagtcctccctctggctttgggccgtgtggctggccccacctggggagacaggctcctcctggggaagtgtcccctgcaggccctaagaacaaggtgactcagggcccctggctccccgagtccccatctgtcctgggaaggcagtggggcaggtgccaaaggatgttgcttgggcagcgctgccagtgagtgtccccgtcagctggaattcccagttcccaaaccatcctgcccttgtggtccccttctccggaagggtgggggtgggggtgaggacagaggctgtggggaggcctgtggccccaggccagccaagggaccaggccaccagcccttcctggctcctgaattcttcatcagcataaatatttacttccttcctccccgtccaggcttccagcacagaggagcttcggggaggctggattgcgcctgtgtctaaaaataaacaggtagcaggacgatagacacacagatagacagatggaactggcaggggttcaggcagagggcaactccctgtccagccagagaaacagtggaggggaccctggtccatccatcactgtcacccacccacctgctagcgggggtgtggtccctaccccaccgcatctctgggagcccctggcccatgcatggcctgggaggcaaattcaaacaatctgacagctccaacaggggcgaatcgcagacctaggtcccacggcctagtgcagctgccctggctctgatgatgcagccttgggagaggtgggcagcccccctgtgctgagacccccgtgtcagccatgttggggtggggtctggggatgtgtccctagaagcagaggatctccagtgaaggggggaccattttatgccctacttgcttggagagtcagggcagaaggggaggacgtgggagctgccttcctgtcctgccctgtggacagcatctctccccactcacaggctatgctagcccccagggaaacacacgggggcatatccaaagtatttcaccatgtagtagttatgtccaccat

SEQ ID NO: 27894 - DNA, 842 bp, Artificial sequence
  DNA replication origin
ggtccagcacggtgcctggcagcagggggagtccatcggggcttggccgggagcagctgctctccgtcctttcaaggggcgtcttgtggccctccatgcccagggccctggtgggcaccgacccacgccccttctccccctcggccttgccaccagctgcgccagcaaggagggagaccacaggcaagcccagtccgccagccccaaagggcgagggcagcagcgggttcttggccagattgagaggcaggacggggcctggcagcccagggcccatgccccccccacccccactgcccccaccgttgccacaggccagggcactgaggtcaagggggccgggggccaggggtaggggtaagccgggcaggccagggcctccaaagagggcagctgggttggggatgatgatctgggccccactgacataggggccgccgtcgggggcgggcagtggcggcttggggggtgggcgcagctgcaggagctcttgctgctcgtgggacacaaagtggccatgggccttgatgtgcttgcgcagtgagctggggtccgtgtagcgcttgtggcagccgggcatcttgcagtagtagggcttgtccacatagtgggtgcgcgtgtgcttaaagcggtcactggagttggaatagcgcttgttgcagccctcgtaggggcagacgtagggcttctcacctgcagggtggtgcagtgcagtgccgccatgaggggtctctccccttcctgggtctcaccccatgcactcaacatttccccgggccaagcactccctgggaacatagatgccccaattctgggggcagggggcatccccagcacatggc

SEQ ID NO: 27895 - DNA, 886 bp, Artificial sequence
  DNA replication origin
gcccccagaccaggagctgtgtcccagcctgtggtcggtcgtccccagccagcctcccccttcctgttacaggaccaaggacccaaaggcctctgcagggggcgctgcccaggccaggcccagcgggggtagaaggaggaagacggggcgctgggcctggccccacatgctccctgagccagggcccaggtcactcagtatcttggcaccacagctggcctggcacctccccttgccagctcaggggccctcggacctgcttcccacgctcccagggtgccccaaaaggtagagggaggagaccctggggtgcaggggtggagtggccagctatcccgtctggtactgcaggcctggcctggggtgaggacggcggctgcagagcgggcctcctcctaactagtgggaggcgccttgtcctggggggcatgcttctacctggggctttgcaggggcctgcatctgtcttgctttccctctggaggcagggtcagagggaaaggggtccaaggagcccccagggcaggggctgggtaagcctaggagggaagggcaggcctctggtccctgggggctcctctcaggaagggggagcctggtgctagcagggagggcagatgccaccccacccaccccctctgctgggagagggcaacttgccatgggtggtcactaggtgagggaggtgccagggtgggagagggaaacgggaggaggtcgggcaggggaaagcctctcagaagctgagggccaggtggtgggggacagacaggagcgaggcttcagcacccaggagcacagctctccctgcatgacaggccaggtccccacccgggggctgggaggccagccatgaatgacctagcaccatccttgctcccggcgg

SEQ ID NO: 27896 - DNA, 1533 bp, Artificial sequence
  DNA replication origin
gaggagggggttctgtgtgagaggagggggttctgtgagaggagggggttccgtgagaggagggggttctgtgtgagaagagggggttctgtgtgagaggagggggttctgtgtgagaggagggggttctgtgagaggaggggactgtgtgacaggagggggttctctgagaggaggggactgtgtgagaggagggggttctgtgagaggagggggttctgtgagaggagggggttctgtgagagaaggggactgtgtgagaggagggggttccgtgagaggagggggttctgtgagaggagggggttccgtgagaggaggggattgtgtgagggggggttctgtgagaggagggggttccgtgagaggagggggttccgtgagaggagggggttctgtgagaggagggggttccgtgagagaagggggttccgtgagaggagggggttccgtgagaggagggggttctgtgagaggagggggttccgtgagaggagggggttctgtgagaggaggggattgtgtgagaggaggggattgtgtgagaggagggggttctgtgagaggagggggttccgtgagaggagggggttcctcctgggctgggctttgcagggtaggaagaatcatgatggaaatactagggctttctaggcagagggactgggttgagccaaaactggcaggagagaaggcagaagggagttcctgcgagcagccaatagcctaggctggcctgggaaagactgggaatctggcggatgacatggaaagatgcacagatctttgtgaaacaaagcgattatatatagacagcacatacaaaggatcttgtgactgcaaagccgtagacgcaggggggtggcgcgggctggaggcagctcggcataggttgaaagctcatgtggcacagccgagtgactttccctttcttcctagtgcttttctgtagatttgccttcagtcaacaagtatcaactgagtccacacaccaggcacggtgccaaacacgttcaattcattgtgccgtttaattctgacaactcaggggtgggggactgctgactggcccgaggacgtaacagcaggtgcctcggaggcagatcggaaacccaaggctggtgctatctgtcacagcagtcactacgcagggtcccggggtctgaaggtagggcacctgggcaagccgacaagtatcaagaacccaaccccgaggccagaggggcttgctccagattccagtggattcgactccagagctggccttgttcagcctccgaggacctgctctttccttaacaggtgggatgtcattatgggccattaggggaatgaacaaacaagtgggttaagatttcaaaagtaggtggaaacttcataacttctggatttcacagcagaaagagcccagagaagaccctcctgtgatcacagcgaggggcagggctgtggctgtactgcagatgagggagggtcagggatgcacctgatgacacctgcggtctcacctgacttcgcctccttcctaaagcc

SEQ ID NO: 27897 - DNA, 938 bp, Artificial sequence
  DNA replication origin
gtcccagctactcaggaggctgaggcaggagaatggcttgaacccgggaggccgagcttgcagtgagccgaaggtcgcgctactgcactccggcctgggtgacagagcaagactccgtctcaaaaaaaaaaaaaaaaaaagaaagtgctaggccgggtacggtggctcacgcctgtaatcccagcactttgggtggattacctgagctcaggggttcgagaccagcctgggcaacacggtgaaaccctctctgtactaaaaatacaaaaaattagccgggcatggcagcgtgtgcctgtagtcccagctactcaggaggctgaggcagaagaatttcttgaacccgggaggcagaggctgcagtgagccgagatcgcactactgcactccggcctgggcgacagagcaagactccatctccaaaaaaaaaagaaagtgctgtcggaaggtatacatgggagagcctggaaagggtttcacccgggggatggggaatgatattaggtcctgagggatgttgggttttgacaggatcagggtagaagggaggatgttcaaggtggaggaactcagaacagcaaaggccctgaggagtacagaagtatgagagcggctctaggagcagagggtgtggctgcagcgtggagagaggtgaggttgagaagttgaggccagaccaggcgctgtgaatgccaagctggggagtggaccaaatctgcaggcggcggtggagaattgtgtgtttactgggagatggccagaaccctcccgcagaagggttaggaggcgcttggaaaccctgcctggggacatggagttcatgagacagcagattgggcaaagctgcaacagccatattcattcagatgcaccaggggcacttactgcgccagccactggccaggtccctgatgttgtggcacgtgctacagttgtgg

SEQ ID NO: 27898 - DNA, 760 bp, Artificial sequence
  DNA replication origin
tgggcggatggctggatggatgaatgagggggtagggagagatcgatggatgagttgggggtaagggggagatggatgcaggggagggtgaggggggtaggggagatggagggatgttttgggggtagtggggagatggatagaggggtgggtgaggggttggggggagatagatgcaggggtgcacaaggggctctgggggagatggaagcaggggcggtgaggcagtcaggggtagatggatgggtgagtgattagtggaggagaaagagtcaatggggaacccagaggtggaggggcaggttaggatgtggctgcggtgccgggccacactaggcctcgcctacaacccagaacagagcaggggctacgtgggcgccttctccctgccccaggccccttcagctctgaaacacctgcttcagcccccaaacccccttgcagccaaagtgagcgccagctgctcctatatgaagctgaggccctggccggcggacccttggcagtgttgggcctggacgtggctccctcaaccctgctgcccagctacgacccagacactggcctggtgctcctgaccggcaaggtgggctgggctggagggcgggatggcaggtgagaggtggtggggggaaggccagtgttgccggagggttcccagcctgccttcttccccgcagggcgacacccgtgtattcctgtacgagctgctccccgagtcccctttcttcctggagtgcaacagcttcacgtcgcctga

SEQ ID NO: 27899 - DNA, 1267 bp, Artificial sequence
  DNA replication origin
gagaggcggggccagcagtgtggagaggtggggccagcagtgaggagtggcggggccagcagtgaggagaggcaggaccagcagcgaggaggggtggggccagcagtgaggagaggggggccagtggtgaggaggggcagggccagcggtgaggaggggccgggctagcattgaggagaaggggggccagcagtgaggagaggggggccagcagtgaggagaggcaagaccagcagtgaggagaggcgggaacagcagtgaggaggggcggcgccagcagtgaggaggggcaggagcagtggggagaggtggggccagcagtgaagcaaggctgtctctcatatcccttcctgcccccagatcttcagcctggcctggagtcctgatgggcagcagctggccactgtctgcaaggatgggcgtgtgcgggtctacaggccccggagtggccctgagcccctgcaggtgagcacacaggggctggggagtggcctcagacctggttcaggggtgctggctgggtgtcacgcgatgtatctcaacaggaaggcccagggcccaagggaggacgcggagctcgcattgtctgggtatgtgatggtcgctgtctgctggtgtctggctttgacaggtgaggactcaggcatccccatccccaggcttcagaagccacctgtgtcccccttctccacagtcacatacatttgtcaggctttcagaaaccattcctgcccctcactggatggttgggtgggtgggtagatgattggatgagtgggtagatgggtggatggataggtgggtgaatggatggatgggtggatgaatgaatgtggggatagatgggcggatggctggatggatgaatgagggggtagggagagatcgatggatgagttgggggtaagggggagatggatgcaggggagggtgaggggggtaggggagatggagggatgttttgggggtagtggggagatggatagaggggtgggtgaggggttggggggagatagatgcaggggtgcacaaggggctctgggggagatggaagcaggggcggtgaggcagtcaggggtagatggatgggtgagtgattagtggaggagaaagagtcaatggggaacccagaggtggaggggcaggttaggatgtggctgcggtgccgggccacactaggcctcgcctacaacccagaacagagcaggggctacgtgggcgccttctccctgccccaggccccttcagctctgaaacacctgcttca

SEQ ID NO: 27900 - DNA, 782 bp, Artificial sequence
  DNA replication origin
agggtcctgggtcccggataggggctggggagcccagaggtcttgggctcagcaatgatgagcccctgtctgtcctctgcagctggtgaggacgccaggatccgactgtggcgggtacccgcagagggcctggaagaggtgctcaccacgccagagactgtgctcacaggtcaggcaggctcaggaatggggctggggtggccagtgtctcccaagggctcctgatcacccctgccttcctccaggccacacggagaagatctgctccctgcgcttccacccactggcagccaatgtgctggcctcgtcctcctatgacctcactgttcgcatctgggaccttcaggctggagctgatcggctgaagctgcagggccaccaagaccaggtaggacggctgcagaggtggggccagcagtgtggagaggcggggccagcagtgtggagaggtggggccagcagtgaggagtggcggggccagcagtgaggagaggcaggaccagcagcgaggaggggtggggccagcagtgaggagaggggggccagtggtgaggaggggcagggccagcggtgaggaggggccgggctagcattgaggagaaggggggccagcagtgaggagaggggggccagcagtgaggagaggcaagaccagcagtgaggagaggcgggaacagcagtgaggaggggcggcgccagcagtgaggaggggcaggagcagtggggagaggtggggccagcagtgaagcaaggctgtctctcatatcccttcctgcccccag

SEQ ID NO: 27901 - DNA, 1285 bp, Artificial sequence
  DNA replication origin
gcccgccgggcggcccaggtgaccgtgtggggctggggccgcggtcccgcccgagagtgcgtgtgtgcgcgcggcggcggtccccgcgcgtgtgcacagcctggccgtggcgcccccttccccgcccgcagccccccagccccacagaaactcaccgggaggcggcggcggcgcagggagccgggcggggcaggccgcggcctcagtctttcctggcgggtcgggcccgagggggtcctgggtcccgaagcaactgcgttcgagtccgcgtccacccgccccgggctcgggctccggagtcggctcgctggaggcaggtcgcgccttaagagtcccggggggcgggcccgccgcggcaggggcggggcctctccccattggccggggcggagccgcgtggagacacgccccttccccaccgaggggctcgtgggccgggttgccctggccctcaccctgcggccacctgacctgcgcggggagaccttgcccgtcgtgggtttgccggatgacactgggcaggtttctgctttttgtgtaaaaagcgagagactatttaggaatcctaagcgtcacagcccagatgcctatgaggcaccaggcaggtgacaaatgccagaagtccaccccagggcctctgcggccctggagaggcaggatggcgggagtggggctggtaagggctgagtcctcatgaccagcccgggccagctagagctttggatttttgaagagaaactggaaatccagatttttaggtgaaatctctcaatgtgttattgttggtagctaatcccaatttcaaaaaactcctggcagcccacacaaagccctttcaagagcctcctaagtataaactccaatgccaaatctgagctcagggtcctcttagccacgacagccttaagagttgtgagcagccctggactctcttccccaccatattatgagatgaaggggctgtgtcagggagggcagtggtggtctgcccacggccccacagttactggcagcttcaagcctgagctgtggaggcataggggtggtcaccgtcggtgggtggggcctgggctgcagttgacagtggcccttgattgggcaggaggggcgggtgccaggggccggactagtccagaaaaatcccctgccttggaggattccaggaaaacactctgccctcctccccctccgcgtttgtggtcagtcatgcctcagagcctttgggggcccagctcagctcctgacttccggagagccttgggacacccacaccccctccagcccg

SEQ ID NO: 27902 - DNA, 2855 bp, Artificial sequence
  DNA replication origin
gccgcagggtgagggccagggcaacccggcccacgagcccctcggtggggaaggggcgtgtctccacgcggctccgccccggccaatggggagaggccccgcccctgccgcggcgggcccgccccccgggactcttaaggcgcgacctgcctccagcgagccgactccggagcccgagcccggggcgggtggacgcggactcgaacgcagttgcttcgggacccaggaccccctcgggcccgacccgccaggaaagactgaggccgcggcctgccccgcccggctccctgcgccgccgccgcctcccggtgagtttctgtggggctggggggctgcgggcggggaagggggcgccacggccaggctgtgcacacgcgcggggaccgccgccgcgcgcacacacgcactctcgggcgggaccgcggccccagccccacacggtcacctgggccgcccggcgggcaggccctgtacgctccctcccccgccgtcctggggcgccgacagccccgcggccggccagggtgcgcgcctgagtgtgcggtgagcccgcgaggctgcaagcagacaaaataaacaccccgtcccatgcttcctcctcccacggctgggcctccggcatgaccagttttatgaatcaaacccctttgagggggatagccaagccacaggcttgggtcacttttccctcctggggtccggcagtaggtgctgctgtgcagaagggctgcccggggtcctctggacccttgtcactcaaagcacagctgggggctacagatatgcagccctagggaggggcggggagtggctggtgggcgtccgatgcccatccctccaggtgggggatggacctgtactggccagggcccttagagcttcgggtatcaggcagggtgccgggtctctgcctctgccagggaaggggctttgcttgggctgcaaacccagtggcctggagccagcctagtcctttgtgtccctgggctggcagtgctggggcctgaggactgctgaggtcccctgtggtcactggcaggccagccgattggtgccaaccattctgcctctcccccattcgttaacgattgccacaccagggtcactgaccgcctcccctgctgtggcccaggggtggagtgtgcagggtggaaggaagaggtcctgggggtctaggtgtccccatgcctgccttttgcaccaaggacaggtgaggctctggagagaggcagcgggacctagagcccccttccccaggctgagagcctccagggctggggattggataaaatctccaaggtcccttcacactagactgtactttgggtgttgagggcatagaggggtggccgggctgggaccttccaagcagggtccattagggccagtccagggggcagcaaagtccaggatgggcccagctattgacaaaaacccaacagagctggggcaggcgggtgggggatggggagcagtcccctgagtttactctcttctcccaggggagttggcctggagcttctgtaaacagagtgtcagaggcaggaagaggctctggtgatgagcagcccagctggatcccctccagaccattatctagcctcccctgggcctggggagggaggatgcgcacacacatgccagcctgggggccgggcactgcctgtccccaccccgcccctgtctcctgcacgttggaacagctgtcctgctacctgtgggtccggagggtcagatggggatggggctgggggctggggtcccagggcatttgtccagatggcacctctctctccatattctgggaatgggagaatgggattcagcataaggagcctctcagacactgcccagacctgtgcttacccgaggaaggcccctctggcacgcagcccaggggccagggagatggcaagggagatgccccgggcaggagatgggtccgcggctcctagctcccattactgtcacccccactgacagccccgggggagctgggacaagtcccaagtacagaaaattaagtccttgcctgggcttataagtgggtcccaacacaacactgggcagcctctgggaacaagaaagcagggccctgctgagcccaggagggagctcccacctcagcaggccagacagccagtcctgccagtgagcagaggtgtgtagaggggaggctgcccacagggatggctatccctgaccactggccagccctgagctcatgggagggcagcaaggccacctaactctgttagtgacctctcctggaccccccatcagctgcccttagagtcccctccctgggctggggagcccaaggctctgtgctgccaagaaaaccagctcccctcactgctgtggaatttgcgtgagttcttggagaagggggagggtgcacgtgtgtgtgtgtgtgtgtgtctgcaggagcactgcccagtgggcgtgtgtctggcgtgggcgtgtctgtgtgcgcgtgactggagcagggctgtgtatttgggggtgggtgggggtgtttgggggagcctgcttgcaccaggaggggcagggcctcagcctccttccttttatcggtttccacattccagagtcagccggatcgctttccctccgcgctgggccgccggcctcccccgcttttcctcattccagcctccctgggtgtgaggaggctggaggaggctccctcaggccacctcggttttgggcagggggtgggggcaggcgaggggccagttattcttcagggttcgggacggcccccaccagactcttcgtggggaatgcaataaggttctgacattcctcaggggctgcctgagagatttaattaaggagggaggagggagccg

SEQ ID NO: 27903 - DNA, 1411 bp, Artificial sequence
  DNA replication origin
gcaggagcactgcccagtgggcgtgtgtctggcgtgggcgtgtctgtgtgcgcgtgactggagcagggctgtgtatttgggggtgggtgggggtgtttgggggagcctgcttgcaccaggaggggcagggcctcagcctccttccttttatcggtttccacattccagagtcagccggatcgctttccctccgcgctgggccgccggcctcccccgcttttcctcattccagcctccctgggtgtgaggaggctggaggaggctccctcaggccacctcggttttgggcagggggtgggggcaggcgaggggccagttattcttcagggttcgggacggcccccaccagactcttcgtggggaatgcaataaggttctgacattcctcaggggctgcctgagagatttaattaaggagggaggagggagccggcctacaccgggaaggggctggggcggccgctggggcccctgctggccctgggccccgagcccggctgggcattgagagcagtgcgggggcagggttgtggttcagtggccaggtcctgttctgcctccctgaatccatcccgcctgcccattgatcagctcacagaccccaggggcgccatttctgccacgggttggccaagaaccctgggtgattgtggggggttcggcatggggagcttgagaagggcaagaccccttccagggccacttccttctcagacccccaggcccaggaagcttagggctggcggccttccttggtgactaaggtgttcttctggcaagttcagggttaattgcaggttagggccttactagatgggtgcttgcccctgggtggggacagggcagtgaggaggccccgtgtgagggcccagccctggtggcatcacacctgccgcgtgccgaaagtggcatctggactggcccatttctagttgggctgcagccactgcacagctcccagggccacaggtgtcctccctgacaggttgcacctcttgtgactacgatggcacgtcccaccgccccaggggctcacttgagctggggcctggccttagtcactggtctccctgccctgggctaacaggtctggcagctgccaagtcacccacggtgctactgaaggcacccacctggggccgggccagcctcctgggtggagggaggagggaagaccctgtgcctgcccctctcccagccctgccagctggtccacacctgctccaggatacagagcctcctccctgcacaggaagacgagctgacatcctgactgtcccctttgcaaccctctgtcctggtgttctgaaccctggctgtgcggaggactcgctcaaggagcttctccaaaatacagctctgcctgggtctcactcctagacattctttttgtttttgagatggagtattg

SEQ ID NO: 27904 - DNA, 977 bp, Artificial sequence
  DNA replication origin
ttcagcacaggacttcagggaggggccctatgagtaaggaggacaaggcactcgtcatctcaactcccagggggacgcccacccacctctggggtacaccacacacgcccagggtcaggcggggacgggccaggggatagcatggctggggtgggacccaggcatctggtgaccacatcagcccctggcgagaacatctcactgattctggggcaggcggtgtgcctgctgagtaggggacaggcttggacagacagatagacagtctgaggccagtacgcccctcctgtgccgtatgcttcagcgtgggtgcaggacaggcgctgcaggtctgaccctgagactccgggcccccgctcctcatgctggcccgccaaggctctgtgtggccggtcaggcctggcagcagcccagccccgggagtctgccaacccctccaggcaggcgggactgtgccggcggccaggacggctggctccagtttcgctgacgtgtccgaggaggctcagggcccggctgggtccgccccgtctccccttccttgggacacagcagtcccaagggcagggcagagaggtcaggggtcgtgggccctcacagaaggggcagagagggctgggcctcgagttcctcagggactgcggcaggtagaccctccctataggcgcggggacccctggctggtgattgagcgggggtccccatgggtgtcagcctctttcttactccatccaccaccccaagctggcgctcttcattccacagataatgccacagccaggagctcagtcaggcactcacacgctttgtgacctcatccaagcaagctcccctctctgggcttccgtctcccacctgtgacgccagggctttgcccgccgggctgcacatcagaatcatccaggaagctttctaaaaaaaacctccatgctggggccccacccccaggccaattaaacaagaaattctgccgggca

SEQ ID NO: 27905 - DNA, 1392 bp, Artificial sequence
  DNA replication origin
aatgtgcggtgagctcttttgcctgagccccaattctacccccacatcaaagggaggagggaggaggcagcgctggagctttggaaaaccccagagtttgtaagctacaggctggcagctctgagggcaccgccagggactcctggcactgagaacccatcagccagccccgagaggaacccagcgagggaaggctgactgtggaggggacggtggcaggggacagaggccagagttcctttctcaactgtgggcctcagtttctcacctctggagttggtgcaagcagccctgccccctcaccctctggagttgtagttttctgttgttctgtttgttttcaaatggggaagttcttttaacaagttctgggagctgtcccgcccgcctggggtctgggcgtgtgcttggtgtgtgcgtggggctgggggctgtctacaggtcacacggtggttgccgccgcccacccaccctcccacccggtgatcccaggacctgggctttgatatttgatcactagtcaggcagggaggtgagaccttttcctctgcctggtgcaggaggtgttccggaggcagccctgggattcctgggattcggggacgtcggggggtgggaagatgacgcaagggtctggggcctccgtcctccacccaagttcctcagccttgctgagtgctgctgccggccttgctccctccctggcacagtaactggcatagggcgacagggtccacagcccggccacgacccctacctcagcccccattgtgcagtgggcgctgctcgtggtgctcgtggtgcctgtgtctggggtgacttggtctgtgctcggagcacttgccaagtggtcggtaaacattcactgcggagggcgtcactcataaacgcagaactctgcctgccccctgggcgtgggtactactaagggagagggtttcaggccagctttacacagatcagacatccccacaccaaggctgcccttcaccctgggggctggggagcgggggtggggtatctctggttctggaagggggcacgtggtgggtgagctgtcccttggcggccccttcagcacaggacttcagggaggggccctatgagtaaggaggacaaggcactcgtcatctcaactcccagggggacgcccacccacctctggggtacaccacacacgcccagggtcaggcggggacgggccaggggatagcatggctggggtgggacccaggcatctggtgaccacatcagcccctggcgagaacatctcactgattctggggcaggcggtgtgcctgctgagtaggggacaggcttggacagacagatagacagtctgaggccagtacgcccctcctgtgccgtatgcttcagcgtgggtgcaggaca

SEQ ID NO: 27906 - DNA, 964 bp, Artificial sequence
  DNA replication origin
aggactccacatgcatcccccactgcagccctgaagtgtcccagatactcagatgaagaaaccgaggtgtgagagcaaagtcactgtctgcggcctcacagcttggacacctctgagcacagggccgcctgcctggagtgagcgctcttaactgtgaccttaaacgaggcccaaggggagctgcggccacagtggtggccaggctggccaggctggccacgtggaggatcccctcccactctggaacctggctgcatccttcctgaccctggtctggccctgctgggagggctaattcaggcagaggtggcctcaccccccatatggacatggggtgggtgggggtcactcacagcccacatctggaggccaggccgcacccgccgtcctctgagtcagtgagggtggagcgggtcccatgggggaagagaaggctaggggtgtggccccagggccttaggtcatcagacacgagcccccctggggtgggctggccgggccagggacgcgtgcctggggtttggggtgctaacttcttccagtgctcagtgccaggccctcctgggctgttcactcagcagacctgagctaagtgggcctggagacacctatggcaaaggcaggctgggtctcaccttagggaggtgagggggcacacgacagcaagggggacaccgctaggttggggaggcttagcctgctggcctctgaagggtgcttgttgtcgctaactggctaggggctcagggtcggtagctcctaggggagacgactctggcagtgcgatactacacgtgggcagggcctgcgtgggcccaaccccggggacaagggcttcttccttcacctcgagctacccgcagaccccagtggtcacctcaccagtgacttgtctaatctgtcctgggaccacctgctcctcctcacattccaggaacccacgtacctgggggagagggagccc

SEQ ID NO: 27907 - DNA, 1120 bp, Artificial sequence
  DNA replication origin
gtgccaggccctcctgggctgttcactcagcagacctgagctaagtgggcctggagacacctatggcaaaggcaggctgggtctcaccttagggaggtgagggggcacacgacagcaagggggacaccgctaggttggggaggcttagcctgctggcctctgaagggtgcttgttgtcgctaactggctaggggctcagggtcggtagctcctaggggagacgactctggcagtgcgatactacacgtgggcagggcctgcgtgggcccaaccccggggacaagggcttcttccttcacctcgagctacccgcagaccccagtggtcacctcaccagtgacttgtctaatctgtcctgggaccacctgctcctcctcacattccaggaacccacgtacctgggggagagggagccctatggacgggtccccccagcctggggcggagtgcaggctgggtcggggtcgtgttccctggactacctgcacagcctgtgtgggggaaggggaagcccggactccagcacaaagggctcttgtgtgagctgcaggcgccactgggcaggatgcttcctggggatgggctggcaccccgtatgaggctcagggacttctaggggtgccaaagtggggagggctcttcctggggacggccccagcggtctccccaggagtctaggtgatgggggccagccacagacctgcctgacttgggcagtgcagctaagatctggagcctggagcggctggtgggagcccccgcccccagggccatctggagggcacgcacccttcacaggtggctgctgcacacctgggctctagctcggacttgctggcaccgcaatggcagcgagtccctgcacctccatgagccctgctttcttctgtctgccctgacgtggctgctggggggctacctgaggtgacggtaaacacttagtgttccttcgtccttcccacttcgctggcacatgggaaggacttgcaccatcactgccaaggggatggctgctgctcatctttcttggtgcccagctcagggcagaccccaagaaacagtagacgaagccgggcacggtggctcatgcctgtaatcccagcacttttggaggctgagg

SEQ ID NO: 27908 - DNA, 2057 bp, Artificial sequence
  DNA replication origin
acggtgggcagtcctggggctgggggacaggccctacagtcggtggggcagtggagggcgggctgggggcctcagtggccggctctgtggggctaagccaggtaggagccaagctagaagacaaggctgtgggctcccgcaccacgggcctcgtggtgggcactgtggctgtggtggtggtggctgggcagccaaagtcggcgtagtcaagctccaggagcagccggccagcgttcttgggcgggaagtggcagcgcgtctcctcagggctggccagtgtgacgtggctctcgcgcacccaggggccaaaccagctcagggggcacacgcagttgaaggggttgcgggcagctgccagcagccgcaggcgggggaagaggcccgagaggtcgccaggcagggcctgcaggcttaggttgctcacatccagctcctgcagggcagccaggccggccaggtcctcgggccgcagctgggcaatgcgggtgttgccggccagccgcaggcgcgtcaggccccggaggcctcggatcacaggtggcactcgctccagctggttgtcggacacatccaggtcgtggaggttgcgcaagcggctgaagagcccctcgtccagctgctgcagccccagaccagccagccgcagcgcctccacgttggcagtgtccaggatgccgggctccagggccaggaggctgttgtggctgaggtccagcagcagcaggcggggcaggcgcagcgggggcagtgcccgcagctcgttgtcctgcagcttgagctccaggaggcggtcgagcgtgtcgaaggcaccaggctggatgtggcggatgcggttcttgcccaggtagaggcgctcgaggcgccgcaggccacggaaggtctcattggtgatttcatgcagcctgttggctgtcaggtccaggttgctgaggttggcgagtggctggaagaccccgctgggcaggctggcgatctggttctgtgacaggtccaggagctgcaggcccggcaggccggcaaagctgcctgcgtcgagcatggtgatgccgttctcaaagacgtacagccccaccgtgtcgggtggcacgtctcggggcaccgtggtcccctggcgggcagtgcagaagactgtctgtggctggctgcactggcagccggatgggcagccctgcaccccaggccccagggccagtagcaggagcagcggcagcagcagagggaccctggagcacatcttctgtccctgggagcagagaggaggcagagacagaagactgtgagtcaggggcctagaaggcagacacgccaggaagagccagagggaattcactgcttctgcccccaaatgcaagagaacccaatggttatgagtcaggtcgccagtgccccgacccaggttctgtcccagccccgtcactccctcactgtgtgaccttgtcaatgcacacagaggtcatcatggggcatgacatccactgaacgtgcagtgaccatgcactgcttcctcctgaaccccaggccctcctgcctctgcctaggtaggttcccccatcccctgcctcagagatggaccaggaaggagagaatggtgggacttggagcggcagctcctccctacagggtctggaagagggggcaggcaggcagctgggtgggtgtgtaagcagagaagctggctgccttggccgccggctcctgctgccacgctccgtgtcccgccctccttggaggagggaatgcagcgggaagacttcacatggaaactatgggatccatgtttttccacttgggcagtcagacctgcttaggctgggggctgcgggccgccaggaagtggccggcgggaaggttcctggaggaggggcagaggccacaggcattggcaggtgtcccctgtgagggagggaggcggggagctgaggctggtgacagagctggagctggggggccacagggctcaggtggggacactggctacatggcagccccaggggcagtgccaggcctgggaaaactctgcagagtcattcatctacttttttttttttttttttgag

SEQ ID NO: 27909 - DNA, 1396 bp, Artificial sequence
  DNA replication origin
acagcatctcacagatgaggagaccgaggtccagagggaacagggcccagctgtggtcacacagccctgtctgcacacatccccgaggttgggactgagaacttacgtggtgtggcagcaggagggggctggccatctcactggctgagagcccggccccagctgccctgtctctctctggcttagatgtagggctttgcgtggaggggtgactggaggccaggccctgggaagcccatgagtggcacctcacactcagacccgctgggcagggcctctccaccgccctctgttgccttcgggcctggctccaaggggaccttcactccctccagttccaggggcccagcccctggccccacctgccctttgtcctgagccgctgctgccatggcccgcccccgccgcacacagtaggctgcccccaccgcagccagcgcggccaggagcaccgcggccagggcgggcgcaatgaggagcggcaggttgccctcgcgggcctgggtgactggggcgtggttggagtggacggctgggggtgtatgggcctccccgcaggcctcctcgccctccggcacccgcccgggccccaaaggcatgacacagacggagtaagtggcgttgggccgcagctgggtgaccgtgtactcagcgagcgaggcaggcagtcgcagcgtcaccagccgcttatcagggcccgataggttgcgataggtgagacggaggctcctgagctgcacggagctcccctggaggtagcgctgcagccccacgcgcagggaggtggggctcaccggctcgatgcccagggtcagggaccgtggtggcctcggcgtgactggtgtagggctgggccgtgtcccctgccccatctggctctcacagtacaggcccgtgaagccttcggggcacaagcacgccaggtggtgccgtgtccccaggtggcatgtgcccccattgaggcaggtggacggtgggcagtcctggggctgggggacaggccctacagtcggtggggcagtggagggcgggctgggggcctcagtggccggctctgtggggctaagccaggtaggagccaagctagaagacaaggctgtgggctcccgcaccacgggcctcgtggtgggcactgtggctgtggtggtggtggctgggcagccaaagtcggcgtagtcaagctccaggagcagccggccagcgttcttgggcgggaagtggcagcgcgtctcctcagggctggccagtgtgacgtggctctcgcgcacccaggggccaaaccagctcagggggcacacgcagttgaaggggttgcgggcagctgccagcagccgcaggcgggggaagaggcccgagaggtcgccaggcagggcctgcaggcttaggttgctcacat

SEQ ID NO: 27910 - DNA, 992 bp, Artificial sequence
  DNA replication origin
gaaggcttcacgggcctgtactgtgagagccagatggggcaggggacacggcccagccctacaccagtcacgccgaggccaccacggtccctgaccctgggcatcgagccggtgagccccacctccctgcgcgtggggctgcagcgctacctccaggggagctccgtgcagctcaggagcctccgtctcacctatcgcaacctatcgggccctgataagcggctggtgacgctgcgactgcctgcctcgctcgctgagtacacggtcacccagctgcggcccaacgccacttactccgtctgtgtcatgcctttggggcccgggcgggtgccggagggcgaggaggcctgcggggaggcccatacacccccagccgtccactccaaccacgccccagtcacccaggcccgcgagggcaacctgccgctcctcattgcgcccgccctggccgcggtgctcctggccgcgctggctgcggtgggggcagcctactgtgtgcggcgggggcgggccatggcagcagcggctcaggacaaagggcaggtggggccaggggctgggcccctggaactggagggagtgaaggtccccttggagccaggcccgaaggcaacagagggcggtggagaggccctgcccagcgggtctgagtgtgaggtgccactcatgggcttcccagggcctggcctccagtcacccctccacgcaaagccctacatctaagccagagagagacagggcagctggggccgggctctcagccagtgagatggccagccccctcctgctgccacaccacgtaagttctcagtcccaacctcggggatgtgtgcagacagggctgtgtgaccacagctgggccctgttccctctggacctcggtctcctcatctgtgagatgctgtggcccagctgacgagccctaacgtccccagaaccgagtgcctatgaggacagtgtccgccctgccctccgcaacgtgcagtccctgg

SEQ ID NO: 27911 - DNA, 2045 bp, Artificial sequence
  DNA replication origin
ggtgtcctgacctgggtgccatccaccctaggcttgaatgaggtgaggctgggcccaggtgggagcagggctgcctctggcctcggacaagaacgggtcagggagcctcaccttccccaggccctgtcttctgccagcaggggctctggcccatgtgcggctgggagaggcttgtggcacatgtggggccaggtgagtcccttgtgggttggtctgatgggcagttcactgcctgctttcctccagggacagggccctgggctctctcattccaggcctcatggatggtcccgggagcaagtggcctccgggaccttctctacagcgtcccgggagagccaagcggtttgcatggccccagccccatgccactccactgcccaccatgggcgcagcaggaaatcctgctccctgcctcctgcccctggctacagcgagggctctggtgggaggggaagtgtgaatcatcaaaggcagggaccccatgggtggggagaaaggggccgagccccagtgagcaggacaagctgggggacaggaacaaagggcccaggttggcttgcagacggtgccaggattggtggccttgggatgccccctcagcccctgcattagggatgtgcccaggctttctggaaaccctagaagtgggagcattttccaggaaggctgcatgctgaggtgggggcagtgatgctgagtgcagctgtggcctggactgggtgcagggggcttggggacagtgatggacacacagcaccttttcctgttaccctcagtgggatggaggggaggggacccactgggctgccgctgcaggggcacccagaacatgctggagtgagcctcctgcagaccccatgccactgtcccacaggtcatggccccggcccccagcactcaggctcacccctggtgggacagagtcagcccagccagacccagggagcaggccccgtggcgcgggtgttgatgtcagtgccgagtcaggcccagccacgcgaggctctggattcaattagcggctgctgagggctctggcacgaggagggaggaggcgggccgtgggtcatggcgggcagtgggtggtggcagtgggcctgggtggggccccttcttcctgaggcagcggcggcagcccaggtggatttcctgtaggcctgggtcccattaggggagtggctgcggccaggcctgcctcccccggcccgtggctgcatcgtcaaaggggcctttgtgggcctgaggctgctgctgaacacggcggctgctgaagaaatgttttcactgcaaagcaaacctggccgagtgggatggtggcagggggcagtggcgggggggtggcagggcccaaaaaaaggaagccttccctggaacagtgtctggagtgtgccatcagatcagggcttcggggaaggggagaacccagccagggggcgaccaagctgagatgcagcctcgacccgggacaagccccccgactctaggccagggaccaggggcagacgtgggggtgtgcgagcccccatcaccaggtgctgactgcagcaggccctgggccatgtgggtgacacatgctcttgtttcatgcccggcgacctcgtctattgaaaaggagtggccacagggagggaagacaacatgctcacagtaagtggagacaggaccccagcacctgctccccagccacgggtggggctgccggccacgcgggagggcttagggccactgtgagctacagaagcaatacaccctacttctatgggggtagggggtgatacagttcacccagccccctcacaggcattcacacactcatccccgctcaattcacacccagaagcgtggcacccaagacaggtgtatctctgcatctccaagaccaaagcatgagctgttccttcagtgcaggctgccagtccctctcgttatccccccacctccaccctgcgccaagcatggtaccaagcacacaaagtgctgggcagccctccgtggaggctgcctgagcacagacaggaccttggtgttcgaggctggcctgg

SEQ ID NO: 27912 - DNA, 881 bp, Artificial sequence
  DNA replication origin
aatgcaggggaaaaccaagtgaattcccgctccatgtgcagcccctccctgagagatgagtagcctccctgctactaccaagttccaggctaagtgctggactctggggcctggaggttgtcacgggaaaccgcggggaagaacttagacctggtcatggaaggacaaacagagcttgtgctgggaaggcaaaggcattcgaggaaggtaaaatagcatgagcaaagaggtggagaaaggaacttgctggtgtgtggcgttgggggaggagaggccacgtgaggaggcagatggtgggaaccaagggggccgtgggcacacgcatggctggcagaggcgggggcctgtctggagagggcctcaaaagccaggtctccctggtctgcctcagcagggccctggttttatgccgctcctggcaaagccctgccagctgcagtttaccaagcacctgctgcgtgccaggcgggcaccaggtacagtccagggactggctcttaaaactccactactccacacctcggattcagagggatggcgagggacagagagaggaggatgagagacagaagacagagaccagagagagaacagcgagggacagcaagggatgagagaggacagagtgggacagaaacagagcacaatgacagagcgggccagagagagcaagtagagatcaaggacagatacaggggacagcaggagacaggcaggacacgagcgacagcaagcgacagaggctctcaggagatgaagggcaggacacgacatccagcagtcagggctgctcctgccccacagaggtgcagagaccgacagcccgagtccagatgccaacaccaccactgaccagctatgacgtgggcaagcccccgagc

SEQ ID NO: 27913 - DNA, 1597 bp, Artificial sequence
  DNA replication origin
tgccctcactgcccgggacctgactgtgactgcttctctgcagagctggcagcccatggggacctggtgcagagcgccgtctggagccgagatggagccctggtgggcacggcgtgcaaggtgagcaggcaggtggggatgccctgtggggctctgtgcaggcctcctgggctgggaccccctgggctgggccttccaggcttgttgtttaggaggcagtggagcactgaggtcaggatggtcatctgtgtgccctgccccctagctgctcctcacacccccgctcacctacatctggaagcccctaccttgcctaggcccctgtcagatgagagcccacgctggtccctggtttgcgccctaatgtcgccaccctcaggcagcctcctctggccgcctgtctggtctgtctgaaccgccagcctttctgcaagactcttgttaagcagcattcggccgcaggtgctgggccaggccccagttgctggggaggtgacttccgtcgaggacagtacagacaagaggacccgtgacctgggctctgcaagagggacatggtgctttgagctggttggacaggccagggacgcgtggcctcaggcagggatcggggccaggacaggcaggtgcggggcaggcgggtgctgggtggtgagtaagggttgtgcctgttgccgtaggggtaatgggaaggcaatgaagtgttaaaggccagagtagggcaggtggtgcagtgaggggagcggattcgcatttggaaccacatggacagtgtgtggcaggaggggcagtgtctacagggggatgcgtggcagcctgcggggaggtgagagctgttctctgccgggagtggcggagacctttgggaggaggaagccaagtgttggagaaggattgggtgggaggcgtggcggtcctgaggcagtaggagaggcctgtcactgggacggggatgtgctgtggcagagagggggcgctagaggagcacctggtgtgaatgttctaggcagagccgctccagggtggctgcagccttgctgagctgccggcggtacctggaggtgtcagtggagtctgggcccagaggggctctgagcagaatccggctgcaggtgaaaaggtcccgtttgtttgatttgctgaccacatagtgctgcccccaggaggggatgagaagagcctgcaggggaggaggtgggaggaggaaagccaggaccaggctggagcctgaaaccagggccaaagggcttccccagggaggcggccgtgggtaccaccaagggtctctgaagacctgtcggggttgctgggaatgagggcacccatcagggcccttctggaggtgtgccgagcctgaagacacatgaagaatggctgagaggcctgggaatggagccgaacaggagctagcagggcagggaggcctaccagacctgagcattccgccccagggctctgcatacttggagggaccctagtctaactttcttttctgtactctgcttttgtggaagccgcatctcccagtcttgatcagtttttcctctgtggtgtgcgttgagcagagagtcctgagagactggcctaagctctgggg

SEQ ID NO: 27914 - DNA, 1127 bp, Artificial sequence
  DNA replication origin
gcagtggctatggagagcgaagagagatcgtgccattgcactccaccctgggggacaagagcaagactccatctcaaaacaaaaaacaaaaaacaaaaaaaccaaaaaaaaaccttcttggatgggcgtcgtggcgcacacctgtaatcccagcactttgggatgccaaaatgggaggatcgcttgagcccaatattttgagaattagtctgagcaacatagtgagacacaatctctacaaaaaattaaaaaatcagccaggcgtggtggcgtgtgcctgtctgtgtcccaggtactcaagaggctgaggtgggaggattacttgaacccaggaggtgaaagctgcagttagctatgatcacaccactgcattccagcctgggcaacagagtgagatgctgtctcaaaaaataataataggccgggcacggtggctcatgcctgtgatcccagcactttgggaggccgaggtgggcggatcacttgaggttaggagttcgagaccagcctggccaacatggtgaaattccgtccctgctaaaaatacaaaaattagctgggcatggtggcaggtgcctataatcccagctacctgggaagccgaggcaggagaattgctggaacccaggaggcggagattgcagtgagctgagattgcaccactgcactccagcctgggtgacagagcaagcctccgaaaagtagtgggggttaggacttcaccatctttttaggggagcacaatttaacctggaacaggagttgcagagaatgtagagaagtattttaagacctcacactagcgagggagagtatagatggcaggaatagaggcttagggcaggagtgaccctgttggtggggagctatgttggaagtgagcctgggagggatgagagagccaggccaggagcgggaagcctcggaaggtagttgagtgatgtacggctgcacaaaggtggggtgaaggaagcagcctgtggtgcaggggaagcctgtctgggagaagctgctgcccttgcccccttggctgaaaaggaccctcgtagctgctgcctttgctctgggagttccccccagcaaggcccgcccccacccacttccctggtgccctcactgcccgggac

SEQ ID NO: 27915 - DNA, 1619 bp, Artificial sequence
  DNA replication origin
ccgcgaggtgagtccggcccgaggaccgggcgctgtcgcctcgggccccgtccggctgcccctccccctgcccggaccccacaggggtgccctccagggccgtctggaaccccgagacctccatccccggggaaccccccttcaggccagggccccggcgtccgggccgtttcgtcgccgccggagggcagagtccggcactcccgtgactcgctctggcgctcggtgaccctggcggtctgcccgcctcgcccacctcgccccgggacccccgaggcggcgcagccctcctagccggggcccaggcctgcgaggccgcctgccttcccagcttccggtcggcctcgccgggagccggggctcggggcgctgccggcgcctggctcctcctccctgccgccccgggtcgcccctgcccctggctgggctgtggggagacgcccctctctcctctggccccggcgagcccaagtgtgtcagtggtggggagggagcccctcggccgcacgcgcccctccctcgggtttccgccggtgcttcctcctctcgccgctggcgcaagctctttctttatctcggtgatgctgccacggctgggtggggcctggggaagcctgagcaggtggagccccaaagaattgctgagccaggtgccgggagacccttcggacccccgaaacggcaggaggactgatgaggggtgcgccttggaaacgatgtcagctctgctcttccgctttccgtgttatttgtaaggcctgggagtgtcctccgataactgggcctaggagttgacctcaagtgaccccatcagggtcccagagcaagtcagggcagtctgggtagaggttccgtttttgtagtgtggactatatttcctctgcttccactttatgctgtgctaagctgctggagacatcccggtgaacacaacggcattttccttcccctgtggcacttgtagcctcatgagggagacagcaagcagacaaacaagagcattggaggttttcataacgacattgaagaacacacatgagggactgggatggagaatggagggggccagtctcagtagcgtggtcaggaaaggctgcctggagtagatggcattttagctgaggccagaagggtgagaattgagaaagagcctggtggagaaatggaaagtgagcatgagtggatggaggggatggccggagcagtatggtgacagatgagtccagagtggtcctgcagaacccaagggccaccggaagaagttgggttttattctgattgcagtgcagagccattgaaaagttagggggaggggctggataccatgactcacggtaatcccagtactttgggtggactgctttgagctcaggagttcgagaccagcctgggcaacattgcgaaacccctctgaacaacaagttaaagaaaaaaaaattagccaggtgtggtgactcactcccgtggtcccagctacttgggaggctgaggttggaggatctcttgagccgaggaagtggaggttgcagtgagccgagattgtgccactacacaccagcctgggcaatagagtgagacactgtctcaaaaaaagaaaaaaacaaacaagaaaagttagg

SEQ ID NO: 27916 - DNA, 882 bp, Artificial sequence
  DNA replication origin
cggcggcgacgaaacggcccggacgccggggccctggcctgaaggggggttccccggggatggaggtctcggggttccagacggccctggagggcacccctgtggggtccgggcagggggaggggcagccggacggggcccgaggcgacagcgcccggtcctcgggccggactcacctcgcggcggggcggccgagcctcggtgtgccggaacttggacaccctgaagcggttcatggcgacgggcacggcggcggacgcgtcttcgaggaccccgggcgtcgggtctcaggtgcacgctgagcaaccgcgactcccgctgcctcggccccacccgggacccaatgccgcggtcacgcccccggcgcgccccactgccaatcgcagccgtctccggccccctgggccacgcccccaagcccctctcctttcgcgcgcgcaccaccggtcccgcctcccggccaatccaggtacggccgccccgcgaggccacgccctgataccgaggggacggactggcgcgggtgggaggtcacgtggggcgcagctgtcagcccacgtctcctgcggtgcttgcttgcgtggggtctcggctgcagcattcgcgattttgtgtgcaggatttgctgtggagtctttgcggtgtacctagcacgccttccagcactatctacctcttcctgtagagaggggagaaattagctccatttcagagacaggaaacccccggctaaaggagagtgtaaactgtcggtccccaggtcacaccagtggtaagaggcagagggggaacaggggcccaggtctaaagcaaatccctgtccaccgggcctactcaaaagcctctgcatccggccaggcgctctgcatccggccaggcgcg

SEQ ID NO: 27917 - DNA, 2131 bp, Artificial sequence
  DNA replication origin
gtgggcccaacggggacgccaaagagagccattcaggcctccccgcgcccccggggagacgacttctggagagcggcgtccgcggtttcgccctcccctgacagcccctccacgcccttcttcgtccttctgcccggcctcacccagcttccggccgcccccggccgggtctcccctcagaccggcgcaggggacccaaagggctgtggcccggccaagcccaggtccgaaggcctggaccgaggcagggcccgcgaaggacgcagcgcggtccgagaagccgggcggaaggaaggccccgggagggcgcggacagctcacctgccgcaggtcgctgtcgcctgtccgccagcctccagtcagcgtgcccgtcagcgactccctcaggcgccgcagtccctgcagcccagcggactggcgcgaggccggcgcaacgtgggcacgcagcgcggggcggggcctagagatgacacgccccttgtagctgacacgcccttgccgggggcgggaagcggagtatgtggctttccccaggtctctggaggttgcaggctcaggctctgctcagcggggtaagtaggcgtgcttcggcaggaacactagtgttcacaagagccgaggtgtgtgagggtgcctcagggttgagcacttttcttccccagtgtggtttaatccttgtacatccactcagtgatgtaagaaatagggttgtcaaccgtggcaccacccacttggtcacttgccaatgcaatctgcgaaactgagtctcaactctgacacctcggttaccagtcttgtatctgatctccctgttgcattattcgcattcttcaaacagcggccagaatgacagaatgatttttctttttttgagaccgagttttgctcgtcgcccaggctggagtgcaatgacgtgatctcggctcactgcaacccccttctcccgggttcaagcgattctcctgccttaacctcccgaatagctgggattacaagcgcctgccaccacgcccggctaatttttgtatttttagtagagacgggggtttcaccatgttggccaggctggtctcgaactcctgagctcaggtgatccacccgcctcggcctcccaaatcactgcaattacaggccaccgcacccagcccagagtcattttttagttttactgaacacaaagaaattactgaaatcgtgggccgggtgtggtggctcatgtctgtaatcccagcactttgggagcctgaggcgggaagatcacttgaggtcagcagttcgagaccagcctggccagcatgttgaaaccccgtctctaccaaaaatacaaaaaaattttagccgggcatggtggctcctgcctgtaatcccagctactcaggaaactgaggcaggagaatcacttgaacccaagaggcggaagttgcagtgagccaagatcgcaccaccactgcactccagcctgggccacagagcaagactccaccttgaaaacaaaaaacaaaaacaaaaaaaaactgaaatcagtgcaagtagcagcaacttcagaagtgagttagggctgggcacggtggctcccacctgtactcccagcactttgggaggctgaggtgggtggatcactttaagtcaggagttcgagacctgcctggtcaacctggtgaaaccccgtctctactaaaaaatacaaaaattagccgggcttggtggcacatgcttgtaatcccagctactcgggaggctgaggcaggagaatctcttgaacccggggggcggaggttgcagtaagccgagatcgcgccactgcacaccagcctgggcgacggaccaagacactgtctcaaaaaaataaaaataataaaattttaaaagtgagttaggcaaagaaaatatcaagcggacaaggcctcaagggataagactcatggacatagctttaattatctttgcctgacgcccaatacctgaaaattaagatgttcatgcaagataaagaggtaatttttctcctcctcccagtcatcacccgtagcatccggttaagaggctctccacctcgctcattttggtctaactggatttacacaaactcactgtgcacgtgcctggggcgggcaaacccggaaacgacgcc

SEQ ID NO: 27918 - DNA, 1321 bp, Artificial sequence
  DNA replication origin
gcctcgcgccagtccgctgggctgcagggactgcggcgcctgagggagtcgctgacgggcacgctgactggaggctggcggacaggcgacagcgacctgcggcaggtgagctgtccgcgccctcccggggccttccttccgcccggcttctcggaccgcgctgcgtccttcgcgggccctgcctcggtccaggccttcggacctgggcttggccgggccacagccctttgggtcccctgcgccggtctgaggggagacccggccgggggcggccggaagctgggtgaggccgggcagaaggacgaagaagggcgtggaggggctgtcaggggagggcgaaaccgcggacgccgctctccagaagtcgtctccccgggggcgcggggaggcctgaatggctctctttggcgtccccgttgggcccaccctctcccagcgtcacggctatgctgggcgaggtgacccccggggtcgtagctgggggcgtcggcggtgcagacaggggatgccggcagagattggagcccggcttggctgtttcccgggctgttggcattgaccggggctctgcccttcctctaatgcccttatctctataggaagtgccccttgagtgggtgtcgtgacttcacgagtgaaccctggtacgccctggagcagagtcggactgggagggatcaagtgtgggggcagccggttagtccggacgcgggtttacctattactttctgagcgcagtgctctgggtggattaattgccctgcaaaagctgccgggacctccttgcagtctttgcacgaggcctgcctgtgtcatgccatttaaatcgcgtctgggccgggtcggtggctcacgcctgtaattccagcactttgggaggccagggcgggcggattgcttgaggtcaggagtccgagaccagcctggccaacatagtgaaaccccgtctctactaaaaatacaaaaatcagccgggcatggtaacgtgagcctgtagctccagctacttaggaggctgaggcaggagaatcgcttgaacccgggaggcagaggttgcagtgagccgagatcacgccattgcactccagcctgggcgacagagcaagactccatctaaaaaaaaaaaaaaaaaaaaaaaaaatcgcttctgatgagccggttgtcgtggcctgtggctgtccatccttacgtactgtgttttgttgatggcgctacaaaccagacaaggtggagtgtgattgaagaaagaaacgctggccggtgcagtggctcactcctgtaatcccagcactttgggaggccgaggcaggcggatcacctg

SEQ ID NO: 27919 - DNA, 1224 bp, Artificial sequence
  DNA replication origin
tccgctttcggccggcctcgggcaccgggcttctggaggtaaagcggggccggcggttggggcgcggcatggcggggcccgtcctcccctcagggcgctgccgagacctagcgcggccctggggatgtcgaagccgctgcggtggcggggcccgggcgggcgccccgctgtgtgccgcggggttgtgcgcccggaatggcagcctgctcgcccgcacgtttttccgtcagggaaggttgtggaaattgccatctccgtcttgcagggcgagacggggaggggaggggtgggagttgttttctcaaggaaagggggtcgaggaggagccccgtggccgagccagcccctgccgagccccgcgggtgaccttggccgtcccggagcccagcagtgtcctgcacccgcgcccggctcgccgacgtgtggagtcgggatgtggcgctcggccgcgcatccccggcggagatggcgacggcctggcctagcttggggctaggagtcgcgccttcgaggaccttggcttagcgagttccttggggggcttctcaacaggtgttagatgaggtggggcgagtggctgtgagttcctccaaaggtgggctcaagatcctctgcgtcagaaccacctggggctcttgggaaacgggcagattcctggggcccaccccaggtgttgggatgctgtagttccgtcgcgctgcccaggaatctgcatttagtaggctccccagatcattcccgggcgcagctggggctgagaacctgtcccagtgagggggttggcgggcccgggggcagggacgttccatagtgtttctgccagtttcttctgtattctggggcctgatgctgggcggggcggtgcccgggcaagttactgctctcctgggttctttgctgcttcccttggggccgatctaggtagaactgggtggagggaggcgtgccagctctgccttgccctctgcccttaatcggaaaggttatgcccagtcacttgccagtctcagaagactccccctctacacattcagttacgaaaaacgtgaaacatacaaaagttgaaggaattttacagtgaacacccacagaccaccacctagaatgtagagttaacactttattgtatttcatcacatatttgtccaaccagcagtccctcttgttttttgtgtcaaagtaagttgcagatatcagtgcctttccctcccaaataagcatgca

SEQ ID NO: 27920 - DNA, 1294 bp, Artificial sequence
  DNA replication origin
ttacctccagaagcccggtgcccgaggccggccgaaagcggagaggggcccgggtccggacaggcgccggcagaacaagaccctcagccccgcgcggctttgcgcgcacaacgaaaccccccaacccaccgcccaccccaccgcccagaggcttctaggacttgtagtccgcccggtcaccccccccaccacaacccgctctgagaggctggggactacggtgcccggcatgcaccgcccaggcgccgcgggcgggggcggggagggggcgccacggtccgaggtcacgccccgacctgaggagagctggcgcccagacccttcccccggggaggagggctcccgcgcgaagccgtctccgaatgcgtccagtcgactcaccgtccccgcagccctggggcagcggccgcaacagcaggaccgaacgcctcggcagctggcagtcgcacttctgtcacaaggaggcgggtagactttggaccagggccgaggcccgggacgtcacggtggggggtggggtctcgggaggcacgtgatgcgccgtgatgacgtcagtgggagcggaggcgatttggcctagagctggggctgagcacgtgggatggtcggggcctgtttgcccaatgtacacgaggctggagaatagggaaagaaccgtccctgtgagcgcctcctcttcactcatgccagcaacagggcagggcatcttcctccagggctgcattttttcttttatgcgactaatatttattgagtttgggaggtgcattacataaaaccttgaaccacacggtcactgtccctgcgcttgaaactgcctttgcaaaaattacaacagaaaattatgacagtgaaagagagctgacctaacccactccatcttgcttctaacctccaggttgtccttgttcattcctaggcataggcagaactaactttgggagcaacttagtttatagtttaatattgaaacaaagatagttaacagccctttcccaaaacaaacccccttgttgcctgagaaccaggcttcctttgtaagagtaacacgttagctacaagattagacattatagtttagggcccagctcagtggctaacgcctgtaatcccagcactttggaaggctgacgcaggtggatcacttgaggtcaggagtttgagaccagcctggccaacatggtgaaaccatgtctctatttaaaaatacaaaaattagccgggtatggtggcacgcacctgtaatcccaactactagggaggctgaagcccaaaaattgcttgaacccgagag

SEQ ID NO: 27921 - DNA, 1651 bp, Artificial sequence
  DNA replication origin
cttggtgttgtattgaaaatggatcaaggaattaaattggcttgttggaaaattcactctagaaagctgtgtttatatgacaatgtagaatgagaatgtgcactgtgctgtttgtatttatatgcacaggataaaacagccactgggtcagcatgggggtcccctacacagacccctcccctctatccagggccccagcaccctttctgggccaggctcagggccctgggtctcagccggggacgggacttggtgggggtggggggggcatatgggtctcagcctcggacgtggaggggacttggtagggatgggggggggcgcatgagcctcagcctcggacatggaggggacttggtgggggtgggggtggggggccacataggcctcagcctccgatgtggaggggacttggtgggagtgggagggccacatgggcctcagcctcggacgtggaggggacttggcgatggggggcgcagcggggtggggctcacgggttggcgggctcctcggggggcttcctgccgactcgggactcaatgtgtggagctcttgagagcctggtggaccctggggcctgctgggggtcccttagggatggaatcagcggtggcagcagcagcagaggtggcagggaaggtggtcgagctggcatcgtcaggtgagggcccgaggcagctgagcaggcactggagcgggggcacagggctggggaggggcaggagaaaccctagatgtgtgccaagaaccttcttgggagacactagcctgatggggccatccccactaaagagaagagaagcccaggactagaagtgctgtacaggccatggccggctgggcaccatacctcacctgggccctgggcaccctaaatgtcctgggtgggtgacccaagataaatgacaccaggaatgtttgcttaaatggagcagagcccccgggagagaacatgaagcttggagtccacggatctgggctcagctcccagctcactagctctgtgatcttgggccacagctcaaagtgaccgagcctctgctccctcctctgtgaaatgggcaaacagtgcctgcctcacaggagtcgggatgaggttctgatgagataagggagaaactgccttgtaaactgtaaagtaccctcaggtgcctgctacgtggtgatccgaaccagagaagctcagttccttccaacctcagttcccttgttgccgcccctgcagctgggtggacgctggggacagatgcttggcctgggcaccggggatggcaccggggccaggaatcatctctgaagtgccataggcaggcaaagcaggcaggaggtggaggaggtggacaggagagcccaggcggggtgtgggggatgggatgagacgaggagggactggagacccttccagaatcacagctgggctggggctgggaaccaggtactcacgggggcagatggcgccaaatagggcactggagtgcacacggtcatacaggctttgtgacgggggagatggagccttcacagcttagcagaaaagaaaagagacaggtgtgggtggcatccacccctgggcctgtgtcaggccgatcccagcactgggcagtctccctctggtgggaccaaccccatttcccaggctccccggtcc

SEQ ID NO: 27922 - DNA, 3573 bp, Artificial sequence
  DNA replication origin
aaggcaggtgtgagccctgcgaactcctaactgggcgccgggatctgtccagccaagcaggggcaggggtgggccgacaggatggggacccaggccaggaactaacttcacaggaaaagccctgggtgggcaggaagattccagagcacgctgtggctgacaagggctacaggcagcagtgtggagccggggaggctcggggtggccctgtcttctgggcggcggcccccagaaccagctggcagcaagcctcgtatacaaggtaagaccacagagcctggcagtggtttggaattcgttcttctcttttgttaaaagggggaaaggaagtggatgcgggtacccccaggtgcaggggaggcatgcaggcagccccagcaggcaggcgctgggaggcggtgggaagagtcctggagtttcccacaatccttttctctgcaaggaacagcaacgctggctgacgagggggtggggaggaggcagggccctggggagggggcggcgggcagggggctgggggctcacactaacatgcaaagtccagctgccccaggaactaggttgcttctgaagagcgacacacgtagaaatacacagacacggccacgcgcacacatgcggagaggctctgcattccctagggtgggggtcgaggcctgccggcccccaaggagctccaagccagggatcagcaatgtctctgccagggtggtcctccacggcacccctgggctgggctgggcaggtgcgtcttcgaaggaaggctgcgtggtctctgaagttctgtccgccaggcacccaggccgcgctgaaccactccatgtgccggggccgctggggccatgaccttgcgtgtgggcagctgcgtgttctggcaccagacgtgtccctgcctggctagagtccgcgctctcccctccagggctccggggaacaaggggtgcagacagaaaaggggtgaagggggcccgcagagacgtcctctcccccgccccacggggtcctggcctccgggaggggggaggggcctcccttatctctctgcctccatggcagggtgggccctgggttctgaggtggcctgttggggggccaggggtggccagtctgaagccggagaagggggtgttggagtccacaggggcggctgtggctggtggtgctgtgggccccccgggggcgaggccgccgtgggccagctggaggccgcagagctgctggtggcggcatgggggaagtgtggcgggggtgacgtggctgtcgcggccatcgggctgccgctgccaccgctgtggaagctctcggaggccttgagacgggagaacatggtgagagcgtcagggaagttggggggtgtagcaggggtattggcgggggtgcacatctgtgaggggaagagaggagagatggggtgagcaccccttcctggaggggcccccactgcctcccaaggggagatgcgtggctggcccattctcggaaggctctgtgttccttccccagatccccaagcctgtccgccgcccaggggttcccagaggagaagccttgagatgaaccgacccagcctcactctcaggagcccacggtgcctggggccacgaggctttcccagcccacccctttccatcagccacagcatccccgggggctgtagggtaaggagcttcattgccccagaggccagcgccccccaggtctcagggggagctggcacaggcaagattaagtgcaggacccacggagccgggactcctgctgacccatctccaaagaggtcgagccccgcctgcaccagcgccctcgtacaccggggccaggggctgcttatacacagaactagctcggcctccttccgcccaatccagaactggggactccggggacacttaccatctggtggtgatggtggctgtaggggatgttggtctcctggaaaaaggcgctgagggctgtctgcaggaagaaaggcccctgctcaccctccaggcccccgccggccctgccgctgcccttgttcccaggctcctctgaggctggggatgaccctggctggactgctgagtgggaggggtgagtcgcggtgctgaggctcagtggcttgcctgtcacccccaaccctcactgctgtctaaggaggagccacggaaccttgggcagttggggtgggtggagaagacccttcccctgctgctcgccacctgcctcagtgcctaaggcctgcagagccctccccctgcaccagctggcaccagcaccatgactgggggagggcgggcagtacaccccatcctgggggaaaggcgcccggccccaggtagcccaaccagacctccccaccctgccccgtttcaggagattctagcctggctgttaccacctcaacgggtagcaagtctctactcttctctaagcctcggtctcctcatctgcgaagcaaaagcatcctgaaggagtctgagcctggtggtggggatcccctgctgccccacccagctctgcttctggctgatcaagggggccactgtttgggccttggtttctccatctgtaccacaaagaggttcgactaggtggctcctgggtcccctcccttgcaacagtgacctcctaagatcaccagattccagcaagcagggcctggcaccaaggagacaagcctgggctttaggctcactcgcttccccacctgagcctccctcggaacagtgcccgggaagtggagcagaaagacggccctaggatcaaagccaccacgggtttacgacagctcccagcacagctccccagccacccgcccttggctggcaccacgctaggcacgggatgctccaccgtctccctccacacccgggccgcatgccacactgagcacggtgcgggcacccagcagggctccatcccagcggggccgtggactgtcatcattaaccccacaggcagggactgctgtcttacaggcagggaaatgaaggtaggaagtgacttgctcagggtcagctggtcggcagaagacagagatgggggcgctcagaaaggccaggacaggtgggggagacagagcgagcctggagccctttcctgtgtgtgtcagctcagcaggctccagaggtccttggtgactgggaactgaggagccccagagggaggcgctgggatttgctatgtcctggctgaggccctgcaggggtggggaggcctgtcccaggaaacggaggctgctcttgcgcaagggccagtgagggagccccacaagtatttgaggggttctcggggccctgccaagtcccaggcccagacttggagcttcaagccgccgaggtgcccctaccgccacccctcaggcccactcccctaatgccagcttgacttcctggccctcccaggcccagcacacccagaaatccagcctggctcctggggcctgccctcgatcagggggtatgggtgggaggctatttagattttttttttttttttttttgagacggagtctcgctctgtcaccaggctggagtgcagtggcgttatctgggctcactgcaacctttgccttctagttcaagtgattct

SEQ ID NO: 27923 - DNA, 2294 bp, Artificial sequence
  DNA replication origin
ccacgggcggagtgtgtcccgcgtggccgccgggcgggggcggacggcgtggacgcgtgccggctgtgcgccccctccgggccgcagacccgacccgctttcccgacggcggtgcccggcgtccggatcccaagggctcgcggcgggcggaggtgggaaccgggccaccggtcggggatacgccgcccccgcggggccgcgagtcccccgggatcgagacggggaccccccccaccccttttgtccgggtaacggccgagggccgggcggccccgcggtgcagacggacagtcgggcgggcggccggaaggaggacgccccaggcctcggcagagctgggccggagggcggagccgctccgggcgagtggtccgagggtccgcgtgcctggtgggcggtcggcggcgtgcgcacacgtccatgtgcatttgtgtttacgcacgcaccgcgccacggcgtcggccgggcaccggggaggtggcggacctgcgggcacgttggcgcgcgtgtgaacgcgcagccccctggtgcgtttggtgtgtgatcaacgcgtacacatgtggcgggtgtgcagatgccgcccgtgcccggcacggtgtgatgtgtgtacacggcctggagtgtaggggtggcgtgtcggagccccacactacaccacagggatgagcgtgtatccccttcagaggtgtgcctggggactccgtgtgcgcgactaggtgctctcctggggctggcaggggcatctgtccctttaccggtgcaatggggagggtgcacacggttcaccagctttcgggctagctgggtaggaggtgatgctgccccggtctggcacccactcccccgggcctctcctaacccataggacagtagtgctcctggcttgtgctgcccagaggctacctggctttccctaattcaccgaccccaggattaaccccatggtggttggtatcaggggatgaggccagagccctttgagctgtgcccctcacaggggtagggtcatggcctcagccatcccggtaccatctgtgcccagccggggactgggaacctggtttctccatgaggagccatcccagggcctgcaggagggactagaagccagaggactctgaggctccgcttcctggggactgcagggggatcagaatgtcccaagcttgggacagtctgggaaggcagtggccatcccatccagatgagtacatccctctctccttgcctacttccctcctaccagccgtcgcggaggccactgatcctgtgtggtgttcaccccaggacgtgggaggctgctctgtccctctggccttagtttccacatctgtatggtggggttggggggcatgagtcagcttctgttggccagcttactgccccctgtgccccaaggcagccccacccggaggaagctccctgcttccctcctggtctccacagccctcatcagccctgtttgtgtcaggggctggatgtggcaaaacttgcaaaaccgcattcatggcagttacacatctgcacgcagggttccctcgctgcctggggctgggcaggtaggtgtccggtgggaagcgggccctgcctgcaggactcagcccagccctcaaaacctggcacccagctggcacccaggccacatccctcagcggcacagttaattgaaaatgcagctttgaggagtgcaatgtctggggaaagactgttcccagaggggcaggagcatctggggcctctggtggctcccagggtccccatgggaggagccctgtgccctccactcccaagtctcagttgtgccatctgtaaagtgggggccgccagggaggctggaggaaggtgacgggacttcaggccttggaatggggctgagtgaggggttcacatggccaccccatccctctccacgctccacccgctggctgcatccaccaggcggtgtttctgggtcacatttgctgcaattcaggtgctaatgggggcaggaggctgcagggggaggggccggtgtctagtggggcagatgtttctcaatggagaatgctcacagcggcctgcagagggggtctggtgtggcctggggctcctggggttgggatttacacagtgagcctgggctttggggcacagctgctgctgacagagggtcttggggtctgggaaggtgcttaaagcccggcccccatgcctgagctcccacacccctgtttagggacacccagatagggtgtctcctgcaggaaattccccacataattcatttatttaaaaaatattttttgccgggcacg

SEQ ID NO: 27924 - DNA, 1829 bp, Artificial sequence
  DNA replication origin
aaatctctgtagaggcgtgttctcaaagtcctgggcctaggcaatcctccctcctcggaccccgagtaggtgggattacaggccaccgcgccagcccgggagggcattttccatcttgcaaggctatactcgtcctccgggtttccgaaattcgctcccaaccccagccgttctcacagcccccacccggctattgctcttctgtcgccccacgctaggtcagggccaggaaaagaggaaagactcaacaaatagtgtctcaacgaaggaggctggggccagggggcgcaaggagccggaccaaggtcacctagagctgctatgatcgcgccttaccgcccccgggcgctcgaagcgggctaaagcctcactagctgtcagcaacgtcaaccggaagcgccatgtgccggtctgtaaacaccgcccggtcgccccgcccccggctccgcccccggcctccccggcccagcgcccgcccccgccgcctcttcattgggcgaccagctttgtttaccttatatggccaggtcctaacaccccgaggctgtccattggtcgaggcacgacctcactcagctgacgtcaccgggaccaaacgatgcaaataaaccgaggcattctgggaaagggagtttggggccgctccggaactggctctgccgggccttggcgcccgcccgctaagggccgagatttccggcaaagagcacgagattttgcgtgggaaagcgggagaactgctgggagggggaccccgaagcaccagaggctgctggccccgccagcctgtcccaggcgccgtccagagggtcatggggctacagtggggcaggcccagagccaggctaggaaggacccatgccacgagtgggcgatgagagattgagtgaggagagctaggaggctagctataggcggtgacgtgcggcggagcttttaagtggctcattcattcattcactgaacgagtatttgtcggcgcctacagtgtgccgggcctttcagcctagaccagccgatttgggccaaaattcctagagacccctctcttaagggcgtgcctactatttaacacagagcgatgccaatcacagaggggttcagggtccctaggtcttagcaaagacgcctgtggcccggcgtttgcgcccatgcacagatctgtatgccccaccttgggaccccaattcgtgccagagcaggggcacgggtgccaccgagagcaatgagggcgacatggacgtgcctggctctggtcacggtctggacagctgcgcacagtaggcacttagcgttcagtcacagtccccggggcatggcaaagacgtctgtggcctggcgtttgcgcccatgcacagatctgtggccccggcctctgggctcctaattcccgccagagcaggggcgtgggtgccaccgagagcaacgagggcgacgtggacgtgactggctctggtcccagctcaggcgcctgcacacattaggcactcagttttcagacaccgttcctgggccttggcaaaaacgcctatgcacgaacctgaggcccccgcctgcggacctccatccgtgccagagcaggggccgggtgccacccagagcaacgagggcgacgtggactcccccaaccctggtcacggcccgggcatccacacacagtaggcgctcacagttcagacacggtccccaggccttggccaagatcctgtggtcaggcatttgcgcccatgcacagacgtggcccccgccagcggacccccatccgtgccagagcaggggcacgggtgccaccgagagcaacgaggacgacgtggacgcgcccggctcgg

SEQ ID NO: 27925 - DNA, 960 bp, Artificial sequence
  DNA replication origin
ggatggaatggagggaattgcctcaagctgcggctcctacccgggcccctcaagcctgaccaaggactctcccattgggtggtgggaggaggacagtaggggaactagtggactggacctgaaatgtcctggggtgggagggtagggtggtggggaaggcttggggcactgagatagcggagagggctggggagggaagggagtcagggtgcagtggagttggtctctgagggctggggctgggagcctggcctataggcaaggggcggacactgagtcttggcttttcccaggcaggcacttagcctcggcagaagccatctgaccacgggaaatacagtttaaaattctttcctgctgtttgcggatcacttaggggccacagtattttgtaaaccctgatggttccaagagatgtttgctcttgctaagagttgctccttaacctttgcaaagctcatatgcatgaattaatatgggcaaagtgctccacagggtaggcccacagtaaaaaccagctctgaatatgattcccgctataataattaccactaggacgacaacacagtgtggtagaaggtgggcaggttcgggagctagacagacctgggtgtcaggcttgactccgctgcttaatgacttaatgcttaatgttgagcgagttaccagagctctgggcttcactttctcactggcggggctgagttctggcctcactgctgtggaagattaatgcctgtaaaatgcagagtgcagggcctggtgctatttgcacggttctagtgctctcacctgtttgcctccatctggaccactctgggaagccctagccctattttacagataaaactgaggctggaatccagccttaccctctgacattcagaacctgtggagaagagcgggcacccatggtgcatttctggcaagggaggagggacactgtcccggcagggccca

SEQ ID NO: 27926 - DNA, 1998 bp, Artificial sequence
  DNA replication origin
ccggggcccccagccacgcctagggatcggggccgtggggccgcgcgaaggctcggggtagcaacgaggcccggagggggccgagcagggcgccccgccccgagtccccgcccccgcgcccgccgggtccgcgttccagcgcgtgcctagcagtccgcgcctggggccgggcgctcaccggacttcggagggtagcgataggccgagttcgcctggatgtcgatgtcctccacccccgcgatgcggcggctgagaatggagcccatggtgcgcggcgctgccgggcagaggggccagggccggaacgggagcggcgacagcggcggggtcctcacgcggacatggcccggaccaggccgcacggacgctcgtccacggccgcggaggcgcctcgagcccccacccccggctcggcccggggaccgacgccacggcggccctccgcctcccggtcccggggcacgtcgggaaatggagtcctctcgccgccgaaggcgccgggaagcagcgcgggaagcccgtctgggaactatctttcccaggatgctccgttcccaggccctctgacgggttgacaagcactccgggacaaaccaaatggacctaaattcagagggaaggaaccaaccaaccacagggcaaatggtccttccctctgcgttccaagcgctgcactaacatattaactctttggtcatttcctcatctgttcgcttacagactctcctggagccccagcgccttccacttgccccctctgaaatagctccctgagtcgctgtggttctccccactcccctgagtttgtctcccgccccgaccggcagagggcgtagctgcacctgccacccggagcccacttgcagggtgtgcacggaagaagtgaagcacctgctttggccttggccagaatttgaggactaccatttggggacttctgaaccaggtgtggttctgagagctgtataggcatcagcccgttttacagatgaggaagctgggatccagggggttaagcaacctccggccccctgacaaggctgaggcccggtgcagtggctcacctgtaatcccgatactttggccccacgtctggaccaattagtttaaagacataatttcacagcctccacggaaggcagtagactctcccacattttacacacagggaaactgaggcacagaggagagagagccgcatgaaatggcgctgcgggcaagattgcaagaatcgctttcagaatgaaaacctcgcagtgtgcaaggtgttccctggcttttgagtcacacacagctctgcaaatagatcgctttttacctacttttcagttgaggaacttggattctgagcagagtgatttcccaagtcaagcctgctgtaccaagaaagcagctagggagggcaaggcagactgagtctccaatggtcaattcaccacagtccatgtggaaatgcttcttatacccttccagagaccacagtccaggatccagtcttcctctttttttttaaattgttctgtcgcgcagtctggagagaagtggcacaatctcagctcactacagcctttgcctcccgtgttcaagcgattctcgtgcctcagcctccccagtagctgggattacaggcatgcaccatcacacccagccaatttttgcatttttagtagagacagggtttcaccatgttagccaggctggtcttgaactcccgtcctcaagtgatccgcctgccttggcctcccaaagtgttgggattagagatgagccactgcacctggcctcagacttcctcttgtcaggggaacttgggaagccaaatgagtacggcagccaagagacttgtgtgattatgatgcaggtccaggtcttggaggagcctgattaaatctccctgccccacaaccaagatccacacttactgagcattatgtgccaggcatcatgctgagggctctgcacatatcctctcatataattctttgatgttggccgggc

SEQ ID NO: 27927 - DNA, 1557 bp, Artificial sequence
  DNA replication origin
gaggaccccgccgctgtcgccgctcccgttccggccctggcccctctgcccggcagcgccgcgcaccatgggctccattctcagccgccgcatcgcgggggtggaggacatcgacatccaggcgaactcggcctatcgctaccctccgaagtccggtgagcgcccggccccaggcgcggactgctaggcacgcgctggaacgcggacccggcgggcgcgggggcggggactcggggcggggcgccctgctcggccccctccgggcctcgttgctaccccgagccttcgcgcggccccacggccccgatccctaggcgtggctgggggccccggaggaacctgcccgagccgtacctggcgctgctactgcccggcttgggtgaccttggggcagtcccttcgccccgggcacctcagctccgtccttgcaacaggggggagctcctgggggaaaccccgagggcggggcggggtgctgagcgcgggtcccggcgcatcgcttctgcctagaaaactctcattgtcatcagattgacctcaccgcgggggccggctttcgctttctttagtggcttggtgtgaaggccgagccagtggtttgggcaatttccctcccatcaggacggaggctcttggtgtgtgggttggaggagtggggctgggcccaaggagacgattatagttgatcgggaggggccagggtccttgctgagaggacccagccgatactcgggcctctgtgttatggctgagggacgtaagacaccaaggaggaagtgactgccaagatctcagctggatggaagcatagttgggaccgggaccagctgtggggctcccacgtagctttgttcccagctctctttctgcctctattgatgagttatgtgttgactgggagcatctagctccaagtctcaccctccatctcctcgtggggttctttgtggtggaaaggagagaaggaagaggagagagaacttgggcatcatggggacatctagattgggtcctcagatcctggcgtctcatctgatctgatgtctcagtctcctgggtgtctccggacacccacaggccagatttctctgagtgtgggccaggtccacaagtgggggaggactgctagacatgccagggcctgcctgggaccccttggggcctgggaacctgcattttcaacccattccccatgtgagttttacgtccactcaggtttgaaaaactgctctgcccaggttttgtaaggtgtgactaggtgagggcctggggccactgggatgaagtgaggggaaccagcacagtttgggggcactctgaaggggatggactcagagctaggcagaacgcactgttgcctgcctgctggggagagcacagctgtatcccaggcccagcagcgggtcagcctggcctttgggtggttccaccctggggtttccctagaggttccgagggctgatggccctacatcagatggagcagtttgctgttgtcctctttcatctctgatattcttccagcctgcctctggctgagtgaccttggtcgaggttg

SEQ ID NO: 27928 - DNA, 1390 bp, Artificial sequence
  DNA replication origin
tgacataaaaacctagtacaaaaattaatgattcatcacctcacaacttacgtccttccagttaagtttttttgaggtaaaattcacttaccatggggacacctttttaaagtgtacaagtcagtgatttttggtatattcagtcatgcaaccattaccttgatctaattctagaacatggtcccagttttgtgatattacaaccattgctttaacaaacactcttcttccttgtctctaatcttttaaaaataatttttcttgttttacaaatgatatatgttaattgtagaaaacttaattttaaaaagataaaggaaaaaattaataatcacttattacctatgcaggtgttttagtttgtagcatttgtttctctgaagttatttatatgtatatatgcgtgtgcatatatatatagagtgagagttggcgggggtgggggtggtggtggggggacgggaagagagacagggtcttgctctgttgcccaggctggagtgcagtgtggtgtgatcatggcttactgcagcctcgaactcttggactcaagcgatcttcctgcctcagtgagtgtcctgagtagctaggactacaggcatgcgctgccatgcccagctaatttttaagaattttttgtagagacagcgtctccctatgttgcccaggctggtcttgaactctggggctcgagcgatcctcctgccttgatcttccaaagcgcccaggcatgaaccactggcccagcttaattactttctctgaagttattgaagcttaaaactacatacagtaagatcttagagcctccagcctagaacaccaggctgaaaagtgctgtggagaagaataaggctggaaaggggagtggaaagattggttggcaagctggggtgtgggaggcttggcaagttgtaaaaggggtgtcagaagaggcctcgtggagagagcagcctgaggtagagctggagctccagggaagagctggatgagctgaggactccagggccccgaggtgtgagtgggccggggctggcagagtggccttgtctggggcctcggaggctactgggacctgccccagtgtggctgggacgccagcagagttttgagggcagtgggtccagaaacaacagacctggggacccaggggatgtggggaggctggtgaatgggcacagtcacagggcagatggtgccagaggctctaaccagtgctgtggttgtagaaatgaaatcgaattgggagtcaggagaggagaaatgacagtcacgtagaccacgtctcagaaagactcgacgtctctttctgggtgactccttcagagtgtagtggcttagcacagtgagcacttcctaccttacggtgagggtcgggattgggagcggc

SEQ ID NO: 27929 - DNA, 1019 bp, Artificial sequence
  DNA replication origin
ctggctcctcctcccgggggctcttcccgtggtcacccgggggctcctcccggggctcttcccgtggtcacccgggtcctcctcccgggggctcttcccgtggtcacccgggtcctcctcccggggctcttcccgtggtcacccgggtcctcctcccgggactcttcccgtggtcacccggctcctcctcccggggactcttcccgtggtcacccgggtcctcctcccgggggctcttcccgtggtcacccggctcctcctctcggggactcttcccgtggtcacccggctcctcctcccggggctcttcccgtggtcacccgggtcctcctcccggggctcttcccgtggtcacccgggtcctcctcccggggctcttcccgtggtcacccggctcctcctctcggggactcttcccgtggtcacccggctcctcctctcggggactcttcccgtggtcacccgggtcctcctctccggggctgtgtgccaggagaaatggggctggatctgggcgtcaggtcaggaatccaggggagaggccatgctctcagtgttccttggcagggctgtgagcgcaggtctctgaggatgcccagctgtccatcccctcctcataggagaagcgcagatctcatgcctaagtgtgccagggtcctgatgggcgccacctacagcctcccgccctcacgcgggagtcagactgaacgaactagcccagatccacagagacttctaaacccggctgggtgctgccatggaaagtacacagggctcagatttgggggtaaggtgacttagcctggggtcacgaaatgtgtaaggatttcttggggtggctgtgacaaatgacctctaaccgtggcttgaaacagcagaaatgtattctctcaccatcacagaggcacacgtcagaaaccgaggtgccagcagggccacggtccccgaaggcgctgggggaggactcttccttacctctccccactcctggggccccaggcactcattgtcatccctgg

SEQ ID NO: 27930 - DNA, 1153 bp, Artificial sequence
  DNA replication origin
actgtgctgggctgactgctggggccctgggggccgtggggaagagggtggccttcagcctgtgcacagcagggggtgggatgaacgcaagaggaagcttctctttggactcaagccagcctcgtggtctcccttgcttgccttttgtgtttgctggggccaagtccggtgccttcttcagaaagttacagggagttgcccagtgaccagcacttcccctcagaggcacgcacccgggagaactgaaaacgcggttcaggcagacacttgcgcaccggtgtccagtgcagcgctgctcaccgtagccaggacacaggcccagcccggtgtccgtcgcaaaggaacgcgtgcacagcgtgtggatatccacacagtgcctgttatttggccagaaaaaggaaagcagcaccgatgcgtgctgcaccgtgggtgaactttggaaacatacctagacacagaaggtcacctgttgtgcaattccatgtaaatgacaggtccaaaaatggcaaatccctggagacaggaagcacatggtggctgccgggggctggaggaggggatggggagtgtgtgggtgctgatggctacgtgtggggtttccgtttggggtgatgaaaagttctggaaatggatggtggcggttgcatgacattatagatgtactttactcaacgctgttgaaacgtagttaaaatggcagattttgtgttgtatctgttttaacacacacataaaaaaggtgccaagcctggcatccgccttccctgccatctcgaggcgtgtcctctgagctctgctgctgcctcctgctcctgcctgctttgtccagctcatttgttgaccgactccaggcttccaggcttggctgtgtgggtcctgaccattcttggcaactctctcctcagctgaactttgacctggaccggggcgtgtttccagtagtcatccaggctgtggtggacgaaggagatggtgagtgcgtcctcttccgtcctcctgggcgtgcaggccgtgcagggaggaagcacgtcttgagggaggagtgcttgcagcagtgatgaagcaggccaggcatagggccttgggcttcccacagggcagggtgtgagcagcttggagtcccgggcaggtgaggaggtggaaagtgcaggag

SEQ ID NO: 27931 - DNA, 884 bp, Artificial sequence
  DNA replication origin
tcttggcagatgccctcgtgcccgtcatcccaggcaccagcgtgggcatttgggcatccagccccgtgctggagctgatggctgaggcagggagggcatcggtgctgccagggagctcttggccaccctctgagggtgggggagtctcaatcccccaaagaacagagtggacaggaggtcatcaggaggagcgtctggggagcaggtggtccctgggcatgagccccctcacgcaccctgtccctacagaactctgacagcgtcccacctggctacgagcccatctcgctgctcgaggcgctcaacggcctccgggctgtctccccggccatcccctcggcccctctttatgaagaaatcacctattcaggcatctcggacggcctgtcccaggccagctgtcccctcgcggctatcgaccacatcctggacagcagccgccagaagggcaggccgcagagcaaggcccccgacaggtgagcagcagccaggccaggtgcatggcagggtgtgtggtggcgcgcgtgcggagcgggtgtctttgtggtttcaaatcagtttgtgatgtgttctgtgtggcgattccccagaaggactcggagaccccgtatcaggttagactcatgggtaaagtttattacggcaaagaacgcagcagacgaggcaggaagagcgtccgggcagctggaggctttgatcccccgaccagggccacaccggcgtgcaggcgcatacgtgctctcgagcaggaaactgcaggggtcggtgctgtgtctctgctgaggggagcccctttgagcctctgggttcccagacttcattggggggctggccacgtaggcccactctgccggtgaccagccagggcagccgaaactcaggac

SEQ ID NO: 27932 - DNA, 1039 bp, Artificial sequence
  DNA replication origin
tgcttcgaccaccaatcagttctcttctgcaggcctcctgagttctccgggcagggaccgcactgttgcaggagcaggcagagccagcggaggccacacgtgggcagccccagccccagccgctcagcccacaggaccctggggaacgggggctctgaactagggatggaaagctgctgtccttcatcttgtaccagttacaaatatatcaactgtagaaaagggagactcagaagggacagttcactgtgctctttgatcaagagtcaccacggcccctcggagcctggtggccacagggggcatgcagacaggaggccggctcacaacggggtccggagcagcccctcggcaaagtctggggagccgagggctccatgctgccagctcggccaggctctcagagtggggtcagctcggcggcgctgggatcggggctggggccaccaagtggaggccaggtggggctggtggtggcgaggccgtgggccgtctccatggaggtgggccgtcctgcaggtgggagcagagggaggagggtcacactcggatgcctggtgccacgccacccgctcctaccgatctggagccccagaggggctgggccatccagcacccccactcccgccgcctgtggccacaacagcattcactcagatgtgagcacaccaagggcccggggactccctaactgtgccaaatacgctgtgtccctcttgggacagacgatcccagatccccggacacccacagcagatctgcagccccgagtcagagcgcgacacggcaccgcggtggatgccctctgggcctcctgcccttgccctggttccggtttcctgggatgtggccagccactgtcctgccaaggttcttacggctgggttagggtggaactcggtcaacccagggtgcaggggtggggagcggccctgggtgagaacaagcccgtgctcagagtagcccccggatggctactgcaaggcaaagagaggagcctcccacagagccccaatgcccagactgtggcctgcacgac

SEQ ID NO: 27933 - DNA, 815 bp, Artificial sequence
  DNA replication origin
aaccacctgttcacgagagagcccaatctggagggtgtggcttccctccaaccagacaactagccctgacagggatggctgggagctgcccgttctcgttagccctcaccttgctcactgccctgaccccagagggaagccaggcagaggccgtggagctgccacggtgcgggagccaccgccaaccacccagcggcaaaactccgggtcaggaaacagccacaatcctgagggctgcacccggaggaaggagcagacaggatattgctgcatgattttattactataaatatacagtaaaaacgaaccaacgatgagcccatctgagcacatcagacggcagcacatgggagtcccagcgggccactctgcggcccgaacttcacgcaaagctctggcaccaggactgatggccagaggctggggccttggtgggggcggggggcgggcggtgcagggggctgtgtgtgttgttggggagaggtgcatggggggagagaggtgcttggggtggggtagaggtgcgtgggagatgctcggtccgagtgcacacacatgcatgggaacatgtgcaggagtatgtgcgtgtgtgtatgcgtgacagcatgtgtgagcgtgagtgtgcatgtgtgaacatgtgcgtgagcatgtgcaagtgggcgtgcatttgtgtgtgtgtacgtgtgagcgcatctgcgtgcctgtgcacgagcgggaggggtggctggcctgggtgtgcagggagctgggtgtgaggaccatgctgtccactgctgggtctcgcccaggaggcggacctcatgctcggagccacc

SEQ ID NO: 27934 - DNA, 1416 bp, Artificial sequence
  DNA replication origin
ccccctctgtacctcccagaagagccagcgcttgtattgatgtctggtctcggggaggggctgcagcaaggggagcctctcctcctctgcccctgcgtcccacgggccctgggcgctggctgggcttggctgcctaggggtggggccctctttgggtgagaggacccttcccctcgctgccctctcgccttctcacatggtcgctcactctggaatctggacttcccctgctgcttgcagctgtcccatgtgacccctgacccactggtggccacaggaggagagagaggtgccctctctgggtccttattctccacatctgaggccaccacggacctaacaggtgagtttccaatgcccaccctctccctctctcttctcctgcctgcctccactgaaggcagccttctctgtgccagcgagctcggcctcactgcacggctctcccgaggctgtgccccagccctgggcacccatgctgtgagtgcaggcaggggggttcatgtgctcagcaaatccattcccctggtggggaggaaagtggccctgggccctgctgctggtgaggtgagccttgccatcatggagttcagggcacctcgctctgccttgggctgtttcggatgcttctgagccccagagacatctccagtacaaacacaaggtaagtggtaagtacctcaggcccttgtggaatcgggattctgcctctgtcatcaactgccagttgtacttaggcaagttatgtccctctctgagctccaagttcctcatcgtaaattggggaaacccctcttccccccacagtacctggcacagggtgcccggcttggaggatgctggaaaggtccagccccggaatttaagtcactttctgcccagcaagctgggtccacagagccccagagctcccggtcgtccgccctgacccagcgtggactcggggactggggcactcaagccctgccaagccctgctccccgtgctgtcctggatcgagcctgccagcagggtggctaggtcgggacagctgtcgtgcatggcaggcgaaggccatctccctccgggcttgggtccggtggcgctggcggagcaaggctccggggcatctctggctcgtgtggtcgtgccaagggtgccattgcggatggacggggccatgcgggccgggtcggcctcctggggagaaacgggtgggcgcaaggggatcggcgccatcgagggtggagaaaccgcagggaatttcggctgtccgctttggggcgccaaggaagatgttcgtcgcccacaatgtcaaccttgagccaccacggcaccgaccagtcgtctaggctctcccgtcggaggcggggccgccgcccagggtgtgcgactattgggtgacggctgacgcgcaccgccctcctttgcacaccg

SEQ ID NO: 27935 - DNA, 1855 bp, Artificial sequence
  DNA replication origin
tacgccgccaaccctgggcagctcttcggccgcatccccatgcgcttctcggtgctggtgaggacgggcgagggcgcgggcgagggtgccggcgcgggcgggcccgggcgggggcgtccgtcgaccccgcggctgtgacccgcgctcccttgcagatgcagatgcgtttcgacgggctgctgggcttccccgggggcttcgtggaccggcgcttctggtcgctggaggacggcctgaaccgggtgctgggcctgggcctgggctgcctgcgcctcaccgaggccgactacctgagctcgcacctgaccgagggcccacaccgcgtcgtggcgcacctgtacgcgcggcagctgacgctggagcagctgcacgccgtggagatcagcgcggtgcactcgcgcgaccacggcctggaggtggggccgccgcccgggccccgccccccgccccggggtttggctctggccccgtggaaggcaccgatgggtaacacgtctcctgagggtcccctggccgggctgggtcgggtgtcgctgtctccagcaatggggtggggagaggggtctggggctgggaggccgggaaaggaggggcgggggtgggggccggcgctggggctccctcagggctgtgttacatccgccttgctgcctgccattgccaatcctgggagtgggggagtgggatcggtggggaggaagggatgggggaggagcggggattgcttggggagttgggaaacttgagcacagcgggggttgtaaaacttgggaacctcatgttgggcgtgaaggctcttgggatttgtactttgtggtctggaagggctggactgcgggtgttcaggcttcgttgggtggacggggggagcatggggtgcggaccccggggtggggtggcctgggtacgaggggggggagtgcatggggtcagcctccacacttgcttggggaggagggggctgcactgctccgagggagctggctggcttctgccaggccctgcgtgggtctcccattaagtccttggcaaagctggctgctcataccctggcctcatagcttccaggcccctcctgctggaggtgccattgtgtggcaggcctggccccaacccctacctcctgtctgcgcaggtgctgggcctcgtgcgggtcccgctgtacacccagaaggaccgagtcggaggcttccccaacttcctgagcaacgccttcgtgagcacggctaagtgccagctcctctttgccctcaaggtgctcaacatgatgcccgaggagaagctggttgaggccctggctgcagccaccgagaagcagaagaaggccctggagaagttgctcccggcctcctcttgagggctgcctgagctggtggcaccctcccctgggccggaagactgggaattcctgctaagtgtggcttctagagtgtttgtgtgtaccccgcttctgactgcctagggcgagtgggcatcctgtcatcatctccactgtcccaagcagtcactaggtggcggccgggccagctggaacccagcccatcctctcaggcagagcagggtggtccgggcacactgggcctgcctctccagcctcaggatgctcttgtttattctgggctcagaccctcctcttgtacgtctcatcacagctggtagagacccaggagtgcctgattgtcccacaggggtggcgcacagctctgggaccactcagaagatgggatgtgtgggtggaggatgccttgtctcggtcagctcattcctgcctccttcctgagccagttcagggcctgggggagagccagcttggggtaggaagttaataatactgttaatttgggttgttgttgga

SEQ ID NO: 27936 - DNA, 1736 bp, Artificial sequence
  DNA replication origin
catgcctggcccggtgagggaggcagtgtgcccagctccatctcagagctcggtgtgagagcagcatgtcccgggggaggccctgtgctacggcgggctggggatgttcttggctctcaaagccttatcttgagttgtctgggctccaggagcaaaagacacacccctgaacagcagaggacagggcagtcagggttgctgcattggccagtgcctcatgtcatgtgaccagaactgagcccttcactagctgttcttaaattttattttccaaaaaatggcattttccaggtgccccagtcctcattcctaaggtcccacctcagttggcacctgtgcgtgtatatggatacactttccccccagggccctgcctggtatgggccagggcagcccatgaactctgggcctcaccacgaggttctgggtgaggccctcgtcccgcctcagtgctggcccgagctgccgagccagggccgcagcccccgtcttgcctctgtctgccggctgctcccggggcctgatcctctggcccccactgggcctgggctgcacatggcagctacctgctcactgtcctcctcactccctggcacacagcttcagggtggaccaatcacccaacgtcagattctgaaagaaaaagccccggtgagaagggagggggacaggtgggtgcatacccacacctgcagccgcccagacaggccctgctgctcccaccacgcgggatccaggctggcagacactcaccggcccgcaggctaggtctcccgccacttcttcccgttcagcacctgcagcttctccaggctctgggtcactaagcacagtgcttgccctgaggaatgatgaccttgagcctctcccggccaggctcaggagggctgggtggtgctgccccggggtctcagctgcaggatgtgacctgcccctcacccgttatggccccagccccgaggtcagccttggggtagagagacacaaacccgctttccctggaaaggggtccctttgcctccctcggaaacaaaaggagcgctcagtcgtctggtccccggagactcacccatctcacggacacggtcctccagggctcccgagagctcggggaggctcatggcctgcagggacgcttgccagcccttggagtctgtggtgcaggtgcagggaccgagttagctgggggtctgcgtccccacaggccctgctttattctgagcccatgcaaccaggagaacctgcttggatcagaacctccctacccgcctgacagtgtctaagcaacctcccaaggccgaggcagggaagccctgttgtgcccttcctcccacaggctgagcaaacactacgaggcccgggtcagcccgagagaaggcaaagctctgccggtggggacccgggtctgggccctggctggaggctacagaagtcactggcggtctcagcacagcacagccagccaaggcacagggcctttctcgagtacctcctacccctgggggataggcagttttcctgtcacaggtgaggaagtgggcttgggtccccagggccccctcttttccttggactctgggatcatgtgcacacagggacctgggagagtggctgccggccggagaaccaggccaagcccactgggtcaaacctggcttcagggctcccccaccttcccctctgcccagtgcggagtcaggccactgctcttaccagctggggggacggctaggccc

SEQ ID NO: 27937 - DNA, 1596 bp, Artificial sequence
  DNA replication origin
agagcccccacctcagaccttctaggggagggaggggctcagccctgtccttgcagctggccctcatgggctgggccagtgccccatgaggctgcactaaagagcaggagggcgaccggtgcagattcccggacccaactcctgcctgggtctgcctgcaggaaggaagggcctgatgaaatgggggtggggtggctccagaccctgaaatccacccctcagttacaaaatcaggaggaaaggatgtgtgggggcccaggggccaggtggctgaccactggagacccagcccagggcagctcagagccactcaccgcagctggtccaggacgagggcagcatcccgggccagggcccacgtctcccgcagccgggcctggaggtcctcgcgggcgcggtcctgctccagcaggcagctctccaccacggcgcgcagctcctgctcctgacacacctggccccgcgtggcctctacctcctcgcagcgctgcaggggggtggggggcgcggggaggctgggaggtggccggtcaagccagacccttggccacggccctgtcctgtgtgtggggccctctccccactgcatccacctgacccctccacacagcacccaccttttctgtcagagatggagccaactcacgggtgtcaccctgcccccccatcccccacccagccactcaccttgtgcagctggatggcgagctcctgcatctcagcctccagccggtcggcgtaggccagctccagggcatccccgggtgggcgggcactgctgtgccagcgggcaatggcggacgtcatcttcctcttgggcccaaacagcctgcggggggaatgtgaccaggatatgcctcagcgtcccaagagcgcttacatgagtgggagtttgccccaaccccgggctgagggccagagcggcccttctggacgcacgtgatgccaatttccttcaggtcgctctcagtgagggtcagaaagatgcggaggtccacgtcctgctcctcaaacacctgcaggtacttcagacacccgatctgctccagcagtgcggcaaggtcctggcaggcacaggggacaggttgggggaggtagtggctgacgacgaagcagagacgttttcctccactcggagccccaccacttccccaggctcagaaccaagacagtgccttgtgtgtggcgcccaggctgtcccctcctactctggtggctcaggcagggcaggatgttgcaggcaggtgagtcctcacactatggtcggccacgtggggacaatgtatgttcatcaccagaaactggcctcctcctcccacacatgctcagttctgtgaagggaccatggagctgctgatctcgacaatgctttgtaggcggagagcgctgccctctaattctagagtctcagtgtcggatgttctgatttccacttgtctaagcgcagctcttctccgagttcacctgtctggagttcaccgagctccctggatgtaagatccgtgtttctgatccactgagatggtcaggctgtttctcacccatcgtttctgctctccttctggaatgccactgtatggggtggtgtcggtgtgc

SEQ ID NO: 27938 - DNA, 1161 bp, Artificial sequence
  DNA replication origin
gtggtgtttgtcctgctccgtccccgccctccaggggaaccaatcccattgcaggagaggcaggacgcgcaaaggcccgaaagaggagctgggcggggtggggggaaggcggaggcagtctagtaatgtaaagctccgctgagagggagagtgctgaagaaggggacagcctctgtacctgcggcgcggcccgaggggcggacgcgagcggagtgacgcgctggaggctgtttatagcgctgtcaggacagcgcggggagtggaggcagaggcctgaggtgaggggcctcgggcctgctgcgcctgcagggagttgaacaaaacgcggggaaatacgggctgggggtgggtgagaggaggagcgatgggctttccacttccacagctttaaaatttaaaagctcgacccgggaggctgttggcgtctggttgccataacaaccggcagcctcgtggcaggccggctgggggcggggctctgagaaccggggcggggctgtggcggggctaacaggctgcagctgagaaacccaccccgagacggagccggaaggccgttattcagaggcggctccgagcctccccttcgccttctggatgctctgagctcctcaacttggcgttcagggccctgcattgtctggtccgttttcaccggagagtccagcaactgacactttcttcccttaaacctgttgggcggttcattcctttgagctactgtacatgctcttccttctgccggtaatgccgttccctcccctattgtcttgtccgcctgaagggtttatcagagtctctggaggccctcttcatcccgacgattctgttgccctaagaaatactgtgccctgaattgcggaacagagctctagttacaaaaaacacccgctggctgtgtgcaccagatgcgtccccaacccgctgctcccagttcagagtgcaccaagcacctgccctattcccagaagtacagaggaagcaagcagcccccaattcacatctcctgccgctgccctgattggggatgaacgggcactgactgcagggccaaagccacagcggcctctcgagctgcagagttctcctgacactggctctagaggaccctcaccccccagctctcaagctcaagctccccagccccctgaataacaggac

SEQ ID NO: 27939 - DNA, 2288 bp, Artificial sequence
  DNA replication origin
cccaggcccttcaggagccagccccacgaacaccttgagtgtcggcttctggcctcctgagtgtgtctctgtggctgaagcccctgctctgtgtcacctgttctggctgccactggacactcagagcctgtccttgcccttgttctgcacccagtgcccagcttcctctgcggcctgggcatcccaaatgtcccctgctggcctcatactgggccatgggaggaaacgggcagctggcaatgctttcggaccaggctgtctagcagtttcctgaattctgtgcccagggatgagagtcctggaaagggagtttcaggcctggtgatcaggctttggcaccggggcctccaggagccaccggctggagcgtcggcaaggagcctgcccccatgtgggtccgctggtgcttgtgcaggtcggtgccccggcggaagccccggccacaggccgggcaggtgtagggcttctcacctgtgtgcgtccggcggtgggcgctgaagtgcgagctgttgttgaagcgcttcccgcactgggtgcaggcatagggccgctccccgctgtgtgtcctgcggtggatgaccaggctggagctctggctgaagcgcttcccacactcggggcacgggtagggcttctcgcctgtgtgcaccctctggtgcgtgctgaagttggagcggtcgctaaagcccttcccacagactaggcacttgtaaggccgctcgcccgtgtgtgtgcgctggtgcttggtcaagtgggacgtcttgctgaagcctttgccacattcggggcaggtgtacggcttgtcagccccatgggaagcccgtcttcctggtggggggccgcctcttggctgatcaggcctgaccaagcccctgactggggctggcctctgacctgggagcgggtggccaggcccctggcatcgtgccgagagcactcggtaccactccattctcaacggggcatcctccctgccatcaccgccgtcctccaactggatcccaggtcctgagacagagaaagcacgatctctaggaactcacagcaagagggcaagggaaatccttctaataggaaaatgaaggcctcacagggctcctaaggttcccctacaaaacatttagcaggggctgggcactgtggctcacgcctataatcccagcactttggaaggctgaagtgggaggattgcttgagcccaggagttcaagaccagcttgggcaacgcagtgagatctcgtctctacagaaaataaacaaaactagctgggcatggtggcgtgtgcctgtagtcctagctactcaggaggctgaggtcggaggatcacttgagtctaggaggtcaaggctgcagtgagctgtgatcgcgccactacattccagcccgggtgacggcatgagaccctgtttcaaaaactaaacaatcaataaaacaaacaaagaggaacgcacttgaccatcacaataacccagtgggtcagtgctgttaccatctccatcctgcagatggggaaaccgaggcacacaagtgttaagaaacttacccagaatcaccgggctgctaagttacagagtgagggccatcaagctctgcactctgctgtatcctctaagccaggggttcccacccagtggcaaggtctggagacatttttgttgtgtctggggagggggttgtaaatggcctctagtgggcaggggccagggctgctggaaaacctcccacccagcacaggcagccccacgtggagagccatctggcccaaatgccagcagcaccaaggtggagaagccctgctctgggctgttctggctgagcagagcagtcgtggctcccagccactggacctcccttgtcgtacttggtgtggcccctgaggcccctctgcagatccaggttctagagccaccaccaacaggacaggagaacagggagaggggcctggaatgatccaggctttgcccctttcaggaaaaagcccttgacttctctgctcttcctttgcagcatgagggtgactgcagctggggacctggtagcacaaagtgcactggggtgcctggggggctgggggagcagccgtcttcatagcagtcccgcaagaggctctgcgcatggtaggcacacgccatgctgacctcacaggggagggacagaaccacccactgcccttggaaatgtccactttaagacactcccagccccagacctcctgggcgaatccttcttgccctcccctcccatctccaggaccaacttccagatagccgaaggtgggtttggcacg

SEQ ID NO: 27940 - DNA, 794 bp, Artificial sequence
  DNA replication origin
gaacttcagctcctaactaccaggttaacgtagtttgcccctaatcctaacttgggcatcctaaggcccgtctcctatgctggattctcgctgcttttcctctttggttgaacatgatccggagtttccctctgcctggggtgcccaggaaagagtcccagcaccgagttcgggtgagcagcaacgcagcatacacagcaggcgtacactcaacgtacgccccgccccgcacaagctccgccccgcatgcgcgccccgcctcgcatcccggatctacccccggaatctcgcgcgtctttcccaaagcatcggctaggactcagcccgccggaaacaaatttggggacgccggattcaggaagctggcaggactacatttcccagagcgccccgcgccctccccggaggcagattcctgggcgctctagagggggtgggttggcggcctggagggtctcctcaagtggcggcactgccaggggctcggaggaaggggctgcagtctcccggtggcagcgtccttgtcgtcgagactgcgggcggttcccttgcgcgccctgaacctcagtttccatatctgttaatgggggacattaaccctcaaggttgtaactcattcaagaccattcatccaggcataataaatgcataaacgctgcacgttgagtcctcccaactgcccccttaactaggcgctcgggtgatggagtggtggcaggtgcctgctttcatggagcttgccatgagaggcatacagtggacaaaattaccatgagaggcatacagtggacaaa

SEQ ID NO: 27941 - DNA, 1042 bp, Artificial sequence
  DNA replication origin
ccgtgaggcagagcttgttgaggttgatgtagacgttgaccagcaggtcggacggcagggcaggggcgaacatccgctgcgggaggcaggtgggatgaggccctcgcaagcccccagcccaggctggatggagcggggctctgcagtcactcatggagtctgcaggggatcccagtccccaccccagagatgctcttctcatcaatgggggcttccagacttttcccaggtgccccaagtatctcctgtgctgtcaggtttgggaaccactaacccgaaacagggttaacgtattttaggggcacaggacggaagccaaggaccccatcccagaaacctgcctagacagaatattccacctataatctgggagtggcacccctccgcgtccatcctgagggcaagctgggacccactgtgggacccctctcctgcagcaggggctggcaggggcactgaccgtgaggccgctggcggcgatctcggggagggtgagggtggcgggggtggtgagccggtttcgggctctggtcagctgcagcatcactgcgtccatcagctgcagggagaggcggggttggctctgcgtcctcccgtgtccccatgcattaaggaacaacagacatggtagctcccactcccacccagcccagtggctactgttcccaggtcccgaaacccggcagcagggacctgttaaagacaggtagttgggctccagctgggtatggaggagggcaggatgtctgcactaatgtcagtcgggatggggctgattcactgcacggggatcctgggtgctggatcaatggggaatggaaggtcctgggaggtcagtcccaggggcacaggctttgtggacaggggtacaggcaacaaaggttggttgtaaagggccagagagggcttcctggaagaggcgatggatgactgggttgaggttttcaggggggtaagccagggtcacggctgatggatggtgggaccacctggagcccattccttccctttgccgtggagcagagccctggcagactcctca

SEQ ID NO: 27942 - DNA, 2143 bp, Artificial sequence
  DNA replication origin
ggtgggggcggagccagacgccgggggcggacgggaggaccggaggaccgaggacagaaagattggtggacaggagcagcggccggtggggagggcgctcggcggcggcctgcggccatggccaccgtgatggcagcgacggcggcggagcgggcggtgctggtaaggcgcgcgggccagcgggcgggccggcggggcggcggggccgggcgcgaccgccgggtctgtcccgcaggaggaggagttccgctggctgctgcacgacgaggtgcacgctgtgttgaagcagctgcaggacatcctcaaggtaacgacccgcgccctgccccgccgggcgtggcggccctccctcctcatttccctggctccacctggggccgcgcggctgcgtcctgagcgcctacagtgtgcggctgccgcggctttcaggcagggccccgcctccgcgaactcgagccgacctcattatataagtacctgtgtgcgggcaggggcgggtcccgacgagggtgctagcaagggcctgagtcccgcccggcctcgggtcggggaaggccgccttgggagcagcggcatccaatctgggagccgaagaattctgcctctgcctggcagtgtgacttcagccaagtcactgaacctccctgggcctcccttttctcattggcaaaagggagataacagtacccgcttcgcgaggctggggtgtagataaatgagccaggcagctcacagaagtaaccggcgtagtgcttgctgtggcccaggaccgcgggttaccataactactgccttgttccctgactctgccccttgcccctttccccctcaaccaagctgggaggctgcccctgtctgttttgtattccccgaggcgggcacacaggaggtgttcagggaatgtggtataagcagagatcgggctcacggttaggtgccctgggggcttgggcagggtcttcccaccccagctgaacccaggtgaggccaggccacgttgttccttccccccgctgacttggagggaggggggcttctggaaggagcactgggccgggcctgagtgggcgctaccagctcccctccttccctctgttccacaggaggcctctctgcgcttcactctgccgggctccggcactgaggggcccgccaagcaagagaacttcatcctaggcagctgtgggtgagcctgggctaggcggaaaccggggaaatgggtaccttggggggtaggaggcatggccatagccctgtcctgcagaccagctggttgtgcgatgggacaggaggggcagcccgccgggagggagggctgggtggtgggggggtgaccacaggcaccgctctgacgccacatgttacagcacagaccaggtgaagggtgtgctgactctgcagggggatgccctcagccaggcggtgagtcccccggccctgtcccctcccatcctgccaatggggaagagcatgggagctcccactttctctctgtacaagccctgcgactctgggcgggacccttgatctctctggcctcagttttctcctttggaaaatgacagcaaccctcacaccttctcccgggatcggtgtgcagattcagtaagaggtgcaggagaggggttctttgcacacggcctggcctggcgtccggaccagtgaaacatgggcattggtggattaggctggccacacatcacagttgaatcagccaatgcctgaactccagtctgcacccgactctgtgccaggcaccaaggcgtggggggaggcccccctcctgggctccatctgttgccctttgtagacactagatgcaccccgttcgcacagagcctcacagaggctgcctttcctcttccccttcccctttcttcacctctttccatttcacttctttgtggctcttcttgggcctggtttcctgtttcctgacctccctgttcaacccccaaacggccaaggcattgggagaccctctgccctatacagcggccaaggcctgaaccaccacacaccccatttctgccctgggcttaagggctcagagtggctgtggcaggaggtgcccccccactgcccagctcaccccactcttgcctgtcaggatgtgaacctgaagatgccccggaacaaccag

SEQ ID NO: 27943 - DNA, 1389 bp, Artificial sequence
  DNA replication origin
ggcgtggccagtgacagccggcccccgtcacgtggtcgggcccactccaatgggcggcgccggggcgacttgctgttcccggcggcccgtgcgtcggcggtggttgggtggtaagatggcggctgtgagtctgcggctcggcgacttggtgtggtgagtccgagcggccgggccaaccgagacgcgccggggagctacccgcctgggcgcggggttcgctgccggccctggagctgcctttttatgcgctccaggtcgcggagagaggggaagagaaggtgccggcgcttgcgagcggcgccaggcggaaggggcagtccagtcccgggggaccgaggccgagggtggccacgtcgggcaccggctttgatccccgaggccggccgggtggggtctgcactcggggcccagatactggcggcccccgtgaagggagccgccggtgccgcgaggcttccccggacgaccggtccccggggtcttgttggggcttcccagaaagcagaagcgccggggaccggacctgcgagatctggccggtgccattcggtcaaagcccaggttgcgatgcagccgacctgtgcggccggctcagccggggttgtctaaaccggactgctggcgttgccccgcgaagaaacggcggggggacttctcctttacaaccgatggcttggcagtgaccagtgcacgcttgggtgcctcccgcggtctgcttctgtgtcccagacaaccgcccgaaccaagactttgtcgccgcctccctcgagctgcgtagcttgtttctccacccagaggaaggcttccattagcatttgtcaaagccaggcaggtctcctgttgaattaaaccagacttagggagggaaagtctgtgtttacagaggaagctgtcctcccacccccgtcattaagaagctctagacaagtgacttttgacagttgtgttgttctgtattccttgtcaacagaagaatggatatgcgttgtgcacataagtatacaattttgcattttacttctgagggtgttgggcccagctatgaaagcttttgtttcggcatttgaggatgccagcagagatttaggaaaataaattgcgtattgagtgggttgaaggagatggactggcttttgcagggcaagtgttgactctttgtgttttctctagggggaaactcggccgatatcctccttggccaggaaaggtgagtgtcttgctactaaaggaagagatctgaagttgggtttgaagaggtggagaatgtaagatgcattcctctcagtttctagtattgagttaaattgggctcattcagatggcacttagaattttttttcccctagtatcggttattttttaaaaggcaatgcagtatacaccagatca

SEQ ID NO: 27944 - DNA, 1092 bp, Artificial sequence
  DNA replication origin
atgcaaaagaagaaacatgtggaccgtacaagcagactccagccaccaggtttattttcatgctataaataaatttccctattagttcccattttcttatgttctacatgagatacagagacccagatattggcgtggtgaataatcaactgttttgtatacctaaataccagtgagataataagcgagacttgtaaagcactgaaactaaggctaacagcagcacaatccactatcaaaggatttaaatgccagaactgtgaaacattctctgtaggtgccgggacagtctggtggctgacaattaacgtccactccagcaccgagggctggacacttgtggtttctgttcacctttcctggcttggagcccagatctgtctcatgagcagagtaactactgaggaggcttctcggatggaaagttggttttaagccagaaatctggagagatgtcatgccaggcagcagcccccacgggcccaggcctttgtggggcagtgtcactgtctggtgtgccaccagtacccatgctgcaaggagtgggcttggctgctgtggttggcttgtccttcagtggttttcagattgtgtgcagttatcatgaggagtttgttgctgggagtgtacaggaaaagggaggaaaaggcatcgcagttgtccagtcattggaggatgaagtacgtcactcagggtgaatgatggttgggacgagagttgcctgtcttcagccagtgcctgtctcatatgtgggcgggactctgagcagcctggcagcgagggtatgtataaaatgcttggcctgcaccagggcaagggagaggacgacaccaaggaggtcactgcgtcgtaggagagggccagcgtctgccgttacgaagagttgcaagagctgtgcctacttctgcccagataccaagaccgccagctcctggatggacatatccttgttgacatagcggtcatactgagcaggggtcagcctgccactctgcagggcctcttcgatggagaacttcttgccagacttcctgtcgtgtatcactgaggactccccattgggacccttcactgagatctcctcccagtcgc

SEQ ID NO: 27945 - DNA, 968 bp, Artificial sequence
  DNA replication origin
cagaagaaacaagtggatctggagagggaaagagcttcccaggaagagcagatcgcccggaaagaggaggagctctcgcgggtgaaggaaagggtggtgcagcaggaggtggtcaggtatgaggaggagccaggcctgcgggccgaggcgagcgcctttgccgagagcatcgatgtggagctgcggcagattgacaagctgcgggcagagctgcggcggctgcagcgccggcgcaccgagcttgagcggcagctggaggagctagagcgcgagcggcaggcccgcagggaggccgagcgcgaggtacagcggttgcagcagcggctggcagcgctggagcaggaagaagctgaggcccgtgagaaggtaacccatacgcagaaggtggtgctgcagcaggacccgcagcaggcgcgagagcatgccctgctccgactccagctggaagaagagcagcaccggcggcagctcctggagggggagctcgagaccctccggaggaaactggctgcactggagaaggcggaggtcaaggagaaggtggtgctctccgagagtgtccaggtggagaagggcgacaccgagcaagagatccagaggctcaagagcagcctggaggaggagagccgcagcaagcgcgagctggacgtcgaggtgagccggctggaagccaggctttcggagctggaattccataactccaagtcatccaaggaactagactttctgagggaagagaaccacaaattacagctggagaggcaaaacctgcagctggagacccgaaggctccaatcggaaatcaacatggcagcgacggaaacacgagacctgcggaacatgaccgtggcggactctgggaccaaccatgactccagactgtggtccctggagagggaactggatgacctcaagaggctctccaaggacaaagacctcgagatcgacgagctgcagaagcgcctggg

SEQ ID NO: 27946 - DNA, 859 bp, Artificial sequence
  DNA replication origin
tgcaaagcaggtatttctcttatgccccctccagcctgtcctccagccactcagcaaacagagctcaagtacctactgtatgcaaggagttgggacacagctgtgaacagaagagacatggcctccctgcctggcactcacaacccagtctgcaaggccaccaggaaggccagtcaaaggatgagcctcatggaggtgactgcaagtccctccaagtcagtgtttatgaaagaaatgctccagaggtggaacgaggggacctacttcagctctggtggtcagggaagcctcttcgtggtggagacacaagctaagaacaaaggatgaaagggacagtgttccagccacaggaacagcctgtgcaaaggtcctgaggcaggagagagcgagctacgactgggccatagtgaaaaggtctctgtggatagggaggaaacagggcaggcggggggcggggagggtgagcagctagaacacacaatggctgcaaggagggatcctgcacagctccatttgtgcttaaaggcgatgcctccaggggctctgcagagaggacagcaagggtgtgggctgggagggcaggcagtggtctgtggcagcagccaggtgacagcgaggtggcaccagcaagaaggaacagagccggggggatatctggaaggggccgtcgatggttgctgatgagtacagggcttctgttcgtttagggaagagcaatgaatggcagccgggacagtaggtttctaatcacagcgggttaattcactgtgtcaatattcaagaagtctggctgtgagtctacaccatgctaggtcctggggatgaatccctgagggatccccagtcccgcaggggaggc

SEQ ID NO: 27947 - DNA, 2270 bp, Artificial sequence
  DNA replication origin
ggcacccccgtgtcccagggtcgctcttgcgcagagggtcgcacaggaccgggaatagtcacctggatgagggggcggagtttttggaggaccgggcactcaaggcggggtcgctgcgggcgacccaggaagctccgtccagggggcgccctgaggcagggaaactgagctggcgtcggggggcgctctccagcgcctctgagaccgcgcaagtgttcctggcgtcggggaggcgagggatgggtgtccggagggggcgggccacccgccgctgcacttcccggcacctgccaccctgcgcgccagagccgcgcccggaggccctggggggtgtggggtcgggtcgaggggcacagggggaggcacccccttacctccccaccctctgggttctgagcggaggttgggcggcttcggggcctcctcttcgaagctcggtttcgcaggggtgtggctccctgcccccaccccagccccgaaactggcggcgtctctgagccgcgggttcccagggcggcctgggaggggaatggcatgtcttgatgtgtttgcagggagaagcagcccacgtcccttttgataagcctaatgtgttcacttaataaccggtttaggggagcctggtggagatgctgagattgacggagggggtgggaatccagcccctgccttatatccccacttcggaaaatagagtgggggctctgggctagcaaggaccattttgccagcttctcggacaagaggcttcaggcaggtgaggggcccgcacattacatggctctcctgtctgggagttctgcccccaagctgctctcactgggagcccccactgtgccctcaagcagctcctcacttcttccctaggcaaggagaggcctctgggcccagggctcccactcaacccctgcagtccggcctaggccgaccagtcggacaggtgcaggcggcggggccctagcacgctggagtgcgacactccattccggggccttccagccctttcagaaacccccctgccctgtgatcccacccacccgtatctccgtttgggctctttcaagctcagaggcattacccgcctttagagatttccccacccctcccctatctttcacaaccccagagactgggcagggcctgcacacccctcctccatggctgcgtccagctggcactcagacccaaccagaggcccgtccagtccctgcactgttccctggggcattgcacaattggatgctccgtgccagccgtggagaaccgttctgtcctctccaccccagagactagacccatccagtccttcacacatgcagacacccacataccagtggtggggccaggcctcgccccgccctctgcctcctcccagcctccctccttcgtgcagctctccatcctgaaggccccagcttggacctaacaaaaggttctaatgaacccagacaagctgggaggggtgcgggctttcccagaagcatgaggatgaaaggcatcccatcctttatagctgcagggactgggagggtctggggtggcaaagatttggggtcctgccactctctgtatatctggcccaaggcagccacggtctgtcctaggctgatagccattggtcccagatctccatttagacgtctctttctccaggaagccctcctgattctctccccagcctggggtgcaagaccattcctttgagccttgccaccccagcacagaatgagcacagccacagccctgagcagatgtcagatgcctccccgggtggtctccaagcccagtgcatccctctgccccctccccttagtggggactagttcgcagactggattgtggggtgggggtagccctgtaccccatcctctcaaacgcatctcttgaacattgcctgatgcccagccagccccatagcaagtgtcttggtgggggggtggaggggacagacttgcggctctaggctgtggtcgctggtcacagggagtggatccccaagttattccttcactctgagttttccaggggcccgctccattgtctgggggaggacaaaattgctggtgagattcagcatggggggcagtaggagctccagcactgagagcagaatgcctcactgttgatcctggcatctccaccctggagcctctcgaagccttgttttccctttctgcacagcacgggtggtaatactgagtgtctcatgcatagggctgctgggaggagcagtgctgtagcacacaggaggtgcccggatgagggtagca

SEQ ID NO: 27948 - DNA, 2046 bp, Artificial sequence
  DNA replication origin
ctccgggtctgcacagtggggctgtatttgcctttgtttctcttcctgaagagcgagttcatggtggcgctcggggtgcgggcggcggcggctggcgggccgggcgcgcaccgaggggcgggcgggagcgcaggtgagcgagcggcggcgcggggagcccggactgcggcgcggcagtggctccgggtccctactcgctgggggcggggcgcccgccggccactggctctgcgggccgctccccgagaaggtggtgcttaccttcccgaggaggggccaccgcgcgggcggggcttggacgcgggggtggggacactgggtcttggccggacgccgcccacccccagccgggggactccggaggccgggcaggcactggggcgcaaaggccgccggggcgagcgctcgcagccccaccctcctcgggcccggcgcgcctctggccgaggccttcacctggttctgcgctaccgcggaactcggcgctcctggtgctttggcggacacccagctgggccccgcaagacaggtgcggcagagacccgcacggattcatgtgccctagtagctagcgaattgcactcagatggtggcaattgagggaagggggctgaactgccgagggcgccggcctgagttcaagccctgccacccccaggttggctgacactcctgggcaaggtgttttactgctcccagccacagtttacttctttgtcaaacggtgataaccaccaccccatccgaaaggcctgtggggatgtccctgcaggtaatgcacgcaaagcgctgagcgcagtgccctggcctgaatctgctctccgcttgccatctcgggtggacaaaaactcctttgaaacttcaataactccaggccctggcactagaagagcgcttcatagctggtcataaaagctgctcgattgcggctcagaacaacgacgttgcacaattctgccagcatgtcctggcccagactgtgtgccagtggaggaggctgcccttagacagaaacctaatctgacctgaagcccggatggcacacaccaccacacctggctaatttttaaaaatttttgtagaggcagagtttcaccatgttgcccaggctggtcttgaactcctgtgctcaagtgatctgccggcctacagcctcccaaagtgctgggattacagatattagccaccgtgcccagccaaccttattcttaatggggcttctatgggtgggcttaacccatttatgcctgaggttgcaattttttgaattgataaatcataccttggcagtgaccttgagcagtaggagataactcccacaggcgtcacgttccaataatggaccactaggcgtaaatagaggtgtgattcctcctaaagttgtgcctgcctgcctgccttccttctttccttcctctctctttcctttcttgctttcttgctttctttcttctttcttctttgagactcagttgcccaggctggagtgcattggcacaatcatagctcactgcagccttgacttttggggctcaagcaatcctcccacctcagcttcccgagtagctggatccacaggtgtccaccaccacgcctggctaatttttaaaacctttatatttatatatgttttttgtagagatggggtctcgctgtgttgcccaagctggtcttgaattcctgggctcaagcagtcctcccaccttggcctcccaaagtgctgggatttcaggtgtgagccactgcacccagccctaaagttgctttcaaaatgtgtgtgtccaaatgtgcatttttctgggggaggatgtattgctcagtggagtcatttactcattcaacacatgtttcccatcactctcacagcctcagtgtgcctggctctgcttgttgtacacggatgagaaaagggaaaagaacaacacaaaaggggctttctctttgggagctttcaggtcccggggcaggggacacatattaaaaatgttaacttggatgggcgcggtggctcactcctgtaatcccagtactttgagaggtcgaggc

SEQ ID NO: 27949 - DNA, 1017 bp, Artificial sequence
  DNA replication origin
tcccctctccccagcagccacagtctcctttccatctctacgaattcacctctgaacatttcacaggcaggatcgtataatatgtgccgttgtgtatctggcttttcttactgagcctaatgtgctcacggtcaaccatgctgaagcgcatgtcaggccttcactccccttttttttttttttttttttttgagacacagtcccactctgtcacccaggctggagtgcagaatcgcgatctcagctcactgcaacctccgcctcccgggttcaagcgattctcctgcctcagcctcctgagtagctgggattacaggcgcccaccaccacacctggcttatttttttgtatccgtgagtggcttctgttgtgggttagattgcactgagtgccatgattggtgagcagggaaagagggtgggaagtgcagggcagattacaatgtagggaccaggtgggctgcgctgagaaggtgacttggcacaaaggcttggaagaagagcagggggtccacgtagagagtggggccaagggggcagccgatgcaaaggccctgaggcaggagcatacttggcgtgtttgagtattggggaggcggtcagtgtatcgggggtagagttagtgggagggaagtggcggggaagagagcagactctgaggggagcctgagggagggggtctcatgggttatctggctctgatgctgaggtactcagagtgtctgggaggtatgggacaggggagtctgctgacttcactttagccctctggttgctgtgttgggaatagattgtagttgaccacggtggaggagggggaagggtgcagagagcacggaggaggagccaggaggagggaggccaccaaagtgacctcaggaatctggaggtgagggggtgagaccctagatctcttgcccaggtagatgctgtaggaatggaaagggagacccaggagaaccaggaaggggaagctgttcctagagagcgcatccgtggagcggatgcagacagagga

SEQ ID NO: 27950 - DNA, 1103 bp, Artificial sequence
  DNA replication origin
aggggacttcctgaggtgtgaccaatctagagaaaggactgggctgagggcgtggtcaaacaagcgacatctaaaaataaggggcggggctagaaccagggggagttcgcctggggcggggccagagtggggcgggaccagttagggggcagggccaacctgggcggggccatggccggggacgtgggcgggaccaggtcaggggcggggccaggccaggatctccgctgtcccgggtcctggagctctctcggcccggcaggtttcgctcccgcccctccggccttccacagctgtcctggccgcagggtgttcaaggcgggacacaccaggctagagatccgcgatcgggccccgcctcaggtactgcgctccaggccaggcgggcgcgggtaagcgctcagctcccgagccaggcgggcttccagggcacttcccctaggctgcattcccaaaggctcccgagggcgagggtgagcaaagctgcggggacctgtgtgtgcatgcgtgtgcgattgcctctacgtgtgtgtacgtgtgtgtgcatgtgcgcacgggtgtgtgtgcgtgtgtgcacgtctgtgcacaccaggggaattgcgtgcgtggagctgggcaggtgcgtgtttcagggtgtgtgtgcaaagttggaggcgtgtgcaaaagcagtcccgtgtgggagggaaacctgcgtgtgtacatgtgtgtgatagagacagtgcctgtgaaatgtggtgaaggctgtgtgtgtatgtcagggtgtctgggaggaaaatgggagggcaggtgcaaggagactcgggggtgggctgtaggccagcaagtctgtggcaagctgcggggtgcatgcgtgaatagaaccgtgggagtgtaagaattgcaaatgtgtgtgtgtctgtgtgggtggccgtaaggcttctgggggccctcagtgtgaaggggtgggggtagaggaaagtttgggggtgctgactgctcttggaaggctgagcgtggtctggggccatggctaatgacagggaagctgttggggcttggcctggagtaatttggggggaatatcagccttctcaatttgaaggctggggagctgtgtgggtggg

SEQ ID NO: 27951 - DNA, 1079 bp, Artificial sequence
  DNA replication origin
atttttctcaaatgcttttcctgagaaataccttattttaaaatgtccccagagtccctgtgcttccttctgagggcaaaaactcaaatgcagaggcaaaacttatgtgccaaatcattgtccaggctctgctgtgttgggctctaacaggtgctagctggtggaacgattgttggtaatgacggcaaaatccctgccccttccagtggccagggctgcctttcccgtctgataagtgacacagcagataaggaggtcgcgctgggggggggggtccctctgccccccccaccacggccgctcactgccgctctgcccccaggcctacgagaagcgtttccccacgtgcccacagatcccagtcttcctgggcagcgaggtcttgcgcgagtcccgcagcccggacggggctgtgcacgtggtggagcggagctgccggctgcgcgtggacgccccgcggctgctgcggaaggtgggcggccctggggctggggggcggaggaggggacctgttgcggaggtgcgggagggctgggcgcgggagctggggaccagggcggcggggtccaggaggtggagcaggggcgtgtgagttgatatttggatggaggttccaggatgagggtggcgggaccagggcccaggaggggcgagggctggaaggctgggctggggagtagcgggaactgggcggggttcgcggggccagggccggagctgggtggtgaagatgggttggcggcagggcggaagtcgggggttggtgtcctgggtccgggctgggtgggcggtggcgcaagggacctgggactcagggcagggggtgactggggcaggcccgccggactcgctctccattcctgtgtgctccacgccgcccacccacctccgcctccccgccccttcccttgcagatcgcaggtgttgagcacgtggtcttcgtgcagacaaacatcttgaactggaaggagaggacgctcctcatcgaagcgcacaatgagaccttcgccaaccgcgtggtggtgaacgagcactgcagctacacggtgagcccaggccaccctcagcgcccacgcccg

SEQ ID NO: 27952 - DNA, 2052 bp, Artificial sequence
  DNA replication origin
tgtggagacgcccccagcttcccccgccagctcgcggggcaggaggggtgcgagcgactctggccaggccccagggacggggaccgggtcgcgcggccctgaccggcgggagcccaggaactcacgtggcgggagcgccaggggcttcagcacggagacccgtcccgtctgcccctggactcccgcgagccccgcgggcctctccgctcgccccgccgcccacctgccaggggaaggagcgcagtgtgcgtgccgccaggaagcggcgctcgaaactctgcagcaagagttcggtccccgcgttctcctcgggcgccatgacgtgggcggggccgcagcgttgccggcagaccgggcggaagcccggcctggactgaagagggggcgggcccagggcagtgagcgggggcagagagggggcggggcccgggggtcccccgggggtcaggaggaacgtcgtgggggcggactctagggcggggccaggatgattgttatgagggcggggcctggggtggggccaggataagcgtcgttggggcaggtcctgggtagggggcaggtcctgggtagagtccaggttggcgggtcctggggcggggccaggatagggcgatcctggaagctgggcttcagaagcgtccaggttggtggcgtcctggaggcggggccttgcgtgggggcaggataagagtcctggaggcgggcattagggcagggataaacgccattgggttcaggaggcgagactcggagcagagcccaggagacaggtcttagggcggcgctaaggccagacccagagaagagctcaggaggcggggccggggcggggcgttgactatgtcgtagcacatggccaggcggtgctcggactctgggaggcggagcttaggacgggccgacgtggggaggggcccagggtccgggaggcggggccgagtccgggctgcgggctgcgctcaggaggcgggccctgggaggcggagcttagggaggggccggtgtcgggagggacccagggactgggaggccggtcggggctgggctcaggggccgagacctagctgggcttggggcggggccgagacggagcgaggggtccagggcgtgggaaacggggaggggtttgaggaggggatcggaatgtggctcaagttcgggaggcgttacctgtggagggtttgaggcaggcccagcagcgaggccacggtctgccgacgcggggccaggggcgggccccaggatccggagcttagggcggggccgagtccgggtttggggaccgggaggcggggccggttagggcgagggtccctgggatcgtcgggtcaggccttgggccaacgtaggcactctcgcagttcctccgccttcaggaaggtctttttggcaggggccctacgggtgcgcgcttcggtcctggaggccttatccaagcctcctctccatcagcgccacccgtctggggtccgaaaggagggagctttccctctgtcccccagcctttggactgtcaccaaacaagccattcgttcaccaaatacttattaagcgcctaccaggtacctgacaagggagatgtaacggtgagaaaaactaggtgtggtccaggccctccaggggctcaggggctcgtggaagaagtggacattgaagtatttatcacacaaatgagtataaaagtacaatagcgatatctgccacgaaggcgagcagacagagctagcggggcttgcaggaggagttttgatcttgcagggacaggaaggaggagttagctcctgcggggtgggattgggggtggtggtgatatagacgtggggacagagtggaaaacaacaaaaatataattaatttagttcaaagttattgtgtcttgagttgaaaggcagggcagttagcaacacagttcagatttcagtactgcccctgaaatctgaactgtgttcaaagtctaaaacgtttaccttagcaaatccctcataaaactccatttggaagagtcccgagagctaatttgtaaagtatacttgcagaaggtagatgagg

SEQ ID NO: 27953 - DNA, 916 bp, Artificial sequence
  DNA replication origin
ccccgcccggccagccgcccagtccgggagggaggtggggggatcagccccccgcccggccagccgccccgtccgggagggaggtgggggggtcagccccccgcccggccagccgccccgtccgggagggaggtgggggggtcagccccccgcccggccagccgccccgtccgggagggaggtgggggggtcagcccccagcccggccagccgccccgtccgggagggaggtgggaggggtcagccccccgcccggccagccgccccgtccgggagggaggtggggggatcagccccccgcctggccagccgccccgtccgggaggtgaggggcgcctctgcccggccgcccctactgggaagtgaggacccctctgcccggccagccgccccgtccgggagggaggtgggggggtcagccccccgcccggccagccgccctatccaggaggtgaggggcgcctctgcccggccgcccctactgggaagtgaggagcccctctgcccggccacgaccccgtctgggaggtgtgcccagcggctcattggggatgggccatgatgacaatggcggttttgtggaatagaaaggcgggaagggtggggaaaaaattgagaaatcggatggttgccgggtctgtgtggatagaagtagacatgggagacttttcattttgttctgtactaagaaaaattcttctgccttgggatcctgttgatctgtgaccttatccccaaccctgtgctctctgaaacatgtgctgtgtccactcagggttcaatggattaagggcggtgcaagatgtgctttgttaaacagatgcttgaaggcagcatgctcgttaagagtcatcaccactccctaatcttaagtacccagggacacaaacactgcggaaggccgcagggtcctctg

SEQ ID NO: 27954 - DNA, 1250 bp, Artificial sequence
  DNA replication origin
gcgcccctcacctcccggacggggcggctggccaggcggggggctgatccccccacctccctcccggacggggcggctggccgggcggggggctgacccctcccacctccctcccggacggggcggctggccgggctgggggctgacccccccacctccctcccggacggggcggctggccgggcggggggctgacccccccacctccctcccggacggggcggctggccgggcggggggctgacccccccacctccctcccggacggggcggctggccgggcggggggctgatccccccacctccctcccggactgggcggctggccgggcggggggctgaccccccccacctccctcccggacggggcggctggccgggcagaggggtcctcacttcccagtaggggcggccgggcagaggcgcccctcacctcccggacggggcggctggccgggcggggtgctgaccgccccccccacctccctcccggacggggtggctgccgggcggagacgctcctcacttcccagacggggtggctgccggacggaggggctcctcacttctcagacggggcggttgccaggcagagggtttcctcacttctcagacggggcggccgggcagagacgctcctcacctcccagacagggttgcggcccagcagaggcgctcctcacatcccagactgggtggcggggcagaggtgctccccacatctcagacgatgggcggccgggcagagacgctcctcccttcctagatgggatggcggccgggcagagacgctcctcactttccagactgggcagccaggcagagaggctcctcatatcccagacgatggggggccaggcagagacgctcctcacttcccagacagggtggcggctgggcagaggctgcaatctcggcactttggggggccaaggcaggcggctgggaggtggaggttgtagcgagccgagatcacgccactgcactccagcctgggcaccattgagcagtgagtgaacgagactccgtctgcaatcccggcacctcgggagggcgaggctggcggatcactcgcggttaggagctggaaaccagcccggccaacacagcaaaaccccgtctccaccaaaaaaaaaaacgaaaaccagtcaggcgtggcggcgtgcgcaagcactcggcaggctgaggcaggagaatcaggcagggaggttgcagcgagccgagatggcagcagtaccgtccagcttcgg

SEQ ID NO: 27955 - DNA, 1039 bp, Artificial sequence
  DNA replication origin
ggggggccaaggcaggcggctgggaggtggaggttgtagcgagccgagatcacgccactgcactccagcctgggcaccattgagcagtgagtgaacgagactccgtctgcaatcccggcacctcgggagggcgaggctggcggatcactcgcggttaggagctggaaaccagcccggccaacacagcaaaaccccgtctccaccaaaaaaaaaaacgaaaaccagtcaggcgtggcggcgtgcgcaagcactcggcaggctgaggcaggagaatcaggcagggaggttgcagcgagccgagatggcagcagtaccgtccagcttcggctcggcatcagaaggagaccgtggagggagagggagagggagggggagggggagggggagggggagagggagagggagagggagagggagagggagagggagagggagaggagagcgagagctattttttttttttttagagacggagtctcgctctgttgcccaggctggagtccagtggtgtgatcttggctcagtgcaagctccgcctcccaggttcatgccattctcgtgcctcagcctctcgaatagctgggactacaggtgcctgccaccatgcccagattttttttgtagttttagtagagatggggtttcaccgtgtgagccaggatggtcttgatctcctgaccacgtgatccaccgcctcggcctcccaaagtgctgggattacaggtgtgagccactgaaacagtctccctcagtcactgaggctggagtgcagttgtgtgatctccactcactgcaacctctgcttcctgggttcaagcgattcttgtgcctcagcctcctgagtagctggaatgacaggcacccaccaccatgcccggataattttggtatttttagtagagatggggtttcaccatgttggccaggctggtctcaaacttctgacctcaagtgatctgcctgcctcggtcccccagagtgctgggattacaggcatgaaccactgcacgtggcccaggatggccttctgtaagagctg

SEQ ID NO: 27956 - DNA, 875 bp, Artificial sequence
  DNA replication origin
atggtgtcccggtatctgtcatagaagcttccctccttgggcacaaccttgtcatcactacaggtgtgttcaacagcactaaagagagaggaggagaagagaggaaggaagaaggggtagagaggagggagcaagtgggagtgagagggatggagggggaagaggagaagtctcagaaatctgcaatcatccactgcctgggagggaaaggggaaatctactctggccgtggtgctgaagtacaagtgccctgcaaaggacttcaaggcagcaaccaggccagcaagaaatgagagggagagggagagggggagggggaggggagggaaaaagggatggagaaaggaatggagggagagagatagagcgagggagggaggaaagtagaaataaaaagggagggagtaagagagagggagggagggaaacggaggaaggaagagagagaaacagagggagagagagagaaagggagggagagagaaacaaagatgcagaagcagggagagagagaaagagacaagggagggaggaagagagcgagagagagagagagagagagagagagagagagagagagagaaaggagagaaggagagagacagagaggggctgatagaatgctaacccctgcctagattaggggtcaaatgccaatgccacaggttcatgttggggagacacacttttttttttgccagcatttttgttcacttcccaaggaggcttaaattatgtgtgcatgtgtgtgtgtatgtgtgtgcataagaacagggattattactatatgaattttactccatgttggaggcattggttgggacatcatcttacttgtgcctataaaacagcggggcggcatagctggggcacgg

SEQ ID NO: 27957 - DNA, 1745 bp, Artificial sequence
  DNA replication origin
ggccgcggcgcgtccttcccgtcctcgcagtcctcgggctgtgcgcttcccccctccagccccagccgcagcctcttctcttcgggagggacgtcgtcctcctccctcctgggccggccatccctgcctcggggcttgccagtggcttcggagctgccggaagggctggccatggctccgggggctctgcctgcacttggggaagaggaaggacccggcgcgagcggcctctcggcggagctggggcgtctgagcgcgggctcggtgggtccgcgcggcgcggagctgggcatcggggccggcgcgggctcctccgcgggccgctcctggctctctggcgccctctgccggccgctcgcccgcaccgcggacacgccgggcccgggcctgcgctgcgctcacctgccccggcccaggcggtcgctctcccctacccgtggccagacccgctccggccaggccgtgcacctcctccccgccccagccaggttgcaccccgatggtctccctgcccaaggaggagagaagagaagggacgccccgagagggtggacatgggccacagccaccttgtctttgctcttaccctgtgtcttgcatgatttggaggtagtgggaaaaccgagtggagaattccgcctgcaggatgacatgaatgcaccttcccattgcctaccaacagatcttttttgagcatcactgtggaccaggcgtggtgatgggggaggggatattgtggtgaacatgacaggcattgccttcacccagtggggctcagcgctgggtgagaaggcattgagaatggacattgtcaattgggcaaaaggaggccaaggagaagtgctgggtgcatgggaactgaaaaagacaggaggctcggcaggtcttggagctgcgagagggacaacagcagcggctgttccaaaggaagcaacagctgagagaggtctcagagttgttctcagcccagtggagggtgttcaggcagagggaacagcgtgtgcaaaagcccagaggctgggaaagaagcagaaagaggactgtggggctggagcatgctgggcaaggggagagaggtgtggtgggcagacagattgcctggaacccagctgtgcagggacagaggagataggggatccttgcaggcccccagccaggactcaggcacagagacaatgcaggtgggcaaagggaggagacgtagagaaatattttggaggcgtgcccgatgaatgagcccaggatgcaccgttagtgtcagtgtggagcgagctccttccttggctgtgtgatgagctgaacccgggggtattttctggacatcgaggtgctacacccagagtccaggacaggctaagtgagcacccgcagctcctggcctacctcaaaagcaggagagacaggggagactggggaggccggggaggaaggggaagccaggaaggcaggagagcccagggaagcagaggaggccagggagacagtggaggcaggagaggctggggaggctgtgtcctttccatgattctgcccaggatcctaggcccctgtactccctgagcttccccatcccaagcgctggaaccatgttgcacaatggtctccccactaagctcctgatggcagcccctaccctgctgtgctccctatttcaaccctaacagctctcacagtgggcagcacatagtaggtgctcaggaaacactggtgggagagcacatgggtctgctcagcaccttcccctc

SEQ ID NO: 27958 - DNA, 1936 bp, Artificial sequence
  DNA replication origin
aggcagggatggccggcccaggagggaggaggacgacgtccctcccgaagagaagaggctgcggctggggctggaggggggaagcgcacagcccgaggactgcgaggacgggaaggacgcgccgcggccgggcagggaggagaccggcacccagacaggtggcgacggcagaggagtaagtgacgcgggcgcgggggtccgggggtgccgggggcgcgggggtgccggagacgcggggtaggggctgcgggaggctccgtggccggccccgggttgaagttggtaactgagtggcaactccggcgggcgcggagtgacagctcgtgacggcctccgagacgccagctgccccttctcggctgtgtggcttcgacttcctgattctcccacgacgtccctggccaggagccccgttggactctgcggctagccaaaaggggagggggagccccgcgtcctgggggcccccagcaggggaaggggcgggggttgcgctgggcatcctgtctggggcatctgtctgggacttttgtcggtcccacctggcggggggcttatggtgggggtagaggggaagtccctggcgccaggcttggccaagccctgctctgctgggctgcgggctggcggcgctcacccagctcctcacctgccccgcatcttcctgtttttcttccctttctggttgggcagcgagagttgagaggaggcagatggcttccatcccagaaatcgctctcctctttccatccctacagagagggacagagaggcaaagttccttgcatccctcggggcgctgtccctgtgagctcccggtgtcctgcacacgtgggcccctgagtgaccgggcccgtgtgcgtgggatggggctccgtggccagcctggcctcctggggttcactttctgctttcctaccccaactcttcctgtgtggctttgctggccttccactggggaggcacgcgggtttggagggcagatgagggccccctggagagctgtacccctcagtgagggccgccaccttgatggtttttgatggataatggggttgacctctttgttccttccaaatgtttttatgtttgaccatttgctcagctgagcttgtcttaataatttgattcgtggttaatgagccccacatgggagagagggcggccttcattctgaacccatttgggcagcacgggtagccgtcctcgccgtgggctgcctcagagccccccctgcccagtcttggggttgctcccggatgctgtgtgggaggcttgctcctggtgacatcctcatctccccgtgcacgttactgcattcagagcttgggtcacctggacaccgaactcaggtgaattttctctgagattctgggagaaggaggacagttctctggtaggttttccagggccgatcacggaaaggatgagacacaattacggtggcagtgtaacgccaggaaactttattgcgtgaagtccctctcactccctctacctccctcttttacgtggactctgccaaagaccaggatactagaatgcagtggagtgaccaagtgtagtgggacctagggaacgtgagtgtggagccaggcagctggggtttgcatcctggtaatgcccctccttagctggctgacatggcacacgccagttaccctgtctgagccttactgtcttcagtggcaaatggatctgtcaacaggccccattgcctggggttgttactgctgagattaagggaagctcgtccatagaagcacttagcgttgtgcctggcacatagtgtatggtggataaatgggacttaggactgaaacttacgccttggtgtgttttgcagtgatgttttgttctggggtgcatcacaagagacaaggttcttggccgggcgtggtggctcaagccaataattccagcactttgagaggcc

SEQ ID NO: 27959 - DNA, 1817 bp, Artificial sequence
  DNA replication origin
gaacccaggctcctccacttcttagatatgtattcctgggcaagctgctaccctctccatgcctgtttcctcatctgtaagtggagatgtgataatagtgcctacttcatatgactcttaaaaattgaataaaatatttgatgcaacattcttaacacagtaggtagtatgtagtgagtttttgttaattttcacctattactattagtcataaatgttattccaatgcctagtaatcactatgtattcaataaacatttgttggatgcatggatggatgcatggggaacaggatggatgggattcaacagatgggtgggtagatgagtggatgcatgggtgagtgggcgggtggaagagtagattattgagtggaaagacaggtggatgggtggatggatacatgggtggatggataggtgggtggatggatggacagaagggtgggtgggtgaacagtgggtgagtgagtggtacagagggtgactgagtggaagggtgggtggatgggttgatgggtgggtaggtggggggatggatggatggatggatgggcaggtagatggatcgatgggttggtggggagtggatgggtgaatgagtgcatgattgagtggaaggatgggttgatgggggggagggggtggatgggaggatgaatgggtgggtgagtgcattattgagtgaaagagtgggtggatgggctgacaggtgggtggaagggtgggtgagtgcatgattaagtggaagggtgggcggatagaccaatgggtgggtggaagtgtgggtggatgggttgacgggtgggcaggggtggatgggaggatgaatggatggatgggtgggtggaagggtaggagagtgcatgattgagtgaaagggtgggtggatgggtagatgggtagatgggtgggtggatgtgttgatagggggatgggagcatgggtgggtggatgggtgggtagacggacagacgagtggaaggatgagtcggtaggtggatggaatagtgattttccaagtgtatggtggaaataagaagacacatgacatgatccttgccttcaatgataattattatctcttctgcttatttagtgctttgtcatttctaaacaggcatcttgtacaccacctgacataggctaatagctccatttcacagaagaacaaagtatgattcaaggaggctgagttcatgcattcattcaagtatttgttgagcaacgactgtatgtaagacacacttctacatgcacatatacagcactgaatgtataagcaaaaatccctgtctctaagaagctcatattctggttagaagagacatgcaataataaataaggaaaacatatagtatataagatgacaagaaatattatgaagaaacatgaagcaggaaggggagatatcaggtgccaggaggaggatgagcaacattgggattgtcaatagagcagccagataaagtcttgctgaaaaggcgtcccttgaggaaaggcctggataaagtcaggaacaagccaagtaggtgtgttagcaaaaaaaaaaagtttccaggcagacagagcgaccaatgcaaaagccagatatcagtgaacaattacagggcacttaccacaagccagggtccattctgaatgctgaatatacgtcagttatttaagccccacaccagctcttgagggaggtgctgttatcatcctcactttgcagatgggaacactgaagagcacaaagactgagacacttgactacagagctgggactgggctgagacagctcagctccagaggccatgctcttaaccgttacat

SEQ ID NO: 27960 - DNA, 1048 bp, Artificial sequence
  DNA replication origin
ctgttacactgtgatgtctcattgcttatcatcatacctctttttaattactttctgtacttaccctgtttttttttctttttttcttttttgcagggctatggatctataaaattcctaataagcagtacctcacctttttattccattcccagtaccttgtgtagtacttagtagagagtagataatgcacgttgcatgggtgggtaggtggatggatggatggatggaagagtgggtagatgaatggatgaaaagatggacgtaaggaaggatgggtggatggatggaaggatagatgtaagggtgggtgggtggatggacagaaggaaggaaggatgggtgggtagatggttggatggatgagtgggtgggtgggtgggtggatggatggatggatgaatagaaggatgggtagaaggatggatggaaaggtgagtgggtagatggatagatgaattgaaagagggaaggtgggtgggtggaaggatagatgtaagggtgggtggatagatggatggaaggtagatggatggaaagacagatgtaaggggggtgggtaaatggatggaatgaaggaaggaagggtgggtgggtaggtagatggatggatgggtgggtgggtgatgggtggatggatggtacacagatggatagatggataggtggatggatggatgagtagatgtgtgaatggatggaagtaaggaaggaaggaaggatgaatgggtgcatggacagacaagtgggcaagtctggctgaattttcctgagtttgtgaccatattccaaagcaaataagaatttctttggcattactccatcttggattattcaaaccctacccattattcaactacagcattagccaaggtgctcgtgaacttctaagcattaggaacttgtcacaacaggacttttaaaaattaatttccacttacactataggctgagaaagtagattgtacagaacctactgaggggacttcgttaaagcttaacttgttcattaatgtgtgtttaaaaaatacccctggacggctaggcg

SEQ ID NO: 27961 - DNA, 1741 bp, Artificial sequence
  DNA replication origin
gcattacggaggccagggagaagaaccatcttgttgtctattgtttcttgagttcgtagcacagggtctgtgatggagcagatgccttcttctttttcaatgaatgggggaatgatgagaaaacaggagagaggaagagggaaccaaagatgatgtgagagtttcagatcttgcagaagctgacagcacgagttggctttgggttaccctagattgttgagtggaccctgagggtgaggacttgggttcttttctctgttgcagaaaactcaagtctggaaaggttggttggtcttggtctctgttcttgaaggtacagaggcaatgttatgaggaaatcggggcattgagacttgtatttctatccctgggatgctttaatgtacttgagaccacagaagatgaaagctaaaaagcaaggcacaactaatggttatgtcttccaagatggtggagctcatgtctatcttccaggcataggaagttttgtcacacctctgcttgccctcagtatgctctgcccttggtatgcattatctccctgaaatggaataatgatgatgatagtagtgggagtgatgatgatgaagttggtggtcgtgggcatgatgatgatgatgttgataatgatggtggtggtagtggtgatgaagctgttgataatggagatttatggtgatgataatgataattatggtagtggtggtggggagaagatgattatggtgaagacgatgatgtaatcatgatggaagataatagtgatgatgatgatgatggttgtggtgctggtggtgatgatgatggtggtgaggtgtgatggtgatgataatggaggattatggtgatgatggtgatggtggtggtggtgatgatgatgataatggaagataatggtgatgatgatggataatgatggagatgaaagacggtggtgatggcagatgatggtgatgatgatggtggaagatgatggtgctggtggggtgtgatggtgatgataatggaggattatggtgatgatggtgatggtggtggtggtgatgatgatgataatggaagataatggtgatgatgatggataatgatagagatgaaagacagtggtgatggcagatgatggtgatgatgatggtggaagatgctggtgtggcggggtgtgatggtgatgataatggaggattatggtgatgatgatggtgatgattgaagatgatggtgtggtggggtgtgatggtgatgataatggaggattatagtgatgatggtgatgattgaagatgatggtgtggcggggtgtgatggtgataatggaggattatggtgatgatggtgatgattgaagatgatggtgtggtggggcgtgatggtgatgataatggaggattatagtgatgatggtgatgatgattatgggagatgatggtgatggaaggtgacggtgatgatgatgatggaagatgatggtgctggtggggtgcgatggtgatgataatggaggattatagtgatgatggtgatgatgatgattatgggagatgatggtgatggaagattaacagtgatgatgatgatggaagatgatggtgctggtggggtgtgatggtgatgataatggaggattatggagatgatgatgatggaatatgatggtgatacaatagctaaaacttgagtgctgacttacatgtcagtattctggtaagcagtttaaatacatctcatttagtctttgcaagtg

SEQ ID NO: 27962 - DNA, 795 bp, Artificial sequence
  DNA replication origin
gagacagaaagagcatgaagtaagtttagcagctgcatataaacatttgaaagcctgatactcggccaggcatgatggctcacacctgtaatcccaacactttgggaggtggaggcgggacgattgcgtgagtccaggagttcaagacagcctgggcaacataaggagacttcatctctacagaaaattaaagaattagccaggcatggtactgcatgcctgttgtctcagctacttgtgtggctgaggtgggaggatcacttgaattcagcaggttgaggctgcagtgagccattattgtgccactgcattccggcctgggcaaaaacgaatggaacagaatggaatggaatggaacggaacggaacggaatgcaatggaatggaatgaagggagggagggagggagggaggcagggagtgggaggggaggaagggaaggagggaaggagggaaggagggaaggagggaagggagggaagggagggaatggagggaaggcaggaaggcaggctgatgattaggagagagtagacctcatgggtttgcatggatcacagatctaggcaaatgcgagaatgggagaaaggaagagagaaagagtgaaatgcctcaaatgtagcagatacgaaataaatatctgctgaatgaaaaattgaaatgttgagtggccatcaggagtgtggattttggagtcagaaaaacctgggcttggccgggcacagtggctcatgcctgtaatcccaacactttgggaggccaaggcaggtggatcacctgatgtcaggagttcaag

SEQ ID NO: 27963 - DNA, 1296 bp, Artificial sequence
  DNA replication origin
gagtagatgaatgaatgaatgaatgagagtggaggggagaatgaatgaatggatgggtgggagaatgggtgggtaggtgggagagtagacgtatggatgggaggaattatgggagagtagatgaatgaatgaatgaatgaatgggatggatgggagagtaggtgggtgggagactagatggagagatggatcaagtaatatttccatcccagcctcccaagtagctgggaccacaggtgcatgctactacatctggctgtttttattttattttttgtacagatggggtctcactgtgttgcccaggcttgtctaattgctgtcctcaagtgatcctcctcccttggccttacaaagtgcagggattacagatatgagctactgcacacagtagctgagtgacgggagagtagatgaatgggtgggtgggtgggtgggtgggtggatggatggatggatggatggatgggagactgaaaagaagggtgaatggatggatggatggatggatggatggatagatggatggatgggagagtgggtgggggagtgggtggatggatggatgagagagtagatggagggatggataggagagtggctggatgaacagatggataggtgaatcactagtttttgttgatactggtttataaaattgatcatttttatcagttgaaagaagttgagtacacagaagtgcaaagcaaaaggctactgaagaagagaaaagccagtgtaggagccaaggaacacagcagcaacaacgctggtagggaggcaggtccaccaagtcattcattcgttctgttaggctttctgtgctcttacacgtgcaggcactgaggtgatgctggggttgcagtgagctgtcaaactagatgtgtcagaaatgagaaaggagatgagagaacaaattagaatacagagtgatcgacactttgatgaaggaagtaagtggagcctggggtccatgaaacccactgccaaaccaacccagacaggtgagtaagaacctgccctaggtaaggcagtaccttaaagatgaacccaagatttcaggggaaggcaggcagggagactgggtggattcgggatggagatgttgccaacagagcacatgtgggtcagagagaaagcacgccacacctaaggatgtggatgatgctctagttgtctgctggggagatatggaaacagactaggctgtagagagacacagaggccacatcgtaggatgctctgtaagctgtgtcaaggagtttggattttagcctgagaaccacagcccacaac

SEQ ID NO: 27964 - DNA, 900 bp, Artificial sequence
  DNA replication origin
aaggggggacaggagagggagaagggacaggaggaggagagggacagaaagaggtggggaggacaatagcaatcagggggcggaagataaaggggaggatgagggggaggaagcagaggaggaggggtgaggaggaggagggagagagagaagagagagggaagaggaggaggaggagggagagggagaagggagagggaagaggaggaggaggagggagaggaaagggaagagggcagacagcggcatctccaagagctcgtattcacggtggcagcagttcagtgggaaaatcaagggcactgtgacacaagaacctcctgctctaacaagccagatgctcctctgagccaaggctctcaggagcagcgcctggacctcgctggccagcaccgcagacaagctgggcccagagatgagctccctcccaggggcggtgtccggagtgacagctccaggaagcggccaccaggtggcgtgtgcgccttacttccttcccaggtttccagccgcgggaggcagagggtggtgctggggttccaggaagccgaaggtcctttcacagatggaccgttaagccagcccaggggacggcagagcagcctgagggagcaagaactgtcaccacggtctgcccgcgaagtaggtccacactgtcccttgcaggtcagggcttagcttacaggtgctcccagagagaccccggagcagggaggggagtggagaagagctctgggttcagatctgatcttgaccacaacagacggttcaggttcaaaccatgcttcctggagacgcctctcagcccaacttcagaggggaaagaagcgttcccattaacagaagctccactgtgacccgttttaagcactgaacagcggtgccacaaataattgggga

SEQ ID NO: 27965 - DNA, 1235 bp, Artificial sequence
  DNA replication origin
atgacaggattatactagggtcacctttttgtgcttcgccaaggccataccatccagacctccactccagaagtctttgcacgtcctcctctcagcccccacccactcacccacccggcttcacattcagaagcttagctgggaaaatgggtgcaggaacccagctacataaagggtataaatgtgcctttcagagaggcacagtgggaagaacaaaggatttgaaaccagacagacttgaattcagattctggttagtgaccctgggtggattacagatctccttttcccagctcagccaccttatctttgtaagctttccaggtcaccagctaactgccaggactcaggggtcactgtaggtagcatgatgtgtatagtacatatgtggttggcatcttacccttcctttctcatatcaggggtgactgggtctctgctgcaccctgtgcacactcaacctgctgagctgctgtgcagaaggtggggtgctgagccgtgtgctgggcttctgtgcggaaagtggggtgctgagctgtgtgctgggcctgtgtgagcaaggtggggtgctgagttgtgtgctgggcctttgtgtggaaggtggggtgctgagccgtgtgctggccttctgtgcggaaggtggggtgcggaaccgtgtgctgcacttttgtgcggaaggtggggtgcttagccatgtgctgggtttctgtgaggaaggtggggtgtggagccatgtgctgggcctatatgcggaaggtggggtgctgagccgtgtgctgggcttcagtgcagaaggtggggtgctgagttgtgtgctgggcctttgtgcggaaggtggggtgtggagccatgtgctgggcctatatgcggaaggtggggtgctgagccgtgtgctgggtttctttgaggcaggtggggtgtggagccgtgtgctccacctttgtacggaaggtggggtgctgagccgtgtgctgcgtctttgaggaagttggggtgcggagccgtgtgctgcgcctttgtgcagaaggtggggtgctgagccgtatgcgggcctggggtgattgcctctccctgacctcctttgcctctccctccgctaacagaccagaagcctgttctgccgcatgtgcagctgccgctctctttgaaatgctcggcttttggggcaggtgctggctctgagagatactgttcattttccaaaagtgcttagagccgctcatttccacaggcca

SEQ ID NO: 27966 - DNA, 1676 bp, Artificial sequence
  DNA replication origin
gggtgggagggtgggtggttggttggatggatggatggatgggaggtgggaaggttggtagctggatggatgggagggtggatggatggatgcatggatggatgcatggttgggtaggtgggagggtggatggatggatggatgcatggatggaagcatggttgggtgggtgggagggtgtgtatgtgggtgggtgggagggtggatggatgcatggttgggtaggtgggagggtgggtatgtgggcgggtgggagggtggatgtatgcctggatggatgcatggttgggtacatgggagggtgggtaggtggacgggtggcagggtggatggatgcatggctggatgcatggttgggtaggtgggagggtgggtaggtgggcacatgggtaagtgggagggtgggtggatgcatggttgggtaggtgggagggtgagtaggtgggcaggtgggagggtggatggatgcatggatggatgcatggttgggtgggtgggagggcgggtatgttggtgggtgggagggtggatggttgcatggatggatggatggattcaccgatggatgcatggatggatgtatggctgggtaggtgggagggtggatggatgcatggatgggtgcatggttgggtaggtgggaggatgggtaggtgggtgggtgggagggtggatggatggatgcatggatggatgcatggatgggtaggtgggagggtggttgaatggatggatagatgagaagtaaacttatttgtccaagagtagtctaacttcaggctcagtaggaccaaaaagcttagatgttgtcattagtacccacctcttgctctctgcacgtagggctattcttttgtattggcttcattattaggctccacctggttaccccttgagctccaaccacatcaatcatcctattgctcatggcctcagtgagaaaaagaaaaaagtgcctttctggtagattccacctgtgttcctattgaccaccatgggtcatttaactattctcatacttaacactgtgagatcaaggtgcggggaaaggggactgaattaacaaaataacatcacttggccatatctggaggtggagatgggtcctttgtctgaaccacagagacttaaagtgggagaaaagtttgacaggagaggaagatcaggcaggtgttaacagagaaggagagtggtttccaggctgaaaaagcaacagatgcccaccgtagccctgcatgctcaaccacattctgacttaatgtgtaggcagataggtaagtctttgagcagctgggtctgaaaagacgttacagacctgagatcatatggtcctggtgagagcttccaggatcaaacaggtcaggctgaaggagactcaagttttgtgggtcctgaatcttacagtttggagcccttctttgtgtaggcagaatcctgaaatggcccctgagattccctacccgtctcatgcatataccctgaatattgtttggaacttgaatatgatgcattttactgctgtgattagattgttatgtggcataggtcttgctctgtctcccaggctggagtacagtggcacagtcctaactcactgcagccttgacctcctgggctcgagcattccacccacttcagcctcccaagtagctgggacaacaagcatgcaccatcac

SEQ ID NO: 27967 - DNA, 1498 bp, Artificial sequence
  DNA replication origin
cttacctgtcctttgtctctaaaagcataagccccaatatggagagaggtaacgtgtatttaggcagcagaaaagaaatagggacttttattgctcctggttccatgaggaggaagaggaagagaagaagaagggggaggggaaggagaggaggagggggaggggaaggggaggaggaggagggggaggggaaggagaggaggaggagggggaggggaaggagaggaggaggagggggagtgggagggaggaggaggagggggagtgggagggagaaggagggggaggaagaagaggaggaagaagaaggaagaaggaagaaaaggaggaaggagaagaagaagaatgtgggaggaagaagaagaggaagaaggaagaagaagaagaggaggaagaggaggaggaggagggggaggaggaggaagaggaggaggaggagaacgaggaggggtagggaaggaggaggaggaggaaagaaggaaggcagggagggagggagggagggaagaacgcctgaacagccagacctgacaccccccgacagcctggccctgttaaaaatcactgttcagaatactcatgactccaggagtggaagaaacaatcaaatccaatctaattccaactcgatgctctcttgggtgtggggaagccccaagcaggatggaggttgagttacagaataacaacgagagtcagaaatgaagttggtttcaaaaaacaaggaccacgcttcctgagcacctgagccatcctcctgcccagggtgctagcgtttcctgcaccacagagtggtgatccccgaactgggctgtgcggtttttccccgcctaccccaccgtacccctctcttcactggaaggttccatgagtcagtgccagggccccagcccttatctcctttccttcacacactccttgggagaccgataaagcactattcagtgacaaaactagatttgtccgcggagaagctccacgtctaagtggatgtgcaggagctgtcagggaatattttctcctccccacccactaagcttttaaaacgactcaagtgccaccctccctaattacccaattcagtggcgcacacaatggatctgccactttctgaggatttctgacatccctaattccccgtggcctctcagctctgacaggaggcatctggggtaatggggggcagggacgcagagctgggagaatgcagggagttaattggagagacggagatgcaggtgagaagtgaagtcgcactcactcttgagtcagagctgcagacatcagcgctgggatgacttagaggcggtctgtgtgaccctcttacctgacagaggaggaaactgaggcagagagggagtggtaactggacaatggtacatctgggactataattcaggtattcatgtactcacccattcattcactcatgattcattaaagcattcatctgccagacactgctacatcttgagacataacagatataatagtgaac

SEQ ID NO: 27968 - DNA, 810 bp, Artificial sequence
  DNA replication origin
ccggacaggcggggaccctggcggccactgggtgggggtctggagcgcaaggactctcaatcccgggcgcgcggtccgctcctgctctctctgcctgggcaagaagctcggagttctcctgctccggacgccggggcggggcccacggctggctgtcccctccagatgtggggtgctcggctcggctcactccttccttcttcagccccggaggcgcgcgcgtgggtccagccagtgccgccgcctctgctgttcccggggctggcagagcgcccccgccccaccgcgggtgctgctggggggctggggcggagggggagggattcccctccgcgagttcgggtttccccacccgacgcggcccctgggctccgtccgccgtccgccaccctccgcgctgcttggagaaccacttcagggcagcgcagccagtcccaccgactctggctggaggaggcggcggcagcgcggctcgcacggggactggaaaggaggtgaccttcaaaccccgcgctcgggagaccaggaagggggctggggtgatcgagggagcggtgtgtgcacccagacggccagcaagagcgcttgtaggagggcgggagagaataaagaggaaatcttccagtaaaaatatagattagaaaataaacaaaggagagccggagagagcgcgagaaaatgtgtgcatgtgtgtgtgtgcgtgtgtgtctgtgtgtgtgtgagcgcgcgacaagcagcgagcagccccggctgcggagccaaaaataatctggtgcgcgagggagcgccccctcccccttcccctcgcca

SEQ ID NO: 27969 - DNA, 1317 bp, Artificial sequence
  DNA replication origin
ccgcgtcgggtggggaaacccgaactcgcggaggggaatccctccccctccgccccagccccccagcagcacccgcggtggggcgggggcgctctgccagccccgggaacagcagaggcggcggcactggctggacccacgcgcgcgcctccggggctgaagaaggaaggagtgagccgagccgagcaccccacatctggaggggacagccagccgtgggccccgccccggcgtccggagcaggagaactccgagcttcttgcccaggcagagagagcaggagcggaccgcgcgcccgggattgagagtccttgcgctccagacccccacccagtggccgccagggtccccgcctgtccggaccctcgccgcgcccaggcaggcgcgccagggcggggctgacctgcccgcgaagttgcggacagtgcgtgagaaaccagcacccccttccgccgcctccagcttatggtgagtgtggctgggggtgcagagagcgcacgggaattcgggggtctggggccgagaacgtgaccgcagccgggctcgccgggagttctaggtaagtccaggcggagtcattgcctctgcacccaccctgacctggtgggtcaggtccagaaggtctcatggagggaagcgctaggtccccgagaactggcctcctcctagcgccagtctgggcgctctggacgggaactttttcagggtgtgtggaaagatctcgaggcgtgtccccccctacccccaggaggccgagaccctgagcccccttgtgcgtcgcttccagaagcacgtccttccttgccccagagcgcccctccgaagcatccaggctacctcgtccgtcctcctgggagcgagtcctaggtgccaggagcagcgggagcctgcctgcgcactttgattagtctccctggccggctgcaagcgtgcactcagcgcgcccccggaccgctgcctccgcccgcagggtgtgcaggaggaggcatcttagtgacccgggagggtgtttaggtgccccgaaccccttgtgggaggaggggaagagaaggctcacttatgtggagaaagcgccgctgtgtttactggcactggaatcgatgccccgcggtgccacctcgaccccaggggagggggccagccgggaaacctgcgaatgggaaactcctactgtgcccctggttcctgggagccttagagaaccttcaccccagagaaggaaacacaggggtagcagatcttagccctgtgttgttgtgcaggccaggggggggcttgtcagctccaatcaaccaattgtccagctatggaagcgag

SEQ ID NO: 27970 - DNA, 1577 bp, Artificial sequence
  DNA replication origin
ttcttttttatgacccagtgtgtctttggggatagctttatgagctctttcttgaacgcttaattatttctttctaggtggctttgtcataggctgtcatgcttcattgaggtatcagctcagctgatctgttccactttctcttaggaaaggcaccattttggggccttcagtgggtaacagatttctgaagcttctcttagccccattctggcaacactgggctgatttacaaccggcaatatggaaaacctcctagacagctgcctcagctgcatttgaactactgcctgagagtctctggctgccttgacactctaacagaccctggcggcaaggcaggtaccgccttctgctatgctgctgatcattgctgaaaagttgcgtaagtcatgccaattgtttataacatgtatttaagccgtgtatgaacctgggagtcatgagtctgtgctcttatttcaatgtaataaagagaagaagaaatactggatggtttaaatcattctgtgcttaagagcaaagctgagaaccaccccaacttgtatccctctccatccctttgtctactgagcgaaagcgcattcaccatgctcagtctctcactctaagccagggttctcaacctcatcactgttgacatttggaactggacagttctttgttatgggaggggatggggtcaggggatgtcccatgaattattggatgcttagcagcatcccagctctctacactctagatgccagtacaacccactctcctaatcatgagaaccaaaatggctctagatattgacaaatgtcccctgggaagcataatcacctctgcttgagaatcactgctctgtcagatgtcccacccatctctcatactcaaataagtgtttctttcactccaagagcatgagtgggtgccttgttcctagttcctcaaatgagacaaacccgttgtcattgagacgttgcatgtgtacctctctccttctctcccactgtctccatctctctcatgtttcccttcttgtacccaccagccctacattgatgtcttgttcttcagaatctttaatatgctagtatgcattaggaatctccaaggatgaaagagtaggagggagagggagaaggagagagagagggggagagggagaaggggagatggagaaagagagtgagggagaaagagtgagagtgagagggagagggacaggaagagagggagtggggagagggagagagggagaaggacagagaaggtgagagggagagcgacagggagaaaaggagagggggagagggagacagggagagagggaaaagtggagaggaagagagggagatggggagaaggagacagggagagggggagagggaggggggagaggcaaagtgggagaaggagggagaaggtgagagggagaaggagagggagaaagacagggagagggagagggacagggagagagggagaaggagagagggagaaggggagagggagaaggaaagggggagagggaaagagggagaaggagagagggagaaggagagggagaaggagaaggggagagagaagga

SEQ ID NO: 27971 - DNA, 1382 bp, Artificial sequence
  DNA replication origin
gaaggtgagagggagagcgacagggagaaaaggagagggggagagggagacagggagagagggaaaagtggagaggaagagagggagatggggagaaggagacagggagagggggagagggaggggggagaggcaaagtgggagaaggagggagaaggtgagagggagaaggagagggagaaagacagggagagggagagggacagggagagagggagaaggagagagggagaaggggagagggagaaggaaagggggagagggaaagagggagaaggagagagggagaaggagagggagaaggagaaggggagagagaaggagagagagagagagggagaaggggagggagagggagagggacagggagagggggagagggggagagggggagggggacagggaaagagaaagaaggagggagaaggcgaggggagaaggagagggagtgggaccgggagagaaggagagggggagagggagagggagagggacagggagagagggagagagggagagggagaaggagggagaaggagagaggaagagggacagggaaagagggagaaggggagaggtaaaaggaaatggagagggagaggggagaaggagagggagagggacggggagatggggagagagaaggagaggagaaggagagggagaggagtagaggggaagagagaaggagaagagaagaaggagagggagagggacagtgagagagggagagggggagagagaaggagaggaggataaggagagggagagggggagagacaaagaggggaagaaggagagggaagggagagagagaagggcagagggagagagggaaaaggagagggagagggagagagggagaggtagagagagacagagaggggagggggagaaggaaagggagagggacagggagagaaggagaaggggagagcaggagagacagaagaaaacaggcagagagggaggaggagagggagagggacagggagagaaggagagaaaggaagagagggagagggggagagggagagaaggagacagagtgtgcatgcccatatttttttctgagtttgtttatttcccatgaacgctcccccaaatcccttgggactagcagttgtaaacacaccattgagaacattgcattcctttcttttcttctagatacttttcctccattaaccttgtctttttccttcctgtagatttttgcagcacattttgtctctccctcccttatggattgtttatcctgggtgatgatctgtgggcacatctcattccctaggtgcacacagctcttcgaaagcaagtattctgtggtatttaacccagcctgttttcttacatggagaaaggactgcataaacatccca

SEQ ID NO: 27972 - DNA, 1123 bp, Artificial sequence
  DNA replication origin
gagagggtggttggtaaggatctttgggtaggagtattgttgggtggaatagagattgggtggaagtatactcggatggaaggatagttggttaggatctttgggtaggaggatggttgggtggagtggagacttggtggaagtatagtcggatggaaggatggttggttaggatctttgggtaggaggatggttgggtggaatggagaattggtggaagagtatagttggatggaaggatagttggttaggatctttgggtaggagtattgttggatggaatggagattgggtggaagtatagttggatggaaggatagctggttaggatctttgggtaggaggatggttgggtggaatggagattgggtggaagagtagagttggatggaaggatagttcattgggatcactgggcaggagttttgttgggtggaaaggagaatgggtggaagtatagttggatggaaggatagttggtgaggatctttggataggaggatagttgggtggaatggagattgggtggaagtatagttggatggaaggacagttggttaggattgttgggtaggagtattgttgggtggaatggagattgggtggaagtataactggatgggaggatggttggttaggatctttgggtaggagtacggtcgggtggaatggagatttgatggaagagtatagttggatggaagcgtagttggttaggattgttgggtaggaggattgttgtgtagaatggagattgggtggaagtatagtcggatgggagggtggttggtaaggatctttgggtaggaggatggttgggtggaatggagattcagtggcagagtatagttggatggaaggatagttcattgtgatcactgggtaggagtattgttgggtggaatggagattgggtggaagtataactgtatgggaggattgttgtttaggatctttgggtaggaggatgtttgggtggagtggagattcagcggaagtgtatagttggatagaaggatagttcgttgggatcactgggtaggaggatagtgtagaatgaagattgggtggaagtattgtcggatgggaggatggttggtaaggatctttgtgtaggaggatg

SEQ ID NO: 27973 - DNA, 1620 bp, Artificial sequence
  DNA replication origin
tgtcaagtgcggactcagggaaccgtgcaaggtgccctattctgtcatgtggtacatatttaatgcctgaaagaacaagggaagggacacgtgcgggcgagagagggcgagcggcgagataccgcagccagctcggagctttgcaagtgcctccgacccgtaggggcgggacccacgcagccccagtatccactgccttcccccagctgcaagagtttgcaaaaacattgggcgtctcatttggcgagcgttttggcgcggacagaggccgaggccggccggggaagccggacccgggccctggcgccgccgtggcctccctttgtgcgcgcccgggtgttgattgcctccttgcacgggctgctcgctctcgcgcccgcgcgctcggggcgttctgcacctgctggcggtcgtgccaggcagcccgggcgagcgaaggcgcgcggcgcgcacgacagatgactggagtcatttacattgctagcacgtgggtgccgtttgctgttgcctcggacttctcccgtgctgtgttttcccggtgaggaaacaggaggcactttgcagccgacaatgaaatcttggcagctaattgcagtcgtgggagatgcccttcaggtacggcgagcgaagaagactctaaaacactgtcagggaaggagagaaagagggagagagggagggagggaagggagagaccaggcagcttctgcagaggcttcctgaagcccactgactccgcgggagggggttgcagagggacgggggcgggcgacagggggaggagtgtgcaaattgacatttttggctgcctgtggcagaggagcagccgtcagccgctgtccaacgttagcgcagacacggtggcggcgtgtgcgcctccggggctgctgattagaataggggacttggccgtggatggaatccgggaaacccaaaccggagatggaaggatgaggctgcgtttgcagcgcgtgaatgggacgcggtatgtaagccgagctccagctccggggacctcggagactgtgctcagggctcgccctgggtgccccgtggtgggggtggtctggacacttggagagggctagggggcgtttagagggattggggagcccggagatgcatcgattttctttacccactggaagttagtgggcaacttccttgccaatgctcattggctccgtttaactttattcccagagatgaataagcgtttattaagaaccgatgtaaaagtcccaataggctagccatggttttgcaagagatgcgcggctctggaaatgagaggtttatgaaatgaatggccagatgggttgtgcatttgcgaagttggcatgctcacgttgcaagggagcatgtgtgtgcaaatgtgagcatatgcgctgcatatctgtgtaaacatgtccaccatgctcgttgcgctggtgtactcttcatcttctctgcctgtttcccatggaagagagattaaattgacaatactgaacacgcttcgacttgagaaataagctctgtaccattttatgacatggaataagagttgccttcttctgagatcaaatgggagaaatgtgccttgccttctcaagtgatggaatgaactgttatgcattt

SEQ ID NO: 27974 - DNA, 1365 bp, Artificial sequence
  DNA replication origin
ccacccccttctccttggtttatttttcttcatagtacatattctttctggaataccattaagtgatatgcatggtttaatgcttgtcttgtccagaagaatgtaagcatcaccagggcgggcctgccatgtgtcttctacattgttgagtcctccatgcctagtgcaaggtctagcagccaagagttgctaaagaaatatcttccatttgaataagttaatgccactattgcttgtgggactgtgtctgtcattttgtctaattaatgagttccctgagggtaggaattatgtttgtttcaccttttcgtaccaggacaacaagaaaatagcagaaaatcataggtgtgcaataaatatgaatgagtggatgagtggaatggtagatggatgggtggatggatggatgaatggatggatggatgaatgggtgggtggagggatgaatggagggtagatgaaggaaggaaagatggatgaatagatgagtggatagaggatggatagatggatggatgggtgggtagatgaatgggtggatggatggataggtgggtggatggatggatgagtagacggatgaatgggagaaggatgcaggatagatggatgattggatagatggggatggctgggtggatagctggatggatgaatggataaaaagatgaatttgggtggatgggcgagtgtgtagatgattgatggatagagggtggatgaaggatggatggttggacggatggatggatggatggatggatggatggatggatagaggaagggtgggtgggtcaatgaatggatagatgggtggatggataggggaaggatgcaggatgaatggatgattagatcaatgggcatggctgtttgggtggatggatggatgggtagaggaccaatgaatgaatggagaggagatgaatggatggatggttggatggttggaaggataaaaaatagatcctgataatttgtgttgaagtgagacatatctgactatcctaaattttgaatgggagagatattaaaggcagtctctgctgatgtgaacaattgtatggagggcagattattttatgagctatcagttcctctttgctgtgacctctgatccatagcctttgcctacattccacatctgcatgtaataaaacttacttatgagatacatatgtctctaatgcaaacaccgcagtatgtacctttaaaaagcactataaagagcaatgactcgagaaagaactattaggagcatgagctctttattattttaaagggcatttcaacaacaccactgaatgttctctgaccataagtctgactcctgttctttctctcactttcctttcttttcttctc

SEQ ID NO: 27975 - DNA, 1130 bp, Artificial sequence
  DNA replication origin
tgggaaggaaaggaggagagaaaaagggaaggaggaaaagaggagagaagaggagagaagaggagaggagaggagaggagaggggaggagaggagagtaaaggggaggagaggaaaggggaggagaggagaggaaaggggaggagaggagaggaaaggggaggacaggagaggaaaggggaggagaggagaggaaaggggaggagaggagaggaaaggggaggagaggagaggaaaggggaggagaggaaaggggaggagaggggaggagaggagaggggaggagaggagagttgaggggaggagaggagaggagaggagttaccttgtttaaaagactcttttttaaaaaaagtccttagagagtaagacactgagaattttaactgggcattattttttcttatcactaagatgcatcaccaattaactgcaacaaattgtttagaaatttatctatcagtcatatgaggtcaagtttagaaaaaaatgggaaaactcatcagaaacaaggcttcatttgacattattgactcaatccaacaatttatgaaaaaactagaagtgtgtgtgtgtgtgtgtgtgtgtgtgtgtgtctattttcccctttcttgagaagagctgaaatcacatatgcacagtatgaccattaatgactttttcccaccaagatgcatcacagagtagccagaaaccagggcagttgccatcatcatgatgtcttaaccaaaggcagttcacataggtggagtggagcttgggtgactctccttgcccagagcttaccctgcctgcttatttaccttgtgcgtgatggagctcaggttgttctaacagcatcagttcctatgttatctttcaagcactattggcaattaaatttttaaaaaagataccggacaaaacatgttgatgaattccataaaagtccaagagaaatgccaatgacctttggaagcaggttggggaacatgctttctaaacactctgacatgagcggaatgattcggctgggcagaacattggtagaagactttggacacacgcttcacctaagcagcaattccatctgtccaactcactaaatgcacacatgcatataccagcatgcaaacacatggtgaatgcaaa

SEQ ID NO: 27976 - DNA, 1541 bp, Artificial sequence
  DNA replication origin
aattgtttgtcaagataaataagacagaaaaattgactcacacaccaacctcctctctaatttaacaaaattggagaatcgcacaatgggtggaatactgacaatatgcaatagaagttgccctaaagggattatttagcaggaacaaggaaaactccaacagttggcagagtcatgatgaggttaaacaaaagatgaaactcttctccaaacctgggtgttgaattattgaaatttgtttcaaacatttcagcatctgagtagtgacatatgacaaacacatgcctatattacaatagaaaactaaacttgtaacaaagtaatctttatagttaccttggttttgtcatctgtaaaataggagaaataatagtgtctacttcatatgggtaaacagtcaattagatgattctcataaaggatccaacattgtatatggcactctgtgaacactaaagaattgctgaataaggatgatggtggtgatggtagtggagaatgatgatgatgatggtggtggtgatggcagcggaggaagatgatgttgctaatgatggtggtgatgttagtggatgaggatgaggatgatggtggtgatggtagtggaggaggatgatggtgatgatgatggtggtgatggtagcagatgaggatgatgatgatgattgtggtggtgatggtagtgaataaaaatgtgttgatgatgatggtggtgatggtagtggaggatgatgacgatgatgatggtggtgatggcagtggaggaagatgatgttgctaatgatggtggtgatgttagtggatgaggatgatgatgatggtggtgatggtagtggaggaggatgatggtgatgatgatggtggtgatggtagtgaaggaggatgttgataatgatagtggtgatggtagtggatggggatggtgattctagtggagtaggatgatgttgatgatgatggcggtgatgctagtggagacggatgatggtgatgatggtggtgttggtagtggaggaagatgatgttgctaatgacggtggtgatgttagtggatgaggatgatgatgatggtggtgatggtagtggaggaggatgacggtgatgatgatggtggtgatggtagcggatgcggatgatggtgatgatgatggtggtgatgctagtggaggaggatgatggtgatgatgatggtgatggtgggggaggatgaggatgatgatgatggttgtgatggtagtagaggaggatgatggtgataatgatggtggtgatggtagtggatggggatgatgttgatgatgatggttgtgatggtagtggaggagaacgatggtgataatgatgccggtgatggtagtggatggggatgatgttgataataatggtggtgatggtagtactatgaagatgatgctgataatgatggtggtgatagtaatggatgaggatggtgatgatgatggtggtgatggtagtggatgaagataatgttgatgatgatggtagtgatagtactgatagtgacaatgatcatgatgatg

SEQ ID NO: 27977 - DNA, 1171 bp, Artificial sequence
  DNA replication origin
ttccacttaagtcatcatcaaattccagggacccttgatgcagcagagagaatctaaaatgaaataattcttgtttagattagaagctagaaaggcaccaagccattatccagaatatcagtccaacaggaggtctggtcagcatgcaggaaacaagcatcctaaagacacagcagagagtgctgtttccaaaacttagcgtaacattctggctcatagatgagaaaaagagaaagggaggaaggaaggaaggaaggaaggaaggaaggaaggaaggaaggaaggaaggaaggaagggagggaggaaggaagggaggaaggaagggagggagagaggaaagaaggaaggagaaagaaggaagcagggaaggaggaaagggagggagagagggaaggaggaaagggagggagggagagcggaaggatggaaggagggagggaaggagggagggaagggaggggaaggaaagaaaaggaaggaaggcagaaaggaagggaggaaggaagggagagagggagggacggaaggaaagaaggaaggaaaaggaagaaagcagggaaggaagtgagggaggaaggagggaggggagggaggaagaaaggagggaaggaagaaaggagggaaggaagggaagaacggaagggaagaagggaagggagggaggggagggaggagaggattttaaaagaaaacaagagtcactggttctgtgaaaagaatacaaagcaagagaatgctcctcagaggtttcaggagcttcaggagctctcagctgcgtctgtttcctcccttcctctctcctctcccttgtttccctccttccatccctcccccttctcagatataagtaaaaattcacagattgatggagaagaaggatccagaggcctggctgctcagcactgctttcctgtcctctctacaacctggcaagtgatagttgcctataaatatttgatgaatgaatgaatgatgcagaataagaagcaacatatatgtctaaactagggaaacgggtgccaggcatggtggctgatgcctgtaattccagccttttgggatactgaggcaggtggatcactgaggtcaggaattcaagcccaacctggccaacatggcggaacacagtctctactaaaaatacaaaaactagctgggtgtagtggtggg

SEQ ID NO: 27978 - DNA, 1484 bp, Artificial sequence
  DNA replication origin
agttcttgtgtgctgaagatgtggctggtgtttgtctcacagtggaggcaaggaattgcaacttttttctattattgtgcaccttgaagacaaggttaattaaatcctgttgtggggtttgagggctggaatttaatttttggagttttatttaatgtcgggagcagattgggtaataaaatgtgtattgagaataagacggccttttgaccttttagggtctagggctgtaaagtgtctcagggttgctgccaaacgagtcctgaactgggctggatttttatatttgatgaaaaagagcctaaacactatctgattttggattaaaaaaaaaggagcattaaccttgactatgcctttagctccagccagctttttaagagtaaattgttgggcaggagggggagggctagtcacagaacgaaactgtaagctggaccaggtgtgaggaggggaggtgatgaaaagattatagggtggaggagcggaggctgaggaagaattgggacctaggttggcctggcaaggagcagcctggggaggaggggagaggtcagatgggtctgtagaaaaggaagattagaaagattcagccacgcttggggttggtactgaggggacaggcgggagggaaagaaggaagatttgggacgagttgcactgggcacagagaccgggcagggaccgatgtgtaaaagaatgcctggaagtcaggcacctcagaccgtttgcccattttacgacaagaattatatagatcttgcagtatggaaaaattgaaagtgctgttttctggctatttggaactactgttgagtttgtgttggggtcaagtggcattgcagaagaaaataagacatttagattttaggtcatgtgtgagttgaagaggttttaagtttttgagaacacaggccaagggagtagaaggaggaatggagggtggaaggttgcccatagtgaaggaagcaagcccagagaatatagagagtagagacacggagggaaggggttcgggggttcttaccttccagaaaagcgggaaaggggtgggggcatggatataagaggttgggacacagatataaggggttggggtgcagagataagaggtcgaggcatggaaataagggattggggcgcagagataagaggtcagggcatggaaataagggattggggcacagagatataagaggttggggcacagaaataagggattggggcacagagatacgaggttggggtacttgccgctaagagtgaaggagaagggtttgggggtttcttgctccccagaaaggtggagaaggggtagagacacagagagaaggggttggggtacttgccctttccccagaaaagtgggaattgccgctaagggtgaaggaccaaggcaggcgtccctgtgtggtctgacacctctgaaacgtgggtgaataatcagagaagtggccctgcaatgattaaacaccaagggaagg

SEQ ID NO: 27979 - DNA, 1131 bp, Artificial sequence
  DNA replication origin
tgagactccgtctgcaatcccggcacctcgggaggccgaggctggcagatcactggcggttaggagctggagacctgcctggccaacacagcgaaaacccgtctccaccaaaaaaatacaaaaaccagccaggcgtggcggcgtgcgcctgcaatcgcaggcactcagcaggctgaggcaggagaatcaggcagggaggttgcagtgagccgagatggcagcagtacagtccagctttggctcggcatcagcgggagaccgtggaaagacagggagagggagaccgtggggagagggagtgggagaggggcgaggggagaggggcgaggggagaggggagagggagagggagagggagagggaggagatttttttttttaaaggattgactctctcaacaagtaattgctcttctccctgagaaatatttcttcttcagtcgtgctaaagagaagttcaggatggctaaaagtggtgccgagctgatttaataaattttttcttggccaagtgagttaattggcaggaaaataacaaaagtcactgtgaaagaaggaaatcaaattcctttgcctctctttgcactcttcagccattgttctccaccctctctcttcacagggaatgagccttgagttatgctgtgagaagcagccagcgttagcaagagaaatctgaatttccttccaagaacaatgctttgaagcagagccaaacagatagatgaggtggagtgcaggggtggacacatgaaatgagatttacagcctagaggacttgggacaagacaaagctgagaagctcgggggagactagaaatgcaagaagtaataaaggtggagggagagaagttttggaggaacccacagagaagaatgcaatctgaggatgtagtagagagagatggggccataaaccacggaatgctgacagctcccagaaactggaacagacgaaagataaattctcccttagagcttttttgggggagcatagccctggtggcacagcgatactgacttctgacctccaacacttgagataataaatttctgttgttttaagccatggggtgcatggtcaatttattacagcagccaggtaaagtaatacagcttttagtatcaggaa

SEQ ID NO: 27980 - DNA, 1243 bp, Artificial sequence
  DNA replication origin
gcacatcttgcactgcccttaatccatttaaccctgagtggacacagcacatgtttcagagagcacggggttgggggtaagttcacagatcaacaggatcccaaagcagaagaatttttcttagtacagaacaaaatgaagtctcccatgtctacctctttctacacagacacggcaaccatccgatttctcaatgttttccccacctttcccccttttctattccacaaaacctccattgtcatcatggccccttctcaatgagctgttgggtacacctcccagacggggtggtggccgggcagaggggctcctcacttcccagtaggggcggccgggcagaggcgcccctcacctccctgagggggcggctggccgggcggggggctgacccccccacctccctcccggacggggcggctggctggacggggtggctgccgggcggagacgctcctcacctctcagatggggcggccgggcagagacgctccccacatctcagacaacgggcggccgggcagagacgctcctcacttcctagaagggatggcggccgggaagaggcgctggtcacttcctagatgggatggcggccgggaagaggcgctcctccctttccagactgggcagccaggcagagggtctcctcacatcccagacgatgggcggccgggcagagacgctcctcgcttcctagacaggatggcggcctggcagagacgctcctcacttcctagatgggatggcggccgggcagagacgctcctcactttccagactgggcagccaggcagagggtctcctcacatcccagacgatgggcggccgggcagagacgctcctcacttcctagacaggatggcggccgggaaaaggctgcaatcttggcactttgggaggccaaggcaggcggctgggaggtggaggttgtagcgagccgagatcacgccactgcaccccagcctgggcaccattgagcactgagtgaatgagactccgtctgcaatcccggcacctcgggaggccgaggctggcagatcactggcggttaggagctggagacctgcctggccaacacagcgaaaacccgtctccaccaaaaaaatacaaaaaccagccaggcgtggcggcgtgcgcctgcaatcgcaggcactcagcaggctgaggcaggagaatcaggcagggaggttgcagtgagccgagatggcagcagtacagtccagctttggctcggcatcag

SEQ ID NO: 27981 - DNA, 866 bp, Artificial sequence
  DNA replication origin
ggccgccatcccatctaggaagtgaggagcgtctctgccaggccgccatcctgtctaggaagcgaggagcgtctctgcccggccgcccatcgtctgggatgtgaggagaccctctgcctggctgcccagtctggaaagggaggagcgcctcttcccggccgccatcccatctaggaagtgaccagcgcctcttcccggccgccatcccttctaggaagtgaggagcgtctctgcccggccgcccgttgtctgagatgtggggagcgtctctgcccggccgccccatctgagaggtgaggagcgtctccgcccggcagccaccccgtccagccagccgccccgtccgggagggaggtgggggggtcagccccccgcccggccagccgccccctcagggaggtgaggggcgcctctgcccggccgcccctactgggaagtgaggagcccctctgcccggccaccaccccgtctgggaggtgtacccaacagctcattgagaaggggccatgatgacaatggaggttttgtggaatagaaaagggggaaaggtggggaaaacattgagaaatcggatggttgccgtgtctgtgtagaaagaggtagacatgggagacttcattttgttctgtactaagaaaaattcttctgctttgggatcctgttgatctgtgaacttacccccaaccccgtgctctctgaaacatgtgctgtgtccactcagggttaaatggattaagggcagtgcaagatgtgctttgttaaacagatgcttgaaggcagcaggctcgttaagagtcatcaccactccctaatctcaagtatccagggacacaaacactgcggaaggccgcagggacctctgccta

SEQ ID NO: 27982 - DNA, 1385 bp, Artificial sequence
  DNA replication origin
gcccggggtccaaaggaaaggctttcagatctgagctccgcggctctggcggcggtggagctgggagcccgcggtggccggctggggacgggggcaggagcagaggggtcgcgccgcggccactggaacccgcggctgctggtcctgggctcggcgatgcgggtgcacctgggcgggctggccggcgcggctgcgctgaccggggcgctcagctttgtgctcctggcggccgccatcggcacggacttctggtatatcattgacaccgagcggctggagaggactggcccgggggcgcaggacctgctggggtccatcaatcgcagccagcccgagcctctgagctcccactccggcctctggcggacctgccggggtaagggtgcaccccgtggctgggagctgtggctgcgaacgccccctgcgcggtgccctgctcccttgggacctgttgcttggcgcgcactcctcccccaagtccctaaaatacaatgtctagggactcggggggaaggtgagcagaaggccgggactgcgaaaacccttccgagaggcacccggctgcgatcccaactgctctagctctccccgcgccctccccgggtggggcacttagggtgagcatgggggcaaagccgcagacgagggtgctgcacagaactccggggtcctgcacccatggattcctccgtcctatccagtgcagagcccgtgcacaccgctgatgaaccccttcaggctggagaacgtgacagtcagcgaatcgagccggcaacttctcagtgagtccggggagggtgaggatggagggagcgccccggtcctagccgtgagttctggagcctttcccaaaacagccgggcttcggggcctgcggagagggcggctggggtggcctctgacagcccagcctgagaatggagtgggcttaagaccggggggcagggtctctcctgatccacctgtaacgttttgtggtttagggttcattcagctcacgttgactaatggctttctttgcaccgttttgatggatggttaagacacaggccatcccctcaaggggctcacagtggtgctgggacaaatgtggagacgcgcagttagagtccagcagcgtgaggaagggaaggtgggaagcccctgcagggacctaaattagcctcgggaggtgaatggtgaaagagaggtctcattccacagattccatgccagcgttgtttgtattcacattgcctagaacaagggctttgcagtagtggggtgcgatagaaatttgcatataaatatatgattggagccaggcaattaggaggtgggaacagcccctcctctcaggtccactgcgtccctcttattcctggttggttcttagtacccagctc

SEQ ID NO: 27983 - DNA, 974 bp, Artificial sequence
  DNA replication origin
tgatgatgatggtgatggtagtgatgattgtgttgttgttggtggtgatgttgatgatggtgatggtggtggtggtgatgatggtggcaatgctggtggctatgataatgaagaaagactttgggggtagaaatgatagattctgaggacctggactacctcagtgctttagagaacttttatgaaaaattaatgtgccttttcacattctagtcagcccagactacactcgaaggtggattttggaggaagggtacttggagctggaggggctcttggagatgatttgcaaatcctggcgggactgtgaggcccgccacacccctccttctttctgccccaggtggtcccaaggccgcctgcccttccacaccggcagcctccagcgctccagggctggggaccgcccccgtccatgctgcgtgcgcactccgagcttttcctcggcgaggaggagggctcagagggtcagctgcgccccggccagagcaggagctgcgggaagaccctggagagcagggctgggagtggggatctggcagtgtggggccaagaaaaagggctggggcggaaatccagagacagaggcagagaggggagcatctgggatcgtggggagggttcgtggagagtgaggcaggggaatggagggagtaggagtctggggaaagtgaggattttgaagtgagagagtccgcttgggctgggcgtggagggccgagggtggagtggggctgagggacgaggtgggttaaggtgctggtggggaaggactagagcttccaggagggtctgaaggcggaggtggaggtcggacagcacaagtgagagtgagggggtctgcaggtagagctggcattggaggggtgggaacgtggacggcggctgagcggggggcgcgtgcaggtcggagccggcaggtgaggagccagggtctaagctagggcccggggtccaaaggaaaggctttcaga

SEQ ID NO: 27984 - DNA, 1667 bp, Artificial sequence
  DNA replication origin
catttccctctggttgctcttcccttactacattctagcctgatggcccttctttcgatttctctagaatggaccaaacccctctataagccattctctagacacggatacttttataaccttcatgtctcagcatcaatgtcacttcctcagagaagcccagtgagatctcccctctgatactttctctcatagcaccctgtcgtaagcacgctttgatgattctcttccaacctgaccagcacttaccaacttttggaccttgatacaatggtcccttacgaatggatcacaggagtgccaagattttgattcctcagccataaggtcagcattgaggggtctttagtagctgtaactcctgaggattggtcatccccagtatctggaagcctcttctgttaatgagccatgcaaatataggtattttctctgtgtcccctactttgtaaaagtctgggaagcctgaatcctatatttcttaagggcaggacttgtttttggattgttcatgcctatattcttaacatagactatagcatcagacacatagaaggtaccggaagtatttcttgaaggagtaaaaggttttatggtggtgaagaagatggtggaattgataagagtgatggtgatgataaagaggagagtggtgctggtgctggtggtggtagtgatgatgatggtgatggtcatggtggtggtgatggtaatgaccgtggtggtgatagtggtaatggtggtgatgatggtggtgatgatgatggtggtgatagtggtaatggtggtgatgatggtggtgatgatgatggtgatggtggtgatgatggtggtggtaatggttggtggtgatggtggtggttggtggtgatggtggtggtgatgatgatggtgatgacgatggcaatggtggtgatagtgatgatggtggtggtggtgatggtggtgatggtggtgatggtggtggtggtggtgatggtggtgatggtggtgttgtctgtggtgatggtgatggtggtggtgatggtggtggtgatggtgatggtggtgatggtggtgttgtccatggtgatggtgatggtggtggtggtggtgatggtggtggtgatgatgatggtgatgacgatggcaatggtggtgatagcgatgatggtggtggtggtgatggtggtgatggtggtggtggtggtggtgatggtggtgaagatgatgtggtgatggtagtgatgatggcggtgttggtggtgatgatggtgatggtggtgatggtggtgttgtccgtggtgatggtgatggtggtggtggtgatgatgatgatggtgatggtggtggtgttggtgatgctgctgctggtgatgatggtggtgatgatgatgatggtgatggtagtgatgacggtgttgttgttggtgatgatgatgatggtgatggtggtgctgttggtgatgctgctgctggtgatggtggtgatgatgatggtgatggtagtgatgattgtgttgttgttggtggtgatgttgatgatggtgatggtggtggtggtgatgatggtggcaatgctggtggctatgataatgaagaaagactttgggggtagaaatgatagattctgaggacctggactacctcagtgctttagagaacttttatgaaaaattaatgtgcct

SEQ ID NO: 27985 - DNA, 1125 bp, Artificial sequence
  DNA replication origin
atgctggaagaatggacggatggatggagggaagggacagaaaatggatgatggatgaggagggaaggaggataataaggatgggtgggtggatgggtgggagggcagaaggatggatagatgggtagatgagaggatggatggatggatggatggaaagatgggtggatgggagggagggagggaaggaagatgggtgggtggatggatggatggatagatggaagggcaggaagatgggtgggggggtgggtggatggatggatggatcgatggatggctagaaggaaggatgagaagatggatgggagggaggcagggagggaaggaagataggtgggtgggtgggtgggtagatggatggatggatggatggatagaaggaagggccggaagatgggcaggtgggtgggtgggtgaatggatggatggatggatggatggatggatggatggatggatggatggatgggtgggtggatggctggctggctggctggctggctggctgtaaagatggaagggcaggaaggtggatgggtgagagcaagggtgggtgggtggatagatggatcttcatatatagtgtaaaagtttatctttttttcctgatgatgtttagagtttggaaagttctctttttgtttgtttttacaggtggtatagttagggtcaaagaactggactggctgaaggacgacctctgcacaggtgtgtgtttctctcggacgtcccccagtatgattcagtgattcctttgtaatacctcagtgcccctggctctgtggttttgacagagctgtagtcccagctgctgccacagtcccatcggcgcatggcagcttctctccattggccgatgagcaccagctgtcattctctgagcgcctgctgcatgctgggcacctcacgttcattttcttctccaggtgttgtggtttccctgtgtggtagcatgataatccctgaattgtgagtgcagactgcccatgggcacagctggtacacagcagggtaggggcatagacccgagtttgtcagactctggggcacagaccatttcccaacaaacagtggtgccaggaaaccccccgggtaggacagtttccatatttcttacacaga

SEQ ID NO: 27986 - DNA, 1186 bp, Artificial sequence
  DNA replication origin
tgactctgcccttggttgctgtgtgatgttgggcaagttgctgaacctctctgaattttggatttctcatgtgcaaaatagggatcacttctgccttttaggttctttgaagatttataataacgtacatgcataggttttcttcttgctcccagaggggcagggtgaggtcactctcctgcatgctctcactacaggttcagctgagaccgtttttcttctctaaagtacttggctttcttcttccaagtcaggatttctccgcctcggcgctactcacattttgggctggatcattttgtgttgtgggggatgctccgtgattaccgcattatagaacgttcagcagcatctctggcctcacccactggatactggtggcacccgtctcccctacttgtgaccaccgaaaatgtctccaggcactgccaaatgttcctggaggcaaaatcactcacaaataggaaataatgacctaattagtaacttacattagcaattcattcaacaatatgtgttgagcatctactgtttgccagaccatacagcagggatgtagtgatatttaagacaaacaaggtccctgacctcatggagactttttcctttttggacctcagtcttctccgctgtaatgtgggtatcacaaggctgcggacctcctaaatttgttgggaagatgaagttagacttgcaagtgcctggcccctggcatgagggattagccaatgccaggggtatgatgggcctagggatggaacctgggagcttggggagaagcgagtgtgggcagggacagtgcatggagaagccaggaaacctgagctgcaagggaggcggaaaggggccatgaaaggccctggtgcaaagtgtgcggcagcagcaaggcaggggaaaggggctgcagggagggccaagggtagcaggaagatgggaccaaaactggagagaaggagagagacagtgggacatagaggatgacaggaaggggtggagatgggaggagagaggcacagatggagaagataaaaaaccagacagacagacatgtacacacgtgataagacagagagaccaaggggcggagggaaaatgagtccaggcggaagggaacacctctgaggaagatcactgcacaaaccctggtcagctgcacatgaccccaaagagtggctcttaggtttat

SEQ ID NO: 27987 - DNA, 1079 bp, Artificial sequence
  DNA replication origin
agtctttgcaaagaatagtaattataataataaaaacaaggtcattttggtaggtaaactctttccctcttttggttttaacttgcctttccttttcaaagtgtcatctcccatgtttattggccgttgtatttctttgggcaggtcaagggtagtaaaggggattatgttcatggctttggttttaagaaaaaattgctagattttcagcacaggcctcatcaagttcctcaagcaaggtgacaatcacccaggctagagtgcagtggtgccatctcacctcagtgcaaccactgcctctccattcaagcgattctcatgtctcagcctcccaggtagctgggattacaggcaggtgccaccatgccaggctaatttttgtatttttaatagaaagggggtttccccatgatggccaggctggtctcgagctctgggcatcaagtgatctgcctgcctcggcctcccaaagtgctggaattacaggcgtaagccactgtgccaggcctcaattattcttatttactgctctgtgtgtgtgtgtgtgtgtgtgtgtgtgtgtgtgtgtgtgtgttgggggggagggtccccagaggtgacactaggaggtgaatgatttgtttggcagctttctatttatctatgtgtttactttatcttaattctttaattgcaaggactatagcgcttgtgtaatcagagatagggcagcctggattcctggacagcaggaggagagacctcagggttctacaagactccacagaccaagttatcagtgatcagggtgagtggggagaaccaagctgaactctttctctgcctttaaggtctgtactctccatccatccattcattcattatgaggacttggtgatcgcctgttgtcttgatgagcagttctttgtgtctttgattttgtcactgaaagattgcatcctctttccaaatacctctagaaagctgtgggggggctatccatccgtcacacctgagtattaattatcttccacacagcattttatacaacggtagaaaggcaccttcatcatatctagggtctcgtttatacccacgaa

SEQ ID NO: 27988 - DNA, 1493 bp, Artificial sequence
  DNA replication origin
gaccatttacctctccccgtggctaacctctttgggcctcgagaaaacacatttctctatgactccacgccgcaacacaggctccaaagagcaagacacaactcactgcctccctctctcctgcctcccaacctgacccaccagagaagagctcttcccaccccctccccacccccaggtcaccaacatcctgtcccttagtctagcttcatcaaagcagcaaagccaacactgtctcctccccagtggatgggcccagcagcacccatttctcttggctgagtgcccagggaattccaccaggcaatgtccacaggcgcttgcgggggtgcacactttaggggggaaatgcgggccctcttggaagagggccagctgtcctcccagactgcaagagagaatgcattgaacacagcctttgtgcgtgtgttggggcagggagcgggggagaggtggcgggtggtctctgctggtcctgctgcctcagaggccatctctgttgtcagagtttgaagactcctggaagggcctctaggccccagatcccagttttaagagctccagtcttactaaatctcgctgaaccccctctagtcttaccttggccagggtgggtgaggaaaggtgagaggatgtgaaataggtggggcagccaggtgtgggagtggagttggggtgaggtggagaaggatgggattgggagcggtgggaggatggtgcagggggttactaggatggggtttgtgtgaaagggcttgggtggagtggagggaggtggatgacttggaggggtggccagacctttgccctgctcctgagtatgaaggtccctcattttacatctttactggggaggagaggggaaatccccaaaagcctttaatgtggtggtgtcagaggccaccctgcctctctgacgggtagggaggggtctccggcagggctaagggtgaatcatctatctctccagagcccagtatctggggtgggagggtgacttgcagagtctctgctccgggatttccttgtcttatgatggggggagagcttccatttgtcatggagggggaggtcactgtaatttataagctgagaagacccccattattccgaaagagaggggagaaggaagacacccaaacttagttttctaaggatggggaaggggcatcagtctcccaagaggtgagggggctctagagacctggagaccactttttggggccgcattctatttcaagcggtaaaagggagaggacttctgtctagagctggagccaggaggaagggcccatttctgaaggagaaaggaaggtattttgctctctggggggtgggagcccctgtcttttcgggggagggccccgcgtcttgggaagatgagggctccgtttccaggagaagatgcccaggttttgctcctgggggcagggcagaaggacctcctctcggctcccctcggaagggcccgtcccaagccacccggcgcctcg

SEQ ID NO: 27989 - DNA, 945 bp, Artificial sequence
  DNA replication origin
gagcccctccacccggcagccgccccgtctgggaagtgaggagcgtctccgcctggcagccaccccgtccgggagggaggtgggggggggtcagccccccgcccggccagccgccccatccgggagggaggtgggggggtcagccccccgcccggccagccgccccatccgggagggaggtggggggatcagccccctgccaggccagccgccccgtccgggagggaggtgggggcatcagccccccgcccggccagccgccccgtccgggagggaggtaggggggtcagccccccgcccggccagccgccccgtccggaggtgaggggcgcctctgcccggcctcccctactgggaagtgaggagcccctctgcccggccagccgccccgtccgggaggtgaggggcgcctctgcccggccgcccctactgggaagtgaggagcccctctgcccggccaccaccccgtctgggaggtgtgcccgacagctcattgagaacgggccaggatgacaatggcggttttgtggaatagaaaggcgggaaaggtggggaaaagattgagaaatcggatggttgccgtgtctgtgtagaaagaagtagacatgggagacttttcattttgttctgtgctaagaaaacttcttctgccttgggatcctgttgatctgtgaccttacccccaaccccgtgctctctgaaacatgtgctgtgtccactcagggttaaatggattaagggcggtgcaagatgtgctttgttaaacagatgcttgaaggcagcaggctcgttaagagtcatcaccactccctaatctcaagtacccagggacacaaacactgcggaaggccgcagggtcctctgcctaggaaaaccagagacctttgttcacttgtttatctgccgaccttccctccactattgtcctatgaccctgccaaatcc

SEQ ID NO: 27990 - DNA, 1684 bp, Artificial sequence
  DNA replication origin
gctgtcgggcacacctcccagacggggtggtggccgggcagaggggctcctcacttcccagtaggggcggccgggcagaggcgcccctcacctcccggacggggcggctggccgggcagaggggctcctcacttcccagtaggggaggccgggcagaggcgcccctcacctccggacggggcggctggccgggcggggggctgacccccctacctccctcccggacggggcggctggccgggcggggggctgatgcccccacctccctcccggacggggcggctggcctggcagggggctgatccccccacctccctcccggatggggcggctggccgggcggggggctgacccccccacctccctcccggatggggcggctggccgggcggggggctgacccccccccacctccctcccggacggggtggctgccaggcggagacgctcctcacttcccagacggggcggctgccgggtggaggggctcctcacttctcagacggggcggccgggcagagacgctcctcacttcctagatgtgatggcggccgggaagaggtggtcctcacttcctaggtgggatggcggccgggcggagacgctcctcactttccagactgggcagccaggccgaggggctcctcacatcccagacgatgggcggccaggcagagacgctcctcacttcccagacggggtggcggccgggcagaggctgcaatctcggcactttgggaggccaaggcaggcggctgggaggtggaggttgtagcaagccgagatcacgccgctgcactccagcctgggcaccattgagcactgagtgaacgagactccgtctgtaatcccggcacctcgggaggccgaggctggcggatcacttgcggttaggggctggagaccggcctggccaacacagcgaaaccccgtctccaccaaaaccagtcaggcgtggcggcgtgaggctgcaatcgcaggcactcggcaggctgaggcaggagaatcaggcagggaggttgcagtgagccgagatggcagcagtacagtccagcttcggctcagcatgagagggagaccgtggaaagagagggagagggagagggagagggaactgaatcttaatctactttaggtttcatatgacaggaatcatgcagtatctgacctttggtgactggcttatttcacttagcataatgtcttccagtctcatccatgttgcagcatataacaggatttcctccttttttaaggctgcataatattccactctgtggatacagcatattttttcccattcatctgtcaatggacgtctaggttgcttccacctcttggctattgtgaataatgctacagtgaacatgggttaaaatacctcacttctggagcctcagtttcctcatctgtaaaatggggataatcacgcctgccccattgttgctggcacgtgaaagaagcctgataaatcatgctcctagcacctttcacttttccttcaaggcacttctccccattataatgatgcccttgtttatgttatgattcatttcattctctttgttcctcatgaagatgtaagctccaggcctgcctcattcatccctgtatgtccagtctgagaaacagtacttggtacaaagtcagcactcaatggagtacttgttgcaaaataaataga

SEQ ID NO: 27991 - DNA, 961 bp, Artificial sequence
  DNA replication origin
atggtgaaaccctgactttgctaaaaatacaaaaattagctggctgtggtgcctatagtcccagatacttggctgaggcaggagaatcacttgaactcgggaggtggatgcagtaagctgagatcacaccactgcactccagcctgggcaacagaacaagactctgtctcaaaaaaaggcaggctgggaaactggggaatttgagaacaaagacacggtgcggtttctgagactcctggaaccaggggctgcagtgctgaggacctcaggaaagccctgcccaggccacccctcaactcggattctcactccatgatggccttgtttctctctggctctctggcttggactggctgtctttactcttcagtcacaagcccaggctccctcccacatttcatgtcaccatgtgagcacccacaggtggctgaactctttcagttccagcatcaaaagtcccagggaaggagctgattgggccagggcctccttgcctaggacagaggctgggggcagtgtggcagctccctctggtggaggggcagttctttggaaagaggttcccggtggttggtcagatggtgcctgctttggtggctgtgtgaccagaagggtggctggtgtcttggggaagggagctgtgtcccggtgtgagccctgactgctttatttatgcccccgtagtgtggaaggggagtatgtcccagtggaaggcgacgaggtcacctataaaatgtgctccatcccacccaagaatgagaagctgcaggccgtggaggtcgtcatcactcacctggcaccaggcaccaagcatgagacctggtctggacatgtcatcagctcctaggagatggtggaagcaccccttgtcctgtgcttgtgggagactttgcagggaggaggcagcagacactggagatgacattcttccacacgagacggggcttcagccgggcatggt

SEQ ID NO: 27992 - DNA, 1071 bp, Artificial sequence
  DNA replication origin
ctggccatttttgggcctatgtcccggactgccaaataggcagacctggggctgggccgtgggctgagggtgagaaactaggaaggcgccttgtaaattcagggtactgcccagcccagaagaacctgttaccagctgggagtggcaatgggtgggcagttgctggggtcagaatcgctgggctttaaccacacatgagagtctggttccctgtgagactgtgaattctgcagctgcaaaatgggcacagcaccagggctgcaaaggacccacataatgcctggcagatgcaggtctcaggccttgcgagtggaggatgcttgtgttattaatagtaaatcattagtttctggagggatgttcagtgatgttttagttcaactccctctttccaggagggaaaacaggcccgagaaaattggccagggtcatccaaagagtcctttcccccagcgtctttgtgagcggctcccagggttgagggttgtgcagtcctcagcctgtgtgactgtacatggcggtcctggccagggcttgatggggcacagctgtgggcaggggctggaatgagctttgtgtgcccaggagcgctgatggggcccctgacatttccccctctctgtcaggacggtgcgggcttcacagggccccgtctacaaaggagtctgcaaatgcttctgccggtccaagggccatggcttcattactccagctgatggcggccccgacatcttcctgcacatctctgagtgagtcagcggcaggtctgggtggcctggctggggtgggcgcttccttggccctgtggaggtggggatggtgtgtgactctgatgggcgctgggtgtgaggacgaatggctgggcctgtgtgactctgcctgtggctggtgctccagctgtgctcctgtgtgtgtgttgggttggggttgtgagactctacggagctgtgttgggggatgtgaggctgggggcgacacggtacttgtgattgtccctgggtgtgtctttgtgaatgggtgtgtaaggttttgtgtgtgctgggcgtggtggctcacgcctgtaatcccagc

SEQ ID NO: 27993 - DNA, 936 bp, Artificial sequence
  DNA replication origin
ggcaaggggtaggattagaagtcagctatgcttcattagccgggcgtgatggcgggcacctgtaacccctgctacttgggaggctgaggcaggagaatcacttgaacccagaaggtggaggttgcagtgagccgagattgtgccattgcactccagcctgggcgacagcaggactccatctcaaattaaaaaaaaaaaaaaaaaaaaaaaaaaaagtcagctatgcttgactccaggagaaaggagggagggagactttggatagaacaaggcagggcagtgtctctaactgtggagttgcgaggccactgctcccatctgctgtcctgggaggcctggacagggccctcccctcccagggccagcctctttcctggaactctgggcgttgaacattctaggactctatgacctgtgctggtaggtcatgcgggggccctggcccccaggccagcagctggggcctttttgaggtgggggctccccggactcaggagttcctccttggccgcggctgtagctgagagaagggacaggaggtaggatgccacctcctccagaaggcaagccagccaccagcttcccagcccgacagaactgaggcccaacgggagagtgcagcaatgtctggggaggggttctgacatttcagggatggggcatcccttctcctctgagcagtcgggcctggttcttgggtggctatgcttgaaggcggttcggggggtgcggtgggatttttgggtgatgtaggttgaagactcctataaatgaggggactgggggggcaaactgaggttgaaggttgtgagagcttcatttctttccatgagcagctggaaacctggattttgaggaaaccccctgggatgtttaagatagttcaggccgggcatggtggttcatgcctgtaatcctagcactttgagaggaaga

SEQ ID NO: 27994 - DNA, 1389 bp, Artificial sequence
  DNA replication origin
gccccctcccaggccccgccaagctgggaatagctcttccgccctcaggagcccctgagtgctgggaagaggccggaaacccgaggagtgtaccgggaacccaagggggcctccaacattgccattgcctgtgcccccattagcacccctggacggcctcgaccggacgggcgaccccacccagcagggagacggtcaccccaccgccaccacccacctgggaccctgcgcccgccccagttctcagcctggactgcccctcctgcgggaagcccaagccctccttctcaacaagaaccctactctacacgcctcccccactcaatccctccatccttccctccattctcggggggctttggctcagacctgagattgagccctgactggtccccactccctctgtgacccctgccaggcgatttcaccgccccacccgagtttcctcatctgtcaaaggggacaggagcggtgctgcgtcgcagggctcggacgctgtgcagatggtgccgcgaaaatgccaagcgcacggcgggctcagtccacaatagtgcggctgatggtggaagtgtcaggcacgggcccatctgaaatcaccttccctcccattcctgcccctgctgatggaacacaaaccaaatgcgctggctttgccactcggtggaacaaagaccgatcccctacctaggggacccaccgtcaaccaccctcaaccccaccccatggccccacgccaggcctagctcagctcattgaaaacatctactcccagccgggctctgcgcctctttcttgccctgaagggaccagcatcgagaactcacggtcatcaccgaggccacccagggagtgcagagggcggtggggtctccaaggaggaccccgagcccagaggagggccaaaggcccgaagggagggagaacagaggcagagagaggctggagaaggtagtggcggaagataacaggaagccctgctgagaagttggggacttagacgacaatgggacttcggtggacgattttcagcgtggggtagatctaagcggattgtttttctaagttccctctggcttcagagtggcagcaaatgacaggggcaagcaagactgggcacagagagactgagaaatatcaaaacagcaagttaaaaaacagtagcttacgtgtctcccggcacggggctagctgcctccttttactctcacacaccctctcatgccagaagaagtcagagcccagtctgcagatggggaaactgaggctccgagaggcctcctatttggcagagatttccccacctattaagacccaaggccctgcctggagcgggacgtctccgcctcccccagcacacacatccactccaaccccagaaaaccatagggc

SEQ ID NO: 27995 - DNA, 841 bp, Artificial sequence
  DNA replication origin
ccaaacaggccccgagaaacccagcccggagccctcctctgccgagctagaagaccctgcaggatgggggacgatggaggcagaggaggccgaggccccacccctgcggctcccggggccgcgggccaggggcgcctatcctggggtccccgagaagagctccctaccctgcaatccgttctgctccgccagccgcttcgctccgactgagagcgcggagctggggagggggcgtggcccgagggggggtggggcgccgatccccgcccccaggagctcccggccaatggggctgcgggagggagcccgggacggtgggggcgggcggggcgggagtggcccggacaggacctttgtgtccgcgccttagactggcgggagagcggaacgcagagcgcgggacgtaggggccggggcggggcggggcggggcggagctgggctgcacccaccagcagaaaacgcccctgcaaagtgggggaactgtgtccctgcgcccgtgcagttccttcccctcgccacgcgcgccaggtgcggctcccacctgcctttggctctaaaatctgtataatcccggagggtgtcacttttagcagaaaggaaataaaggaatgaaaagagagacggaagaaaacaagcaaaaaacagaaaggaggaaaagggaaagaaaaaatacacacgcacacacacaccagaaaaacagggttttgttttctcgttggggattttgattttgttctcttctcttgtttcatttctagccttccttgagtcctctgtttttggaggtaaaaaatgttacctctgttttgcaggagaggaaactgaggcacagagaggcg

SEQ ID NO: 27996 - DNA, 1825 bp, Artificial sequence
  DNA replication origin
cgccgccgcccgccgcgggccgccccggggccgccgtcgccgacgacgcgcgggaggaggaggaggaggccgccccgccgccgccgccgccgccgccgccccggctcgccgccgcccgcccgccgggctcgcagccccggcccccggccgcaggcgaggcccaggccgcggccgacatgaaccaccagcagcagcagcagcagcagaaagcgggcgagcagcagttgagcgagcccgaggacatggagatggaaggtgaggcccgagggccggccgcggcggggccggggggcgcctttcattgtggccgggggagccgcgggagccacgcgaggggctcgccatctttaaccaggccccgggcggccgccgggcctcggcctggcctcccggccccggcctgcgaggctgcaaagtcatgccgggtccgcgggcgaggggcggccgccgggaccccggccccgtgcattgtcccgacctcgcgtccgccgggcctccgcggcacaaagcgccctgagttgtaaattcgagcgctcaggcagcggagggacggaggtgttttctcacccaggttgggaggcggactccggggaccgtccccgttctggggcgtccggttggatctggtgtggctggggaattcctgacctccccgggcgcggggctcgcccgcacctgctccggtgcgctcccccggagggcgcgccgtggctcggaagcgctcttccaaatcactttctaacagcactgcctagcgtcgggcttacgttcgaaaatacctgcaaggaacgcagatgttgtcaggttttggactggcccagagttctgacccgggcgctgttggtttccgaatccacctgtttttcggggagtttgtacttggcagtgtgtggtgcagccagcatccggccaggtgtgcgcttgcaaccgtgcgaaagccctgccgcacatggctgcctgcatcagaatcaaacctgactcgaaaggtaactcggttttctgccgatgtggcagtaattttccaaggcactgtagtttgaggtatagagtcttggttgtaaaggttggatgtgaagacgctgtaaagagaagggtgttggatttagggagttggtcgttggaaggcactttttctcacgacccatttcactgaaacaaagcaaagtccaaatggtctttaaaaagttttcttacctacgtgacgagttcaggctgtcgggagtcaaatggaggccacctgaatgaaaacggcgtggaatgctttagttttgcttttagcaagggatcttgggttgcctcaatgaatgaagctccaggggagctcaggaaaagcagtatttgtcctgtgcggtggctccaagtgtggggcgctgcacaccggttggtgggaacacttaagcgtgactggtgttcacctctgaatagaataacttacttccagtaattggatagtcactgaaaaaatggctggccaggttgcaaatgacaaagtggctgggattctgcagtaggcactccccagtggtatttatcaatggcagtaatgggggacagaagagcggagtccacgccaaggactgggttatctgtttcacttggccccagcaaagcagcaactaagagcgcctgttatgtgtgattaaaccaaatagctgaaaagaagtactttactgagggaattttgtgtattccttttgtgctgtattttgcagcccatctaaaacataaaagagggttgcttttcagtttccttttcaaatggtacccggtcaagacaaatatccaataacacgagcatatggatttcccatgacattgtcctacc

SEQ ID NO: 27997 - DNA, 1800 bp, Artificial sequence
  DNA replication origin
cctggggccggcgggagcggcggagcgggcgggcgacgggccggccgcgttccgagagccgcggcctccgcctcctcggcgtcgtcgtcggggctccggcagcggacgcggcgcccggcagctcggctcggctcgctctcaaaatggcggcggcgtgaaatgtcacatccgcatggggggccgcggagcgagcgagcgagcgaggagagcaagcgggcgggcgccgagccggagggcggagcgggagcgcagggcggagcacgggaggcggagcagggagcgacccgcctgccgccgccgccgaggcccgcctgccccgcagcgccgcgccccggcaccgcctgcgccgcagccccgcggcggaccctcggcgctccctgcccccgggccctgggggccgaggcgggccgcccggtgacttagccctgcggaggtgaaccggaatccttcccatcctggggagccggacaccccgaaagacccaggagcggcaatgaggaggggcccagaagccacccggcagccggggttcaggtcccagcctagcgcgccggggcgagcgctggaggttgcccggggactgctcgggatagggcccggaagggagcttggggtcagcgcctagaagttcctgttattgtcgttacttacccttgcccgctgacgtgcactttttcacccagtatctaccgtggaagaatttattttctcactgtcagcctaatctggcaaagtttggctcctcaagagcaaccccaggcggggcgcagctgctcacacctgtgatcccagcactttgggaggccgaggtgggagaatcacttgaggccaagagtaagagaccaccctctctacaaaggttttgggttttgtttttatatttttgaaatgtatttttaattagccgggtgttgtgcctcctgcctgtagtgacagctacttgggaggctgaggctggaggttcgcttgggaggttgactgaggctgcagtgatcaaagatggcgccactgcactccagcctgggcaacagaatgagaccctgtctcaactaatagtgataataaaataataatataaaaataaaacaagcccactacccttcacatttggtattaatttacttccttcctatcaacccagtctgggatcattcacccggggcctccctattccaggagacatttggtgaatatatctcctgtcctgtctcattcagtcattgacagactgatgattagggtctcaacttttccagttaatcaaggcagtgtgggtcaataaaaatggagcaaaccgatatacatttctacacatctcaggggagaatagaatttcaccctaacaaggccagaagattgtggtacctgtcttctctccatctccctatacccgctttccctgcatttttctcccatttatgtactgttcatctcccttccccccgaaagaatgttttgctcactgttgtatcacaaatgcctgggatacacagcaagtgctcaataaaaattggttgggccaggtcggcgcggtggctcacacctgtaatcccagcactttgggaggccaaggcgggcggatcacttgaggtcgggagtttgagaccagcctgaccaacatggagaaaccccgtctctacttaaagtacaaaattagccgggcgtggtggcgcatgcctgtaatcccagctactcaggaggccgaggcaggagaatcacttgaacccgggaggtggagggtgcggtgcggtgagctgacatcgcgccattgcactctagcctaggcaacgagcgaaactc

SEQ ID NO: 27998 - DNA, 1009 bp, Artificial sequence
  DNA replication origin
agtggtgatgactcttaacgagcatgctgccttcaagcatctgtttaacaaagcacatcttgcactgcccttaatccatttaaccctgagtggacacagcacatgtttcagagagcacggggttgggggtaagcttatagattaacagtatcccaaggcagaagaacttttcttagtacagaacaaaatggagtctcctatgtccacttctttctacacagacatagcaacaatctgatttctctatcttttccccacatttcccccttttctattcgacaaaaccaccatcgtcatcatggccctttctcaatgagctgttgggtacacctcccagacggcgtggcggccgggcggaggggctcctcacttctcagacggggcggccgggcagagacgctcctcacctcccagacgcggtcgtggccgggcagaggggctcctcacatcccagacggggcggcggggcagaggcgctccccacatctcagacgataggcggccgggcagagacgctgctcacttcctagacgggatggcggctgggaaaaggcgctcctcacttcccagactgggcagccgggcagaggggctcctcacatcccagacgatgggcggccgggcagagacgcttctcacttcccagacggggtggcggccgggcagaggctgcaatctcggcactttgggaggccaaggcaggcggctgggaggtggaggttgtagcgagccgagatcacgtcactgcactccagcctgggcaacactgagcactgagtgaacgagactccgtctgcaatcctggcacctcgggaggcctaggctggaagatcactggcagttaggagctggagaccggcccggccaacacagcgaaaacccgtctccaccaaaaaaatacgaaaaccagtcaggcgtggcggcgtgcgcctgcaatcgcaggcactcggcaggctgaggcaggagaatcaggcagggaggttgcagtgagccgagatggcagcagtac

SEQ ID NO: 27999 - DNA, 1209 bp, Artificial sequence
  DNA replication origin
cgccgcgtcctcctcaggcggggcccccgcgggagcgtcgtcgtcaagcggcccggcggcagggcctggcgaccgacggcgccttctcctttcagcggcccaggcctcctgcaccccgacggccggcgagccccgccccgcggccccgtgcaaccagggacgacccccgccccaggccttcccacccccgggcccggccgaaggtcgccgcggaccagataaccgctgccgcccctcgcctcggccgccgcagcctgtctaacgcccccccatggcgctgcggcctccccactgccgccgccgccgctgatcgccgagccctccgcgcagctcggcctgcaccgcggagcccaccccaagactgagcaacgtcgtcgtcgtcgccaccgccgaggacggctctgcggctgctggtccccgccctaccccgcccacatgctgacaggagaagcaccgcccactgggcccaagctaccctgcccggttgaggcgtggccgctccaagggcccctattagtcggatccggccggttccgcgtggcggcttctgagcacagcgtcgtgattggttcttcggcctgtctgcctgacgtaaccaattggctgggggaagggagtgaatgtcaggaaggatgaaggaggaggagggggaggagctgacagtggttgcgtccgagccaagggggcgggtggggggtggaggggaagagctagaagggatgcgcatgcgcacttgctcgctgctcccccccccgctcaggggcgttgagtggggatcacgtgacgaggcccagcgaccgcaccccgcgggagcttttccggcgtgtacaggccctggggggatgcaaagtcgagtgcggctcctgtgccgcgggcactgagaggtatagtgggtggtagcgtgcttactccagcccctggggctcccaaagggaggagggtagtagagaaagtgaataaaacgcccaactcgtgtccaagtttgcaaagcgctttcctattcttttgagtactcccccttttttttttttttttttgagacggggtcttgctacgttgtcgaggtctagactgctggcctcaggcgatcttccagcctcccagggcgctgggattacaggcttgagccaccgcgcccggcccagagtcccatttcttagacgggcaaatcgaccatcacagccaaagaaaaacttccgagttgcgaag

SEQ ID NO: 28000 - DNA, 1330 bp, Artificial sequence
  DNA replication origin
ggcggccgccgcgcagcccgagcacaagcagcagaagctgtggcacctcttccagaactcggccaccgccgtggcccagctctacaaaggtgaggccgccgccgccatcttggtaccgcttggccgcccccgcccgggcccggccccggccctatcggctcagcggccgcttcggggggccgcgacggcggcggcctcggggatcccggccggtggctccgcggccctgccgccccctccccgcaagatggcgccgcgggagggaggcccggggttggggggacaggccagagccggcgtgggggtagccccgctttggggtggtccgagggtccccgctctccgggcccggccacccggtgtccccctcggcccggagacgggagaggaggagcccccgtcacaaaatggcgaagggagacggcggggcggccccattgtgccctgagccggcctcggggcggggactgccagggggggcgcttccctgcgccgcggctcgtccctgatctgtgcccctgagctctgcggcatccccttttccccgccgcgacctccctgcccccccggtcctcacactgggtttgggatcccgaaacccctgaacaaaatggcgaaacctaatatggccgttccggagtgattgacgcgcaaataacattcttgttctctttctttctctttctatgtgtgtttcttttttctttttggttttttttttttttggcttgcttttcagaccgagtgtgtcagcagccaggactttctctctgggtccccttccaaaacgcagccaccgccgtcaccaatctctacaaaggtaaagataaccttgctgcattgccgattcagggaagggccgcctgcgtcagggtgtctgccctgcgttccaagtgtgttttctgctccccagcccagctgctaaccttgaataccttgcaacttgagaatcgcggcggtgctctagctagatccaccggaggcgattttgacacctccctccgccccccgggacagatggcaacgcctggggacgtttttggttggcttctcctagaaggggctgttgttgggcacccagtgtatagaggctgctgaaggtcctgcagtgcccaagataaccgccccggccccctctcagcgaagaattatcatgcccctaaagtcagtagtgctcaggttgagaagcgttgagctggaagacggctgagccttgcctccctctggaaaagacattgagggaagataagagttgatgttttttgtactacagtcggaagtgggacgaactttatggaaaagattcttgagttaggcatttgaaagcgtg

SEQ ID NO: 28001 - DNA, 1158 bp, Artificial sequence
  DNA replication origin
gtgtgtgtgtgtgtgtgtgtgtggtgacaacgcttaaaatctaccctcttagcaaatttcaagtataaatacagtattgttagttatactaccacgctgtgcgtttggcttgaatttctgatggtgcctgaggtgaatggggatatgaagcgggatgaggccagccacagaaatcagaggctttagggcatgatgatgcatacctgtagtcccagctcctcaggaggctgaggcaggaggatcgcttgagccagcagtttgaggctgcagtaagcaatgaacacaccaaagggaaagaaaggagaggggaggggagaggaggggaggaggggatgggaggggaggggaagagaggaggggaggaggggaggggaggggaagaggggaagggaggggagaaggggaggagaggggaggagaagaggggagggaaaggaaggggagggaaagggaaggaaaaggaaacaggaaaggaaaggggtaaggaaggaaaaggaaatgggaaaggggaaggggagaggaggggagaggagggaagagggaaggaaaggaagaaatcagaggctttagccaacacttctagggtggcttgttttacccaagcactggaaatgaggcagctgagagcaaacagcaacagctgaagacctcagggaggcaggtcctgccctccctgctgggagaggagtctggcacaaaagaagctttagctttaggacgctggtggagcgagcgactgctccaacgggcctcgccctcactggacaggatggcagttggacaagactccaaacaataaacaaagcacagtccctgccattgaggacttccaagtctagtgggaacaatggtgaagttgacaggcaattacatttcagcaggatcagagctagcaaggagaccaatcaggctaagtggtcaaggaagatgtatgggctgaaggtttgtgtcctctcaaagttcatgtgttgaaaccctaatccccaacgtgatgctattggaaggtggggcctttgggaggtgatgaggtttagctgaggtcatgggggtgtggccctaatgatgagattagtgtatttataagaagaggaagaagccaggcgcgttggctcatgcctgtagtcccaggactttaggaggctgcggcaggcagatcat

SEQ ID NO: 28002 - DNA, 939 bp, Artificial sequence
  DNA replication origin
aggattgcttgagcctgggagggagaggctgcagtaagctgtgaagacaccactgtactccagcctggacaacagagccagaccctgtcaggaagaaaggaagggaagggaggggaggggagggaaggaaggaaaagggaagggagggaaggaaggaagggaagggagggaaggaaggaagggaagggagggaaggagggaaggaaggaaggaaggaaggaaggaaggaaagaaggaaggagaagggaagggaaggaaggaaggagaagggaagggaaggaaggaaggagaagggaagggaaggaaggaaggaaggaaaacggaaaggaagggagagggaaggaagggaagggagggagggaaggaaggaaggaaggagggaaggaaggaaaagaaagaaagaaaaaagaaagaaagagaaaagaaaagaaagaaagaaaagaaagaaagggaaataaagaagaaagaaaaagaaaagaaagaaagcaggcaaggaagggggcaaggagagagaaaagaaagaaagagaaaaagaaatgaaaaggaaaggaaaggaaagagagaaggaaggaaggaaagaaagagaaaggaaggaaggaaagaagaaggaaggaaggacggaaggaaggaaggaagggaggaaaaaaagtattctctcacagttctggacgccagaagccagaaatcaatgtgttcccagggttggttccttctgcaagctctagggggagcatgtgtctctcgcctctctgcagcttctggggattgccacagtcctgggtgctccttgacatgtaggccccgcactctgatccctgcatctatcatcaccccatcatcacctggtgttctcctctgcatcttctaaactttttataaggacactagtcattggatttagggcctacccagataatccaggatgatctcatcttgaga

SEQ ID NO: 28003 - DNA, 806 bp, Artificial sequence
  DNA replication origin
gcctctgcccggccgccccatctgggaggtgaggagcacctctgcccagccgcccttcgtctgggaggtggggagcgcctctgcccagctgccctgtctgggaagtgggtgcctctgcccggccgccccatctgggaggtgaggggcgtctctgcccggccgccccatctgggaggtgaggagcgcctctgcccggccgccccatctgggaggtggggagtgcctctgcccggccacccatcatctgggaggtgaggagcgcctctccccgaccgccaccccgtctgggaagtgaggtgcgcctctgcccggccgccccatctgggaagtgaggagctcctctgcccggccgccctgtctgggaagtgagaagcgcctctgccaggctgccccgtctcggaagtgtacccaacagctccgaagagacagcaaccatcgagaacgggccatgatgacgatggcggttttgtcaaaaacaaaagggggaaacgtggggaaaagaaagagagatcagattgttactgtgtctgtgtagaaagaagtagacataggagacacccttttgttctgtactaagaaaaattcttctgccttgggatgctgttaatctataaccttacccccaaccctgtgctctctgaaacatgtgctgtgtcatctcagggttaaacggattacgggcggtgcaagatgtgctttgccaaacagatgcttgcaggcagcatgctcgttaagagtcatcaccactccctaatctcaagtacccagggacacaaacactgtggaaggccacaggcacctctgcc

SEQ ID NO: 28004 - DNA, 1478 bp, Artificial sequence
  DNA replication origin
tctgtcacccaggctggaatgcagtggtgcaatctcggctcactgcaacctctgcctcccgggttcaagcgattctcctgcctcatcctcccgagtagctgggattacaggcatgcaccaccacgcccaactagtttttgtatttttagtagagacagtgtttcaccatgttggctaggctggtctcgaactcctgacctcaggtgattcacccagctcagcctcctacagtgctgaggttacaggccgagccactgtgcccagccagtagctatttttaaaaagattgtccaacaaatttgtgcatctcccttcttctgataacagatatggccaatgaggttggcatatgactcaggtctgaccagtcattgacctctatttcttaggtgtcagtaattggttcagtgggtggacatatgaccttaacagagccaattagcattcttccccggaattgatgtataggaaagatactgtgagaaagatactcttgcttttggctctaaatacaaagtagggtgtaaagttggaggtgctgagagttatcttttttcccgtcatgtagaaaaggcctgtttgtagtggaagatatgaagccaaggagggaaaagggaggtgagaaatatatgggggggagagagagagagagaagagagggagagaaggtgggggagggagggagaaagtgggagtgagagagaaggaaagagagagagggggagagaggaaaaaagagggagcgagagaggagagagaaagagagggagagaaagtgagggagagacagtgaggggggagagggagggggaaggggaatgagagagagagggagacagaaagagggagagagggggaaaaggggagagagagagggagagagagaaagcacagggagagagaaaaagagagacggtgagagagggagagggggagagagaggaggaagagggggaagagaaagagggagagagagagaagagagaaggatgagaaatgtattttggcagtgtcgagtgccagttcaactgcttggggacattatccctgtaacccatcctttcaatgctatatactccttcagtatcattttcaaagcgtgtgagccaatacattccactcccccttagcatggcttaagttcagtttctgttccgatttctcttgcagatttccctatacattttaagggtgaatggacactggctcccacactgctttctgggaggatctgttctaacttggaaaaggatcttgtatggcctggaacaaggcagaattagtggctttttactcatcttctgggtgttcagctcctctctgtcagggctggagactgcaggacagaatgtaacagctggatagagtctggtaagggcattttatataagccttgctggatgtaacaagggccccattcatatttctcctcttttactcagtaactttaattcttcatttttatcctgaaaatagca

SEQ ID NO: 28005 - DNA, 1122 bp, Artificial sequence
  DNA replication origin
acgctcctgctagcacattcttatgcataatgtagggagatgacaaataaacaaatatttagattatataatctttttgtttttatgagatggtgtctcactgtcacccaggccggagtgcagtcgtgcaacctcaacgcactgcagccttctcttcctgggttcaagcgattctcctgcctcagcctccagagtagctgggactgcaggcatgtaaccacaacgcctggctaatttttgtatttttggtagagacagggtttcaccatgttggccaggctggtcttgaactgctgacctcaagtgatctgcccaccttgacctttcaaattgctgggattacaggtgtgaagcaccatgcccgacctagattatataatgatgacagctgatgatgttatggaagaaaaatcaaagtgtagggatgaagaagactgagggtagtgtttcattagagtgcttatgggaggcttctcagaggaggcagcatttgaacggagacttgagtgaagtgaggaagcaaaccatgtggacatttgctgcagcatgttctgggctgaggcatagcagcacagaggtgctgaggcaggagtggggttggcgggttccagaaatgtccaggaggcaaggtggctggagtggagtgagtaattcaaggcaatgtcagaaaagtgggcaggagccagatcagttagggccctgttagggttcagttagggtcggccgtggtgaggacttaatccacacgtgagggacaggcagggggctctgagcggtggggggatgtgattcgaattttcttttattagcagcatgttagctgctgaatggaggccagatggggagaaagggggcggggagcagaggagaaacgtagagcccaaaaggagattgtcaccgtggtccagataaaagatgacagtggcttatattacattattatggtggcaatggtaagagatgattaggttgagttatgtggtggtggttttgtgtgagtatgtttgtgtgcatgagtgtgtgtgtgtgcgtgtgtgtgtgtgagagagttttatggtatgatttgctgctgctgcttctgctgttagcgagggtgtgtgtgtgtgtgaaagagagagagaa

SEQ ID NO: 28006 - DNA, 1660 bp, Artificial sequence
  DNA replication origin
agggccagattctaatttttgaagttttttcctaatgtcaggagtggattgggtgataaaatgcatactaagaataaggcggccttctggcccctctgggtctagggtggtatagcatctaatggttgctgctaagcgggccatgaactgggctgggttttcatctttaccttgggtagtttttttaagtttgtcataattaacagctttgtaagctgcttttttaagcccttcaactaggcaggaaaccatgtaatctcacctagctatacctggggaatttgcctggtagttccactgggggatcctctcggggaactgctctaatgccttcctggaggtctggctcatgaagccgacggttatcagcgtgagattgggatacaggaaaaactctttcccgttcatctggggagagggtagaagtcaggatgacatttaggtcactccaggttaagttgtaggacagagttagatatcggaattcctgtatatatttagtggggtctgatgagaaagagcctaaatgctgactgatctgagagaggtctgatagagaaaaaggtacatgtgcgttgactatgccttcagctccagccacctctctaagaggaaattgttgggcaggtggggaagagctagttgcggaactaaactgtaagccggaccgggtgtgaggaggggaggtggtaggaggattatagggtggaggagtggaggctgaggaagaattgggacttagctcggcctggcgatgagcaggctggggaggaggggaaaggtcagatgggtctgtagaaaaggaagactggaaagactcagcgacacttggggttgggactgcggggacaggcgggagggaaagaaggaggatctgggaggaatcgcattgggaacagaggctagggatggaacgaagtgtgaaaaatgcctggacgtaagatacctcagaccatttgcccatttttcgacaaaaattatttaggtcttgtaggatggagaaatcaaaaatgccgttttctggccatttagagctattgtcaagtttgtattggggccaagcagtgttgcagaagaaaataaggcatttaggttttaggtcaggtgtgagttgacgaggttttaagttcttgaggacacaggctaaaggagaaggagaaatggagggtggaaggttgcccatagtgaaggaggcaaacccagagaaaagagagcgtagagacacggagggaaggggttcgggggttcttaccctccagaaaagcaggaaggggggtcggggcatggaaataagggattggggcacagagataagaggttggggtgtggaaataagggattggggcacagagataagaggtctgggtgtggaaataagggattggggtgcagagataaggttggggtgcagaaataagggattgggggttcttgccccgtagaaaagcgggacttgctgctaagggtgaaggagaaggggttgaggggtacttgcccctcccccagaaaagcagagaaggggtagagacaaggagagaaggagtttgggtacttgccccttcctcagaaaagcaagacttgccactaagggtgaaggaccaaggcaggcgtccctgcgtggtctgacacctctgaaacgtgggtgaatgatcagagaggc

SEQ ID NO: 28007 - DNA, 1053 bp, Artificial sequence
  DNA replication origin
ggtgctcccagaacacactgtccaggtctctattgtcaatcgtcaccaggtattttaggtgtctatttaaatagctgtctccatgcaaccagattaatgctaattcatctgtacagtaatagcacacagcccagctcccagtacatggggagctgagaacacattcagtgaaggtataagtaagcaggtgaatggatggacagacgaatgcatggatggatggacggacggatgaatagattggatggatagatggatgaatggatggacagatggatggatggatggtcaaataggacaaatggatggacaggtggatggatgggtgggtggatgaatggatgggtgggcagatgaatggacagatgagtggatagatggatagggtagatggatggatgacggaagagaaaaatgaacagatggatggatggttgggaggatgaatgaatgaatgaatggatggatgaatggatagacggacagatggatggatgggtagacgggtgggtggatggatgaatggagagatgggataaacagatggacagatggatggacagatggatggatggacagataaatggatgggtggttggatggatggacggacagataaatggatggatgggtgggtgggtggatggatggatggatggacagatgaacagatggacggatgggtggatgtgacatgagttgtgggtataagagattgaagaaataaacgaacatccagtgagaaaggcagtggctgagttagtagcacagtgatgggttagagagggcagggtataagtgagagctggatgaacagggggtgtgaaatgagggggctcagaggtagaactgagtgtctgcagtgtgagaatccattgctacccaaactctcacaatctgaaggcaggaaagtaataaacaattctgaggagggttgggctggcattcttcactgtctgaacccttgttacttgctctctaggattcaggaaccaaacagattcaggcaaagtggattccttctctatcaaaacccaggaaaggaattgattc

SEQ ID NO: 28008 - DNA, 1644 bp, Artificial sequence
  DNA replication origin
gcttttatataacaatttagcttcagggagtaggtacagcagaatgagtaatctctttacaaaagaatttgtcattttattgaacctttacagaagattctccttaattatcaagcccacaccccacccaatacattgaaaatatgattcaaaatttattaagatttactttgcacatctttccccctggaattcctactctgcgttataccttttgtaggctgggttgttggaagaattagctggtaaaaatgagcttacgaaaatgggaaggtctcatggaagaagtgaagtcttacacattcccttcacttttttatgataaaggtgataagattcattaaagtaaaaagacattaattgctgctgattaacatctggcactctacccactcagaccaccacctgtgtattggaggtgagggggtgccttaacctgggttactttgccagggggctttgatgtcaggtggaggcagagaaggaagggcttaggataagcacagagaaagccacctcttccagcctgcggcagaggggagtgttcctggctggggccgctttcgcagagcatagatacgacggctcatcggcacagctctgacctgccagcctcccccacagctgcctccagcctccagagcggcttattcaggaacagaggcagatgcagtgtcggagcgcagctgcgtgagggttgcgtgggtgtgtctccatgggagtgtgtgcagtgtgcctatggtgtgtgtatgtgtggtgtgaatgtgtaggtttgtgtgtgcacatgtgagtgtgtgtgtatttgtgtgtgtatgctatgtgtatttatgtgtgcgtagttgtgaatgtggtgtggatgtgtgttttgtgtgtgtgtgtgtgtgaatatgtgggtttgtatgtctgctgtgagtgtgcagcattatgtggtgtggatgtgtgtttgtggtgtggatgtgtggtgtgaatgtgtgttcatgtatttgtgtgtggcgtggatttatatttgtgactgtgttcatgtatttgtgagtgtgtgtggtggtgtgtttgtgggtgtatttgtggtgtggatgtatgtgttgtgtgtttgtacattgtgagtccagggttgtgagtgcatgtttgtgtggtgtggatgtgtgttgtgtatttggatgtgcatgacgtggatgtgtttatgtatctgtgtgtgtggtgtggatgtgtgtgtggtgtgaatgtgtgtgtagtgtatttgcatgatgtggatgtgtgtgttcggtgtatttgtgggcgtatgcatgtgcactgagtgaagttgcgagtgtgtatgtgtggtgtgaatgtgtgtagtgtgtgcggtgtggatgtgtgtagtgtatttgtgtgtgtggtgtgtggatgtgtgtagtgtatttatggtggtgtgtggatgtgtgtagtatatttgtgtgtggtgtgtggatgtgtgtgttgtgtatttgtgcagtgtggaggtgtattgtgtgtttttgtgggttgtgctgtttgtgggttgtgtgtgtttgcatgtgcgctgtgagtgtgctggattgcgagtgtgtacctggtgagtgtgtggctgccgcacccctcctctgagcggtgtggaccaggactcctctctctctctctctctctctt

SEQ ID NO: 28009 - DNA, 1049 bp, Artificial sequence
  DNA replication origin
gccaggaagcgctcagaaaactgagaagtaggctgtggggtggtggtggtggcggtggtggcatgtttggagatttacgagtaccatggggcacagaggtgggcccaggagcactggagacatatgcttcctattttcacaatgccagttttacctgattgttttgtgggaaaatgtccattttttcctcttatggtaagtgactaaaactatttctaaaaattattaaatgtgggtaggttctggaagaaaatgcaaagtttttaggtaaagcacaaaagggcagaaaaaatgtcatgcttcctctgactctgcagttagaggaacagaggtggggagtttgagaagccctgggccagaggagcggaggagagacccgttcctcaaggggagtgggtgggagtggaaagaattaactccaaacccagagcatggagggcctggcattttccttacgtgttctttgtctggggctccaaggccctcagatgaaggagttggctcctgaacaaagatgggtcttggtactaaagttggagagtctcaaaatgcaagaaagagtgtacaaaaatcagttggctctgaatgagagggagggtcttttttgtggacagcctgggagctttggtttggagaagaagggagagagatttgaagatttgaaggcgatgttatgacagcctggtttgggaattacacagaagtggagggaaggaagaaggctggaatgaagaagtaaagtgaggaatgagaaaaaagggaaagattggagttgtgtgtgtactgtcctctaagtcctgagaaaagattgggagttcagaaggcgaggaaagagtaagtgtacttgtgtgccatagcctctagccctgagaccttcttggagagtgttccttagatggcaggagatattctagtggagtgagcagacattcactgtagcgctttccttttgatgctctcaaagcacttttatattcatcacatcagcttttgcttctgtttcagcgattcctaccagctcctttggtaaccgtattaattctttcagg

SEQ ID NO: 28010 - DNA, 916 bp, Artificial sequence
  DNA replication origin
cgtctgggagcttcttgggagcctacctttccccctacgcacgttctttgccagctcctacgcgctggcccgcggggggacgcgcctactctccagaattcagcattgcacacggcgcgcgtgagagagggtgtgtgtgtgtgaacatgtgtgtgtgcgtgtgtgtgtgcacgtgtgtgtgcacgcgcgcgtgtaggggtgaaggactctccacggccccttggctcgaggtggggcgagccccaagttccccaggcacagcggagcctgggcccaccaggcagcgtcctcactcccaagcacttggggtgtactctgactgagaggagccgggtctgtagttggggctgggcgtagagcaaagtgtgtggtgcacacgacgggctcgtagggggcggggtcagccaactagctgagctctcaagctgggacgcggggtctgggtgccgcctccgcacgccctgcggggtctgtagttcgctccgcgccagcagggggcggggttgataacttggtcctctctatcccaggtgggaggggttggatggagggtttattctgtgcacctaggagcttggtggggtacagaacacgcgcggcgcttagggtctgtggcccgcggcgaacttggggaatgcggtgggggatatggacagagatggggatggggaagtgcctggagacaggggatgaggaagctggatgcgagaaggggctgggggatggagaattagctcgaattggagttgtggatagagttagagatggatcgagggatgtggatggcgtcggggactcggaatggagtccgtgatcccagcagcctatcctgctgctgagttccatgcctggctcctagagcaggaagccaagttggtaatccctttcttctggtcgccttgctcaccgcggccct

SEQ ID NO: 28011 - DNA, 1246 bp, Artificial sequence
  DNA replication origin
acgggtggccgcgctccgcgtcgccgccgagggactgcggggtctgtctcgacccacctaggagagaggctgcgggcaggagacgctttcgcccgccggagctcgaagcctcttgggcttgagcgggggctactgcgtctcgccggctgagaacaagtccctaagttggtgtggagggcgccgctaccttccttctcctcttcctcggaggcgaccgcagcagaaagacgccccgggaacccggctttgccagtgctgtgaaccagggtgtccaggcgctcaccggactcccgctgggaagtggggagccgaacgcccggcgcggagctggcccagcagcgaagggcccggagggagctgcctttccccgcccgcgcctctctcggccggggaccgcggggatccccggccacacgcgagcgcgctcccacactcacacacacactcgccctcaaacacaccagcccggagctgggttgcggagagggtgctccggcgcgctcagaggaccgggcagttgccgtccggagtggggcaggaagcggagctagggatcttggaggggagctcctagggcttggccggatcatgggaccgggtgagcgctgagaatcgcggccgcagccatcagccctggagatgaccaggagcggccactgctgagaactatgtggagagaggctgcggtgagtgctagcgcgggacgccgggcctgggaggcccccttgggaaggggggaggtgggaggcctgaagagggaggaagcggcaggatcacaagagggtcgctgcgtgggaaagatccacctccctcggggaaccgggaccgcgggagcccgcgtccttccctccccctctcctactgctggctcgtcacaaactcagccagcgcccccccaccctcgttacctcctctttctctccctacctccctcgctcagcagctcccggtcgcacaactcccagcagccggcgctggggaggtggtagggggtgcgggtggaggtgcccagttagcttctcgtgggtggccaacctggggctcccattctcctgtgcaccctggagtggagctcccgctatcagccacaggggctgaggatccgcactgggggcgtcgtgggcatcgggcttcagcttcccccctcttgtctagcccccctgggcgcataggggggcttgtgagcactgcagactgcagccttcccctcaaccctccctcccctcgttggtgggctgaccctgcc

SEQ ID NO: 28012 - DNA, 1371 bp, Artificial sequence
  DNA replication origin
ccccgcggtccccggccgagagaggcgcgggcggggaaaggcagctccctccgggcccttcgctgctgggccagctccgcgccgggcgttcggctccccacttcccagcgggagtccggtgagcgcctggacaccctggttcacagcactggcaaagccgggttcccggggcgtctttctgctgcggtcgcctccgaggaagaggagaaggaaggtagcggcgccctccacaccaacttagggacttgttctcagccggcgagacgcagtagcccccgctcaagcccaagaggcttcgagctccggcgggcgaaagcgtctcctgcccgcagcctctctcctaggtgggtcgagacagaccccgcagtccctcggcggcgacgcggagcgcggccacccgttccgagagcgcacggcggcaaataaggccaggataggtggctggctggcgacgggggcgcctgcggcggcgcgcgctgctgtccgtggtgttggaaccacgctctccgcccgctcccgggcgtctggtgcggctgaagaatcaattattcagatctctgctaccgcttcctcctcccccagtgcctcgcgctgggtacagttatccccctccacgcacaggcgcgccgacacacacacacacacacacacacacacacacacacacacagagtctgctccaatgcttctccctgtgcctcgccacccccgtacgggaacccactcctctgatctcagggagccagaatcctaaaagcaaagacatctgcatttcccacatgcttccttctaagttctaccaaacagaagcctccctgaggctgccacttctaagctaccagaagaggtgagccagagaacatgggacggcccgggtgtgtgagggcttggttgacttgaattctagcgactgggcatgaaatacatggtcaagggaggagctctgccccttttatattcacctgtatctccaacgcctgtctgcctttcaggccttggaaggaaaggggtcttaaattctaagaggttttgcaatgactgttccaaccctgcctcctccacttaacctaatgtcacctgctgcggtctaaatgtgtgtgttcccacccccaaattcataggataaaatcctaactcccaaggtgatggtattaggaggtggggactttaggaggtgacttcatggcttcatgagagtaaaatgggatttgtggtcttataaaagagatgccagagagtcagctaggtccttccaccaagtgagacttaatcaagaaggcatcggcctatgaacaggaactaggccctccccaaatactgagtctgctgctgcttcatcttggacctcccagcctcaagaagtgagagaaa

SEQ ID NO: 28013 - DNA, 1227 bp, Artificial sequence
  DNA replication origin
ttaagttcttgagaacacaggctaagggagaaggaggaatggaggatggaaggttgcctatagtgaaggaggcaagtccggagaaaagagagggtagagacacagacagaaggggtggggggtgcttccccctcaggaaagtgagaagggatggggggtgcttccccccgacgaaagtggaaaaggggcagagacatggaaagaaggggtggggggtgcttgcctcccgggaaaatggagaaggggtggagacatggggagaaggggtgggggatgcttgccccccaggaaagtgagaaggggtggggggtgcttgccccccaggaaagcggagaaggggtggagaaatggcgaggaggggtggggggtgcttgctcctcaggaaagtggagaaggggtgggtagagacacggagagaaggggtgggtgagcaggtgagcagccctgggctgcaatgtgggtgagcagccaaagcaggcatccccgcaattgacttgccaccagtgaaatgtgggtgaataatcaggcaagcgtccccgcatgattaaacaccaagggaagactgtcttcccgagtccgtgactggcgccggagttttgggtccacaaataaaacgtgtctgctttgtctctaccagaaaaggaaaggaactgaaattaagagaagggcgagattgaagtgtggcgccaagattgtaaggagaaagaggttgagggatagtgagagaggttggagaaaagagtaaaaagaggccacttaccggatttaaaactggtgagatgttccttgggctggttggtctgaggacccgaggtcgtaggtggagcaaagagcaggaggacaggggattgatctcggattgtgactccccagatccgagtcacggcaccaaaatttcactcacgtcagtgtgaagagaccatcaaacaggctttgtgtgatcaacaaggctgtttatttcacctgggtgcaggcgggctgagtccgaagataggggtggggctgttttatagggtttgggtaaaggaaaattacagtcaaagggggttgttctctggctggcaggggcagggggtcacaaggtgctcagcaggggagcttttgagccaggatgagccagaagaaggaatttcacaaggtaatgtcatcagttaaggcaggaacaggccattttcacttcttttgtggtggaatgtcatcagttaaggcaggaaccggccatctgga

SEQ ID NO: 28014 - DNA, 893 bp, Artificial sequence
  DNA replication origin
gagaggagggaggggagggggagggagaggagggaggggaggggaagggagggaatggaggggagggaagcgaggggagcctttgggaggctgaggtgggagggttgcttgaggccaggagttcgagaccagcctgggcaacatagggaggccccatctctacaaaagttttaaaattggctgagtgtggtggtgtgcacttgtagttccagctactcagaaggctgaggcaaggggatcccttgagcccaggagtttgaggctgcagtgagctgagaccatgccgctgaactccatccagactggacaacagaatgggactctatctcaaggaaggaagggagggagggagggaaggaggaaggaaggaagggggagggagggagagaggaatcaagggagggagggagaaatggaaggaaagaagagagggagggagggagggaaggagggatgaagagaggaaggaaggaagaaagggaggaaggaagagagggagggagggaggaagagaggtaggaaggaagggaggaaggaaggaaaagaaaaagacagtgtcacctgaaacatggttagagaagtgctgaagccgctaaagtggggaggctgcaaacagcaggactgaatcagaagggtcatctagagcaggcggtggctgatcttgtcatcgggagacgagaggagtcggggaagagcaggaaggtgtgcagtcagcacgtggagcagctgctggcttatcctgtaggttttcctatgggatgaacgtgaggcaggttgctgggagttccaagcaggattaggagccttcagtctgaactgcagacatcccaacctcaagagttgcctccaggccaggcatggtggctcacacctgtaatcctggcactttggga

SEQ ID NO: 28015 - DNA, 973 bp, Artificial sequence
  DNA replication origin
tcctggaacggaagtgaatgtttcacctcagtatcttttctctgcctctcacataatatcttcgtagtaggagctaaaaccacatgcatatgtgcacagactccccaatttcccgcaacaggtaattaacagggaggatcaaccagcccatttttcaccctaggcatagagtgacactctcctgccctcgcctctgctatacagccttccaggtcagtgagggcacagcaaaggccacttctttgtcatagtaaactccgccagacgggaccaggaagggaagtctgtcgagatgaaaatatataaatgtccttccaggccagatgggctggcgctggactgctggctgcttggcgaggtttgtttgggaagcagatgtccagcctccctccttttgccgggaggggggggtcagataattgtgtgtgggggggtgggggggacaacatgtggctgcttcccagctctgtggccaagtggggactctgacgcgggctacaggggctaaggtggggacagggcagggctctccagccacgggagttccagaggggaggcggtgacgttacttacccaaaggtggggtggggcccaggcactgggattaagggagcagatctctcccagaggagagagttaaaggccagcctcgggatgcctgtgcaggaggggtgtgtgtgtgtgtccgggtgtctcaggagggcaggtgattggcagcagcagctggaatgaaggaagagggcagttggcatcatagaagggatggaggcctgactcttggacgatggcctcagcatgtgcagggaaggaatggggattggtgtggtggtgacaggcagagcagtctccccttctcaccccaggagtggtgaagcctggctccctgcagaagttagccaaagaatgcaatttcagcagcactgtggcaggaatcagatgcatctggctcttgttagggacaggccagggggga

SEQ ID NO: 28016 - DNA, 924 bp, Artificial sequence
  DNA replication origin
ccagcgccgggtgagttgtgggcgcacccagggcgcggggcgacatcgggggggccccgggatcgtgtacgcccgggcagcagggacgcgacccctccacttactggaccgggagcagcccccggaattggtgacagtaacgggagggccgaggtgccacccatgccgccgacctctggtctgcgccacgctcgctccggccccagaattccacttcgccatcccgggacagcttcccacgccttttgagccgaagcaggcgggaaaagtttggggaggagtcagggcgcctcccctcgccccgccggacttacacccggggctcttggagtccagggagatccccaggtcgcgtgagggattcccgggcagcgtccccagactcgcctcgcgggcaggactggtgcgccaggccgggccagcgggtcctcctgggctgcgtacccctctaggcccccgccgctgctccgtcgcgcccccgagcggcgaggagcgacttcttgggggtcaggaacggtggaggagccgggaggcgctgctgggatgacacctctctccctgccaactctagaagggcttggggggctttaaagaggcgagaccgcacccatgtgttccagaggtaggagaggctgcagctcgtagtgtgtattctacgccctccccaaatccagagatctgagcacgctccagggaggtcttttaggtgaagatgtggggctggacatggggactccgaagacaccacagggcaaagctctccctccaggccagcttcagttttggggaagggagcactgcccctcccaagctttgagggtgtgtgtgtgtgtgtgtgtgtgtgtgtgtgcaccttgatcttataattcagctgtgtctaagtaaggggcttggagagggacttaagaagcctccagttcaaat

SEQ ID NO: 28017 - DNA, 1215 bp, Artificial sequence
  DNA replication origin
ggagcgagcgtggcgcagaccagaggtcggcggcatgggtggcacctcggccctcccgttactgtcaccaattccgggggctgctcccggtccagtaagtggaggggtcgcgtccctgctgcccgggcgtacacgatcccggggcccccccgatgtcgccccgcgccctgggtgcgcccacaactcacccggcgctggcggctgcgctggcagctggatcgacggactggctgggggtgcgaggcgaggccgccgggctgttttgaagctctgggctgggactgcgcgccctccctccaccctctaggcggcggggcccctccttccccgatcccgcctcccgggccgtgacgccaggagccgggagagccgagtgggaggggccgccggcgaaaggagggggccctggagggaaaggccgaggccgggagcgccctggcgcccccgcaccaccgttcccgcccgcctccctgcggctctgtggccagctttggggcggagccggtggcacgggcccgggggaaaagggagaaagggaggctcccgggagcaagggtcttcccttctctgcaggtttccacatccctctcattctctttcctctcctcttctccccttttcttcctcttccctaaggagttttggaatccgggctccctgctctagaaccccttctctggccttttatgaacttcctgagctcgtccataatctcccctgtctcagtttcctcttctgggaatgggagtgattataggtcggaaggtggtaatacgtccacaatgtttggctcatggtacctgctccatagacgtcagccattgttatttttatcatctcacctggagtcctggccttggtgcgagatgcccagcaaccagtcttcagactcttccaggaccccccgttcactccccccacccgaccagtacacacacacacacacacacacacacacacacactcacacaaagcactccccacagcctttcaacccacagtcctggtatttagtgtccctggaaatgacatcaaaggaactgcctttctttccagcctcagtttccccatctggaaactgggagggctgatctgctctaggggctcttgggaggatgggggaggagaccagaggcgcctgagccccatcgtgtgtgtgtggaaggagggagtgggagtcagtgtatttttacaaattgaagaaattccaaaaca

SEQ ID NO: 28018 - DNA, 1087 bp, Artificial sequence
  DNA replication origin
ccagaaggaccaaggaagaggacaggagaggagctggcagagggcaagagggagagcttccaggtgtgctcttttgtacattttgtattttgaactatggtaatgtattactgattccaaatgttgacccattgaaaggtattgctaaatggctgcaggggaggagcagaatattgctgggtattattacagcatatgggtatattatatgctatatgggcatattataacatttattatatgtcttgggtcaggggatgtggccacagtgtgcaggcggatagctgtgaaagaatgggtgtgtgaatgtgagtgcacgtgtgttgagtgtataagaatgggagtgagaatgagtgtgtgtgcgtgagtgaatatgactgtgtgcatacgcaaatgcaaattatgtgtgtgcgtaggttagaggataggtgtgtgagaggatagtgtgtgtgtaaatgtgtgagtgtggatgcgtgagtctgtaaaagaatcagtgggagaatgtgcagtgagtgtgagaaacagcaaatgtgagtgtgtgaatgtgtgtgtgtggctgagtatgggtgtgagtgggggtaggtgtgtgtgacagtgtaagagtacgtgtgtgcaagtgtatatgtaagcgtgagactgaacgagttctgtgtgtgagagtgagcctggagaggtgtgaggctgtgtgtcagtgtgggtgcgtgtgtgtgtgcactgtgtgtgagatcaggcatgggagtcatcgaagaagaaaaacacagatgagacacaaaccccgaccttggagggctcagcctggtgtgggaggtggagaggaaacccctaagtgagaaccacacaataggatggtggaaatttaatttgctggcgtttgactcagggggagctggctgtgcttggagaaatgtttcctaagggtttggcatagaaggtggtagcagcagcaatggcatctgttgggtttggagcccctgtcatggcagagcctcctgagttgagaacttcatgttgtcatctcccggccacgtccccacccagccccaactcagggcctgctcacagcgggcacctagcaccctccaacccg

SEQ ID NO: 28019 - DNA, 1222 bp, Artificial sequence
  DNA replication origin
atgcactgcagaagtatttatgataggaaatctctgaaaaggaacagacgttgagtcccagtctttcggcccaaggttcgcgcgtgcgcacagccccctttccgagacttatttcgcgcggtcggagaatcagattgtgcccacaaggcggaaatgtacgacagcgggttccggtgaccacgaaggcggcaaaggcgacggaatggaggaggtgcctcacggtaagctcgcggagggggcgtgggtcgcggggcgaaagtgtcgggagctgctctaactgtggtcttgtctctgcgcagactgtccaggggccgacagcgcccaggcgggcagaggggcttcatgtcagggatgccccaaccagcggctgtgcgcttctggagcgggggccactccggacacgggtgagaaaagggcaaggcctcaacaggaacttagaggcgcaggcccggaaaaggcggggcgtgggagggagggggcgggatctgcagaatgactgacagcggcaggctagaaggtattgtattcggagaggggtggggcccagaaggggcggggcgtggaaagtgggcagggtgagggcggagcttggaatgactgacaggaacgaggcctttagaaggcgagcgcgaaggacctggcgcggatggagggtggagactgaccggcgcggagtcgaaagggacattaattaagagggtcggggccagaggtttgagtgacaataacagaccgcagagaaaaacgggataagcttcgaagtcggggagtcttcggacttacatcctggctctgccagctactttcttgacacaattttcttccttttgaggagtgattctcccactcattcagcagaaatgtgttgatcgcctcgtaggtttggtgctgtcctggggacacagctggggatcaggcgtggtcactgctctagtggagtttagctttactggggaaacaaacacgtgagctagcaactaaaccaccgcagctttaagtgctgtgaagcacagattccaggatgagaggacccagggagcctgctcagaaggaccttaaaaagcaggaggcaggaggacaatatttttttttcttttttttccccctttttttttagacagagtcttgctgtgtagcccagaccagagtgcagtggtgtgatctcggctcactgcaactttcacctctcaggttcaagcgattctcgtgcctcagtctcccg

SEQ ID NO: 28020 - DNA, 1177 bp, Artificial sequence
  DNA replication origin
gtacgtgggtctcccaggatcccaagagatgcccactccctgagtggccctgaggctgaaggagggacggggtttcacgtctccacccacacgcccgccgggcgcccactcgccgcggggcgctgggcagggcctacactcgaagctgctcccccaggaggctgctgtcccccaggaccgcggagccgggcgggcctccgttactggggccctttagtggggctcctgcggggcgtccagcactcgcctttaggtctgaggggagaacagagagagaaggctggaggggaggccgggatccaggagtgccggctgcacccatgcctcggaacttccactccatttgtcagggaaccaaggccagtgtgaggtgtctgtgccgggacaggagagaggggccgggcgggtgaagtatggcctggccaggagagggtgggggccgcgtgcttggggagagggcggggcccgtggagagcctggaggcggggagggcggaggccacgtggggagccttggggaagggctgcatggggagaatgggagcctgtgggaaacgactgtcagtgtcatgtgcctgggaacaggaggctcaggagtggctgccctgggataggggttcaggatgaggccctgggttctggcgttggtgtagaaaggaagggacacacacaagagagaaagtgacggcatctgagggtcaaggttgtccctgctgccagtacaagtcacctggaggagggtccgtccctcagagacagtgaagcaggggtggtagagggaggccgggccctctggggtgctgcggctaaggggctcgggggctcaggttgtcagcaggttctggggtccgtcaggagaaggtggttcatgtccgtgcagttgagttttgaagccacaggacatggacaggattgccaaggggccgtgcagaaagcgggagccaggaggacagtgttgggggatggctgcctcgaggaagtggtaggggggtagggtgcgagggccactctgaagatgggaacagcccgggagaacgccagagaccccatgtgcccaggaggctgtgtccccaaatcctttttcccttattcccacatcccacaatacttctctggcatgtgatttccccaacaacatgcagaaaagtacagctgctttctcaaccttccccagcatc

SEQ ID NO: 28021 - DNA, 1140 bp, Artificial sequence
  DNA replication origin
tgacatactccagcagactgagatgctccaacagactgacatactccagcagactgagatgctccaatagacctactccagcagactgagatgctccaatagactgacatactccagcagactgagatgctccaatagactgacatactccagcagactgagatgctccaatagactgacatactccagcagactgagatgctccaatagacaaatactccagcagaatgagatgctccaatagacaaatactccagcagactgagatgctccaatagactgacatactccagcagactgagatgctccaacacactggcatactccagcagactgagattctccaatagacaaatactccagcagactgagatgctccaacagactggcatactccagcagactgagatgctccaatagactgccacactccagcagactgagatgctccaatagacaaatactccagcagactgagatgccaaaaagcaaagtacactgaggtgctccagcaggctaagatgctcccatgggctgagatgctccagtgggctgagacgctccttcgggctgggatgctcccgtgggctgagatactcctgtgggctgagatgctcctttgagttgggatgctcccgtgggctgagatactcctgtgggctgagatactcccttgggctgggatgctccagtgggctgagatgctcctttgggctgggatgctcccatgggctgaggtactcctgtgggctgagatgctcctttgagttgggatgctcccgtggcctgagatactcctgtgggctgagatactcccttgggctgggatgctcccatgggctgagatgctcttgagggctgggatgctcccttgggctgagatgcttccaggggctgagatactcctatgggccgtgatgctctttcgggctgatatgttccttcccccactccttcatcgtgggctaacgctctcccttgtcattttctcccacagatgtttcccctgacaaacgtcctgcccaccaatcccatctcggcagagctgaactgtggcagaggtgcaggctggcaggaatggatgtgccctgggctgctgcaagctcctgtccccaatcacatccattcatgcagcccaac

SEQ ID NO: 28022 - DNA, 1492 bp, Artificial sequence
  DNA replication origin
acatccacgtttatgcgccgtccacaccattcgctgacgcagccgccccccgcccccgactcccattcctcccactatctctgtccgcagttccccaggccgttgcctccctgccgccgctttctctcctgggcgcgtccccggcgagccgagccccctccccagcctgcgactgcgccttaggccccgagcgccccgccccacccgagaagctgcgctgaggctgccccacagggcgcaggccccgaccctcagcgtccaccgtctgctgcctacatccgcccgcccggcgtccgaccccttcagcggcgacgggcggagctggagccccgggcctgggcgccaggtgggctcctgggagggtgatgaagcaggtagggcctcggggatgctggggctggaggcggggcgggacgaggggagcctgcgggagcgctggagaagccgggaggaggaggagggatgcgccggggcctggggctgggctgcacccggtggtcgggagggtggagagggctttgcactgcagccgcagcggaggggccccgccagctcggagggtccacttgggaacccggtggggtgcaagtggagtccaagcccaggaggacagggcgggtggggttggggtgtgcgccgtgcttgggcctgccacctgcccttgctctcctcccaggccctggtggacgataccgaggatgtgtccctggactttggaaacgaggaggagctggcctttaggaaagccaagatcaggtgtgttgggatggagcttgggtcaggcgttccccaaagctgcaaattcattcatttactcactcattcattcaaaatatattgagcacctactgtgtgccaggtctggggctggggacatatctgtggacacatcagacaaagtccctgccctcctggagcctgcattgggagagggaggaagaaggggtggagttgatgttgaacaggcaaggagattaatgagataattgaatgtgagaagaaaatcagccctgtgatgaaagagaaggtaactagagaaggccacttgccttagtgcagccatggagggcctctctgaggaggtggcatttgagctgagaccagaatgatgagaagcagccagccatgggagactccagagggagagtgttccaagctgaaggaacagcaagcgcaaaggccctggggctatgttgtaagatcagagaaagccactgaggccagaggggagcaagcttggcagtgggctggacaagtggaagagagcttggagttttattctaatccctgctgagtctagctagacagacttgtcctgggtcaagtcacttaactgcctgagacctctagcatcccagaaggtggcatgaccaaggcatgagggatgacctgtgaacgtggttgccgatggcccaggcggcagccacttctagaaacacccacagctcagcctcactcacccacccagttctgcttccagctatcagagcca

SEQ ID NO: 28023 - DNA, 1096 bp, Artificial sequence
  DNA replication origin
cacttgcaccccaccgggttcccaagtggaccctccgagctggcggggcccctccgctgcggctgcagtgcaaagccctctccaccctcccgaccaccgggtgcagcccagccccaggccccggcgcatccctcctcctcctcccggcttctccagcgctcccgcaggctcccctcgtcccgccccgcctccagccccagcatccccgaggccctacctgcttcatcaccctcccaggagcccacctggcgcccaggcccggggctccagctccgcccgtcgccgctgaaggggtcggacgccgggcgggcggatgtaggcagcagacggtggacgctgagggtcggggcctgcgccctgtggggcagcctcagcgcagcttctcgggtggggcggggcgctcggggcctaaggcgcagtcgcaggctggggagggggctcggctcgccggggacgcgcccaggagagaaagcggcggcagggaggcaacggcctggggaactgcggacagagatagtgggaggaatgggagtcgggggcggggggcggctgcgtcagcgaatggtgtggacggcgcataaacgtggatgtagcgaatgataaggcagtgaatgaatgtcagtggtgggcagccgcattcagggttgggagaaggtcagtgtttcccaacagtctctgcgcgcaagaaattcccaggaaccttgtgaaaagcagattctcaggcccggcccgggggatgtggaaggcctggagtggggccctagaatctgccttccccgcgcccccaccccccacgacaaaatgcagttaggatgggccctgctgtgttcttttttggggggtggggtggggaaggcagattctagggccccactccaggccttccacatcccccgggccgggcctgagaatctgcttttcacaaggttcctgggaatttcttgcgtgcagagattgttgggaacattctctgcacctaggctggagagcactggtgccatcgtagctcactgtggcctcaaactccagggctcaagcagtcctcccgcctcagcctcccgaaaagctgggaccacaggctgcaccaccacaccta

SEQ ID NO: 28024 - DNA, 1029 bp, Artificial sequence
  DNA replication origin
gaatgagtttgttagatggctactacacgccaggcctagtctaacatatgatgaacatcatttcccagttgaggaaactaagacatagcgctataagggggcatgttcaagcttatatgtaataaagcagggattcaaatccacttatactaacaacatggccaggcgcggtggccgacacctgtaattgcagcactttgggaggtcaaggcgggtggattacatgaggccaggagtttgagaccagcctggccaacatggtgaaaccctgtctctactaaaaatacaaaaattagcagagtgtgatggcgcacgcctgtaatcccagctactcaggaggctaaggcaggagaatcgcttgaaccgggaggcggaggttgcagtgagctgagatcatgccactgcactccagcctgggtgacagaccaagactctctctcagaaaaatagaagaatactgataaaggtggcaggaatggtggtggtgatgatggtggtgatgacagtggtggtgatgatgatggtggtgatgatggtggtggtggtggtggtggtgatggtggtggtgatggtggtggtggtggtgatagtggtggtggtgatggtgttggtgatgatgatggtcatgatggtggtagtgatggtggtgatggcggtgatggtggtggtgatgacggtggtgatggttgtggtgatgatggtgatggtggcaatggtggtggtgataatgatggtggtgatggtggtggtgatggtggtggtgatggtagtgatgttggtggtgatgttgatggtggtggtgttggtggtggtgatgatgatggtggtggtgatggtggtggtgatggtgatgatggtggtgatggtggcgatggtggtgatggtggcggtgatggtgatgatggtggtggtggtgatggtggtggtgatggtggtgacgatagcggtggtgatggtggtggtgatgatgatggtggtgatgatggtgatggtggtggtgacgatagtggtggtgatgatggtgatggt

SEQ ID NO: 28025 - DNA, 1215 bp, Artificial sequence
  DNA replication origin
cggcggccgcagccatgggtgctgggcctgcgggggcgcggggggtgcgcgaggacctgcggggcggggcgggagagaaggctgccgggaccggccctagacactgagccgcggtgggatccccaccggctctgcgaggccctgcgagcgccagggaggcgccacgagggagccgggcagccgcgggccacttcaggggggcccgcctcgccgcccgggcggtcgagagatccttgggggcacatctcggggtgcggtgacccgcccggcgcatttcgggggtcggggcgcaattgccaggggacatctggagcccggccctgcttctgtcgggctccagggtacccctggatggctgcgctgtgccctcgccggccgcccgggcgccgcagcggctgagttcgccgggatcgccgggccgccgcccttgccacccgctgcatgctcggcgcccgggtcgcggcccacctggacgcactgggccccctggtcccctacgtgccgccgccgctgctgccctctatgttctacgtgggcctgttcttcgtcaatgtgctgatcctgtactacgccttcctcatggagtacatcgtcctcaacgtgggcctcgtcttcctgcccgaggacatggaccaggcgctcgtggacctcggcgtgctctccgaccccggctcgggcctttacgatgctgactcggagctcgacgtctttgatgcgtacttggagtagggtctcgactgctgttcccctcttccctacacgatccgcaacccatgccctggaccagccgcccagatcatgccgccgcagctggttgggggcaccatctggacggggatggttccccaggaggagaccctcccctgcctccgaggcctgtaagtgccctctctgaacaggatgagggcgggttggggcgctagcaagggagagggaggaattcccaggccggatacacacccctccctcaggcttctcctccgttcacctcctccaggtctaactggatgccaggaatggccagactcctcttaagcccttcgtttgggctggaaagcttcctccagcaaaggggacagctggtgaaaaggaaggagaccccgagactaagttacatttggggtagctctgtgacttacccccaaagcttatggaaaaagccttcgctcccaaatccatttgaggcagagctgtcagctcctcctccagtcctca

SEQ ID NO: 28026 - DNA, 1210 bp, Artificial sequence
  DNA replication origin
tgaactgcatttcccagcgccccacgcggcggcggccgtaaagcgcggcggtcgaacggccggttccggctgaatgtcagtgctgggctgtgggccggggaggaaggcggctcgcggttcctccaccgcctccgccgccgcatcctccgcttgtgctaccgccgcgggcgctgggccgctctgctggtccggcatgagaccgtgagacgagagacgggtcggggccgccgacatgtttggccgctcgcggagctgggtgggcgggggccatggcaagacttcccgcaacatccactccttggaccacctcaagtgagtgtggggggcgtagcgggaggcctcggggctggacagggggacggggcgccgagctccgggtcggggctctaggaggcgtgagagcggcggcgaagggcgcccggggaagcccgtgtggtggttaagagcgagggctcgggagtcagggcgcctgggttcgaaccctgaccccgtcgctcttggctgtgtgaccttggacaagtcgcttaatttctcagagtctccgtatccccacctgtaaagcgagaggatgcgatttcagtttatggacacagactttgttcttgacggtgtccaccaagtttcctggcggggtacttcttaaactgaacagcttagagggtcaaaggcctgggtcctggagtcgggcagatctgggtccgaatctatctgtgtgaatgtaggcctcaggttccccacttgtaaaaagagtagagtgacagcacctgcttcctgctattgtgttgagagttggttggataagagaatgaacgttaagctcagaacacgtacaattgctcattaaacggcattaattattataaaagaacagattattttccgaggggagtctaagctgggggcatgcacgctgagacccaggattttggggcgattggggaggatgatgaaaaatagagacctctgaggagggaatgactctacagctctgggggaggacaggtggcagatagggtcttgggaccaggagtgcagaaattaagaggctggctttgcagccacacctgcgttcaaatcctgaaaccaccatttactggctgtgtgaccttgggcaaattacttcacctctctgagcctccagattcccatttgcaaatggggatcgtgaacattgtaatggaaatggaaggtgactgacccagtaggtaca

SEQ ID NO: 28027 - DNA, 1007 bp, Artificial sequence
  DNA replication origin
gattcccatttgcaaatggggatcgtgaacattgtaatggaaatggaaggtgactgacccagtaggtacatagtaggtggccagtagtggtagctgtgtttattatcagctcagcgaggccttcccagaccaccctacctaacgtgctccccccatcccagttcctatccatcacatctttctcttgctttcattgagtgcttctccactctctgcgattattctttattttttatttatacttattttctgtcttctgttaaactggcacttcacgagggcacagactgcttggtttgttcacagttgtattcccagcatctaggactgctctctgcttacttaaagagtggaaaaatgaatgattgaattggggagagatgaagagcatgcaggccaggacccaggatttgggggcaggtgtggaggatgatgaaaaatagagatctgtatgaagggaaaggctttagggagggaaatggcggggatgctgaagaggggagtagacaaatcttcagtgtcaagaaataggcaggtttccagaaggagatcctgagactactaatgggaaaggaggaagatagggttagggatatggtgggaagtagtggaagggagacggggctgtggaaaggattggtgggagggaattagatagggacttctcatgtgtccccgggagtggggtaggggtagtggcagggccacagttctcagctgtgacctttctagcatggagcagcatttagtaaacgtttgtgagtcttgaagagtggggagcaggagggttcactatgtggtgaggggcacttttagagcaggaggtggtgagagaagacaaggggaggaaagaggcccaggacaagtctggggtgggtagggaggtggggatcttagatgggagggcagctggccgggaaagggagtggttgaaggatttcaggaatttatcgagtgggcggaggtggctgaggaggggaggggagttatccagaggaggttgggcc

SEQ ID NO: 28028 - DNA, 1192 bp, Artificial sequence
  DNA replication origin
acaaggaatacaagaggcaatttcagctaaagctaaggactatgaagaccatgggaaaacggtctggcaattcctcagaaagttagattgtcacatgacctactttttactcctaggtatataccagaaataactgaaaacaaaacaggcgttcaaacaaaagcttgtgcacgaatgttcgcagcaacccattcaacaatagccaaaaggcagacacagcccaaatgtgcattgatggatgaaggtggaagcaaaacaacgtctatccatataatgcatattattcagctaaaagaaggatagatgcaccttgaaaacatgatgcaaactgaaagaagccaggcatgaaaggccatggattgtatgattgatatgaaatacccagactacgtaaatctatagagacagaaagcagattagtggatgccaggggctggatgggggcgggggcggggggggtgggtgggcgatgactacttaatggctatggggttttcttttgaggggatggaaatgttttggaactagaggagaggatgatggcacaatcttgggaaggttctaaatgccactgaattgttcactttcaagtggttagttttatgttgtgttaaatttcacctcaattaaaaacaagctgccgtgcagagaactagggtgacctgggcactcagggaaggcccctttttgaggtatcggagcagagccctgagtgctgagaaggaaccagccatgcagagggctccaggcggagggaagcacgaaaacagaggccctgaaatgggacgcacttggccctggtgaggcacagccagccagccagtgcggctgaagggctggattgtgtcatctgcagagagccgaggggagagagggctgggagctgatcccagaagagggcaggggccagactgcatgggaccatgggccacagagaggggctggtgacaggaggggctggtgggttttaaggagagagcagcagaagaggcagagaagtccctgtcccggagttaacaggctggtggggagcggttgatggtaaaccaggtgggaacaggtcacttttttgtcatgtcactaagccctcatctgcaagggccaggagatgtcaacctgcctggctgctcctctgagctgtgtgctctgccagcccttcccacacccaccaacccaccagggtaacacctgt

SEQ ID NO: 28029 - DNA, 921 bp, Artificial sequence
  DNA replication origin
gaggagggagccagggctcagacggatagagctgcctgcccaaggtcgcaagctcaggggtggcaagccagcactcccagcttcatggccctggctggagtcacttgcagagcagttggcctggctcctccaggcttttccgtagggtcctcccaagtattctagccagtgcttttgggctctgccagccatatggacagcaccaggcaggtagagttctgagcacctgccctgttggagccaccatggaagtcaccatctctggcatggttccttcttccagccagtgcacaccaagtgcctcctgcaacccgtcctaggcccccgtgcagaggacagctcactcacaggaggcagacatggaaaaggatgaccatggggccagggggatacctgaagtggtgggggcctcaacagggcaagtcacccagagggttcatgccgccagagcacggggtgtggggggcactgggttgtcggggaccgtgggggatctggaggggtgcaaggagacatgtgagtttcattctgcgtgctctgggtggcctcggggccgcgaagcagggaagtggctggacctgacgcatgtctgtccaagctccttgcacgtaccgtgtgggaagtggattggagacagcagtgcggggccactggggtcccaccagaaaccagggcagctgggtgagggacggtctgggatgtgggaggtgcccttggctagcatggtcagtgatggcggtggggacagcgtgcctggttatgacagatctgctcctgagaacggcgctgcctctgcacatcgtgtagcagcttgggacaggcaaagcatttcccatttgtgatctcagtaaccgcagagcgtagtgaggtgggagaggcttgagaggtgagctgaccagcgcaggtcacacaacaggaagc

SEQ ID NO: 28030 - DNA, 1271 bp, Artificial sequence
  DNA replication origin
ggtatgctcctatttggagggccctgacctgggtggcctctgtttggagaagtcgccctgggtacctatgtggctctgtccttgcttccttcagatcattcttcagacctcaccatctcagaaggtcttgccagatattctatatagtggcaaccctgtccccactcccagcactccaggggtctctaccttgctcattccttcagagcactcaacctctcctgacattttctactccttgactggccctgccctgtcccatcccattatcaaactgtaagctccaggaaaacaggcactgtgttttgtttacagctgaatttccaagtcctgggctataccagacatataggtagtgcttggtaagtactggataaatggatcgatggatggatatttggatatagagggatgaatgaataaatagatgaatatagaggatggataaatgggtaaaggggtagatggatgaatggatgtagagggagggagggagggatgggtgtagaaggatggatgggtatagaaggatggaggtggagggagaggggatggatggatgtagagggattgatggatgggtagagagggatggatgggtaggtggattgattggtgtacagggatagatagaagcctggatagatagatggactggcagatgggtaaatgggtaggtggctgctgggtggatagatggatagaggtgcaggaatggatgggtggatggccggatgggagggagggagggagagagggatggatggatggtggagccaacagatctttaatccccccttctgtgtgctaaacattgttcactggggactcaggggttagtcaaacaaaacacatcagcccctttggagctcatgggcactgtggacaccttagatagtctagaacttcccaccatgtttggtgccctcagggaactggcagatgctgagttaatgtccagtaaggggatctgacccagaccaggtgtctgggaaggcttctctgaggaaaggatgttgacctgggaggaggaggtagaggaagagcgccgagaaccttgtgtcccagacaggggctgccatagacaggagagcattgatgtctcagcccacaggctgcccaatccccaaggaatgaatatgttgctgcccgtttgacacctggcaacagtttggctaggcacagaattcccctttgtcatcaatttccgccctggccagataaggggagctgagaccccagtcctgtatcccaggtagatattcagccca

SEQ ID NO: 28031 - DNA, 1082 bp, Artificial sequence
  DNA replication origin
accacgcctggctaatttttgtgtttttagtagagacgggatttcaccatgttggccaggctggtctcgaactcctgacctcaaatgatccgcccacctcggcctcccaaagtgctaggattacaggtgtgagctactgcgtctagccttgtgttcatttctctgagagcaacactgaggcacatctgtgctaagtctgattgtcagctgccctgagaagcttgttcaggggcagaaacaagaggaagtgggtttctgggcacctaggggtcccgggctggtgcagcccggcctgaacatcacagaggctggcggagcagcccctgccccaccgctcccggggttgccggtgacctggcagctgagccgagggccgctgggctggagggtggagtgctgcttccaggtagtcagactgagatagacgcggccgcggaggcagcggaggaggaagggggcagccttgtccccgctgtgcgcagcccgcccgccaggcacagccggtcttcggggaagtcgccgagttggagttccaggaaacgataacgcttgttgaaacctctttcttgtggcctggtctcgtcacatggcttgatggggaccaacgtcaggcagggccacaggcctgagcccgctcgcacccggcagccgctgccacccccagttccccccatgaagagggaggagggggttgggcaggaaggtgggcatttgctgcttccccatcccaggcacctggcgggccacaagcagactggtccccgctggctgttttcaccccagtaacactccttgtaggctggctaagctggccaggcctcaaatgccccctccagcaaaacgggctgagaatgcctaggctacaggcttgctgccaaagtgaagacagagcttcctcctgcccctggaacatagcagatgctgaggatctagaaattattttttttctcttttcttttctcttctttttttgatagagacaaggtcttgatatgttgcccaggctggtctcagactcctgggttcaaggcatcctcccacctcatcctcccaaagtgctgggattacaggtgcgagccact

SEQ ID NO: 28032 - DNA, 1615 bp, Artificial sequence
  DNA replication origin
gtctgggtgcggtggctcatgcctgtaacctcagcactttggaaggacaaggtgggagaatcactgaggctgggatttcgagaccagcctgggcaacatagcaggaccaccgtctgcagtaaaaaaataaaaaatagccaggtgtggtgttgcacgcctgtagtcccagctacttgggacgctgaggtaggaggattgcctgagcccaggattttgaggctgcagtgagctgtgattgtgtccttgcattcagcctgggcgacagtgagactgtttttcgcttgtttttttgttttgaggcggagtcttgctctgtcacccaggctggagtgcagcagtgcgatctcggctcactgcaacctccgtctcccaggtttaagcgagtctcctgcctcagcatccctagtcgctgggactacaggtccatgccaccacgcccggctaatttttgtatttttagtagagacggggtttcaccatgttggccaggctggtgacgaactcctggtctcaagtgatctgcccacctcggcctcccaaagtgctgggattacaggcgtgagccaccgcgcctagtcaatgagacggtgtttcaaacaacaacaacaaacaaacaaacagcagcaatgaaagaatcaagcagagagggctgattccaatgactgggcacacatcacgtattaagcacttttcaggcatcctctgattgaacttcacccatgaggtgggtagttcttaacctcatttccaggtaggaaaagaggttcaagacctaaggtctatgtgaggttgggtaggcagggattgctgtggaccggaatggggtgggagaacacgttggtctccgacgactacagggcgtgggagagggctcgctattgtggccttgacctggcatgcccttgggacatgccctccccgggcctggggtcttccaagagccctgagatcccggcaggcaggacgtaccacgagaactgggaaccacgtgaaggccagaagggctgcggagcccgcagtgctgccgagaggccgagaggaagccgagggaagccgagtgtggccgagccgagccaagtcaagccgagcgtggccgagccacgccgagtgggcctggggcagcggttggtggggagagcggcgcaatgacgtcactggcgcggcgcgtggtggcctctcgagagtgcaggcgccgtggggcgtcagctggacaaaagccgacccgacttcatttgtctgcctcgaccccgaccccggctggtagacagcactcctgatgcacgggacgagggagcggcacgagcaaaggccctgaaacaggagggagcgcggtgagtgccttgcccagatccctgggccgtcgtgggacttgggccttctgtgcgctgcggggagccgtgcagggctgcggcgtgggatgctggactcgccctgggtgtcgggggaaggagatgggggaggttgtactggggccatacagtcattgtagaacctgttccccccgagggccgtctgtcgggtcccagagccaggaccacggttgggacaatttgagcgcccacctgagcaccgttgtccctgtgcgaatgtgctttggtgaaaactgtgcctcctt

SEQ ID NO: 28033 - DNA, 1042 bp, Artificial sequence
  DNA replication origin
gcattatccttttcctcctctttttctttttctttctttcttttttttttttttttttaagagatagggtctcactctgttacccaggctggagtggagtggtgtgatcacagctcctgtagccttgacctgctggactcaagcgatcctcccacctgagcctcctgagtagctgggactacaggcatgcaccaccatgtctggctaatttatttttgccaagatggggtctccctatgttgtctaggccagtctccaactcctgggctcaagtgatcctctcacctcagcctcccaagatgctgggactataggtgtgagccactgcgcccagccaggcattaatctaagccgaaaggatacaggaatgaacaaaatagaggggtctgaaccctgcttacagagtttacattcagggccttggacagtaaataaccaaacatgaaataaaggaaaaggaacattccaagtacatagtgacagtggtcagatgaaaactcgacagggtggttggacagtggatggggctcttttagaaaggtcaggaggtgacactgaaattattgtgcctggaatgacagaaaggcaccagcccggcaaagccaggagatgagatgagcagtccaggcagagggaagagcgagtgcaaaggcgctcagtcaggaaggagttcggcccgttcaagaaggctggcagagtgggaggggtgaagaagcgggagggatgggcaggggcccgggcacgtggggtcctgtagaccttggtggaaagtgtggatttcaagattgatggggaacgtggaggtaacctgatctggcctggctgctggatggagatgatctaagcagagggcctggtgaaatgggcttcggcttcctgcctcatggtgtatatttacaagggagcggttcattctcggccaggccctttggctccagccaatcagaccaacggcaagggaaggccacaggacctgcctggtggatgctgggccatggtgggtgtggccagttccacctggatgccagctttgtacctctca

SEQ ID NO: 28034 - DNA, 889 bp, Artificial sequence
  DNA replication origin
cgtgtgtgtggtgggaaggcagtctttgaagggcagatgcctgacggagcagtaggagggggaaatctatgaggaaggggtcgggggagaggagggctaggaaaccaggtttggggattcatcacgtctgagaatgcaccattttttcactgggctccaatttgatgtcgtccagctgcacctctccccaaaatgaagacggggaaggcgagatccaggtccagagctcccaatctgcaagccattgcaaatcccagcccctccccagcctcagtttcttccgcagccgggtagtgggagcgcagggagggcagtcgaggccaccagggaccttgcccggccccgcccagtttccgaggaactgggccggggtggaggcgcccgcgccgccaggggttcctctgaagcctgtggtcaggccgccgcttcccgggaagcccgagccaagaccagagaccgcggccggccggggcttcgggacagcagggcgggcgactgagggcgtcgacggcgggtggagcaggggctaggagggggtctacgggtggggtcaggctcagggttggggacaccttctgtggcctcctagggggatctggctgcaggggaggagaggacagggctctgcccccggcgggtgtggagacagctggggcggaggagggtgtgtcagggcgcgtcccaagagggcctggcggcagaaagtggaacccgaggtagcggggcaaaatcggggtcgccaagtccgaaggaggggtccgagaagtggccggaaggcgcagggtcggggccagagcccctcgagaggcgggtgctggggcaggtgcgaacaggcgggcagagggccccgcgggagggtccagaagagagggaaacagggccgaagcgg

SEQ ID NO: 28035 - DNA, 1441 bp, Artificial sequence
  DNA replication origin
aacacactgccacacccacaggcaccctcagatgaacaacaaacatctaccgactgcttattagacactacgggctgttttaagcacctgacccataatcactcatttaattcccatacaaccccgggatggaggtactatttatttatttttttttgagacagggtcttagtctgttgccccggctggagtgcagtgacacaatcgtggctcactgcagccttgacctcctgggctcaggcaatcctcctgcttcagcctcccaagtagctgggactgcaggtgcaatccactacgactggctgatttttgtactatttttttttttttttttttttttttgtagagagggggtctcactttgttgcccaggctgttctcaaactcctgggctcaagcaatcctcctgtcttggccttccaagtgctgggattataggcatgagctactgcgccctgctagaggtactattattatccccatttcacagataaagaaaccatggcagagaggttaattacatgctcaaggtcacaagaatagaaaggtgcagatttggaactgggtctccttgtattccatcaccctccacagagtgtggcctccagcagatgttcagtggacatctctcgaatgatcacacacctgacctctggtgcaggcaaggttctgcatcttctctcaccccctcacgcacgcgcacgcacacacacgcacaacctaggaggctacaccaatgaccaccaccagccctggccacatgcagattcagggcactgatggggtgctaagctgggctgattctgggccactccctgtgttcaggaggttaataaggacctaggctctgcctggggaaagaggtatcgtggggccagggaggcgggaagggactgggcaccagggcttccaggagagaagccgtctgagagctgtctgtagagggcagtgtgtcccagtgtgaggccagtaaccaagtgcccagcctagccaggtttttatgtggccccttgtgatgctggggctcctcacatgccttcattcaaaaatacacggagcagccaggcacctactccatggcctcgcacgacaatcggaatcactaaatcacaaacacgtgtgcaaattacagccccgaccaccgaccgcccaccatcccaagccccggccgtgtgtgtggtgggaaggcagtctttgaagggcagatgcctgacggagcagtaggagggggaaatctatgaggaaggggtcgggggagaggagggctaggaaaccaggtttggggattcatcacgtctgagaatgcaccattttttcactgggctccaatttgatgtcgtccagctgcacctctccccaaaatgaagacggggaaggcgagatccaggtccagagctcccaatctgcaagccattgcaaatcccagcccctccccagcctc

SEQ ID NO: 28036 - DNA, 1200 bp, Artificial sequence
  DNA replication origin
tagaccctgtccccccaaccaaaacaaaaaacaacaacaaaaaaccccacctcacccctgatacctttccagtcattcatttatttattgaatgccctctatgctgggcactgttttcaacaccatgaacaaaacaaagatccccgccctcgtggagttatgttctagtgcaggagatgagcaaaacaataagaatgatagatggataaacgatactttatattgaaaggaacacagaaaaagtagggcacagtgagaacccttgggcctgatggaggtaactgggacaagtggcaattcagggtgctcagggcaggccttgttgagaaggtgacatttaagcagattttgaaggcagtgagggagttagtcatgaggacatcagggaagagtgctccaggcaaggggaacatgatggggtggggacaaggggggaacaaggggaaccctggggtggggatgcacagcccttctgctgtgcccagggaacagcaaggccagcatggctggagcagagagaggtgggggttggtaggagatgaagtcacagaggtgggaggggggcaccacattataggtggccttgtcagcctccctgaggattcgacttttacaccaaatgaaatggggatcgtaagagtgacactctttgtcttaaggacccctgtgctcctgtgctgagaagaatgtaggggcagatgtggaggcagggaggctgttgctgtcacacaggcccaaggctgtggaggctcacaccagggtggtagaggaggatggtgaggagtggtcggaatctggttgtgtgttaaagatggggccagcaggactcaccagcagcctggatgaggggagcgatagggacagaagagttaaggctggtttcgagactttgggctcaagcatctcaaaggatagcattgccaccaactctaatgtatggagaaggcttgggaggagggtccagaattcagacatctcagtagaggtgtccagtaagtaggcagctgagtatctgagtgtgacatttagcctggaagtgatatatttgggcattgtcagtgtttacaatcaggagactggccaggatcactgatttagtttttgctgctgctgtaacaaagtaccataaactttgtaacttaaaacagcacgagttcattatggtttttcgcccccaactctgtcacccaggctggaatg

SEQ ID NO: 28037 - DNA, 1506 bp, Artificial sequence
  DNA replication origin
tagggatactggccatcgagtttttagatttcaccaagactgaatctcatcatctccagccccaccatggccatgacactcctgggaggcctggctgcttcagctccctagagtggcccttagaaggtgtggacaggtgtggggacaggaagggagcagacccaggagcccaggtctgtggagtcaggcagacccaggttcgaattcagcttagtgcttttttgcatttccctagtgactaatgatattgagcatcttttcatgtgttcactggcttttgtatatggtgttagtccacttttgttgctataaaggaatacctgaggctaagtaactcataaagaaaagaggttcgggcgcagtggctcacacgtataaccccagcactttgggaggccaaggtgggtagatcacttgaggtcaggagttcaagaccaacctggccaacatggtaaaacctcgtctctactaaaaatacaaaaattagctgggtatggtggtgcgtgcctgtagtcccagcaactccggaggctgaggcagtcaagacagtgcactacagcctgggtgacagagcgagactccctctcagaaagaaagaaaagaaaagagggctgggcgcggtggctcatgcctgtaatcccagcacttcgggaggctaaggtgggaagattacttgagcttaggaattcgagaccagcctgggcaacacagcgagaccttgtctctattataaataaaaacaaaaagttagctaccaaaaatgaggtggcgtgcacctgtagtcccagctacttgggcagctaaggtgggaggatcacttgagtctgggagactgaggctgcagtgagctatgatcacaccattgcactctagcatgggtgacagagtgagaccctgtctcgaaaaataaaaaaaaaaagaaaagaggtttatttggctcacagttctgcaggctgtacaagcatggcaccagtatctgttcggattctggtgaggcctcaggaagcttttactcttggtagaaggcagagcgggagcaggcatgtcatgtggtgagagagaagggaggaggtgctgggttcttttaaacaactagacctcagatgaactcatagagtgagacctcattgctgcaaggacagcaccaagctgttcatgagagatccgcccccataacccagacacctcccactaggcccaacctccaacactggaatgatgtcacatttcaacatgagatttggaggaaaaaaaacatccgaaccataccatataccttctttggagaaatgtctgtttaggtcctttgcttatttttatttttatttttttattttttattttttatttttttattttttttccaaggcagaagaatttttcttagtacagaacaaaatgaaaagtctcccatgtctacctctttctacacagacacggcaaccatccgatttctcaatcttttccccacctttcccccctttctattccacaaaactgccattg

SEQ ID NO: 28038 - DNA, 1371 bp, Artificial sequence
  DNA replication origin
ctacacagacacggcaaccatccgatttctcaatcttttccccacctttcccccctttctattccacaaaactgccattgtcatcatggcccgttctcaatgagctgttgggtacacctcccagacggggtggtggccgggcagaggggctcctcacttcccagtaggggcggccgggcagaggcgcccctcacctcccggacggggcagctggccgggcggggggctgaccccccacctccctcccggacggggcggctggccgggcgggggggctgaccccccacacctccctcccggacggggcggctggccgggcggggggctgacccccccacctccctcccggacggggcggctggccgggcggggggctgacccccccacctccctcccggacggggcggctggccgggcggggggctgacccccccacctccctcccggacggggcggctggccgggcggggggctgacccccccacctccctcccggtcggggcggccggccaggcagaggggctcctcacttcccagtaggggcggccgggcagagacactcctcacatcccggatggggcgacagggcagaggtgctccctgcatctcagacgatgggcggccgggcagagacgctcctcacttcctagatgggatggcggccgggaagaggggctcctctcttcctagataggatggcggctgggcagagacgctcctcactttccagactgggcagccaggcagaggggctcctcacatcccagacgatgggcggccaggcagagacgctcctcacttcccagacggggtggcggccgggcagaggctgcaatctcggcactttgggaggccaaggcaggctgctgggaggtggatgttgtagcgagccgagatcacgccactgcactccagcctgggcaccattgagcactgagtggaggagactccgtctgcaatcccggcacctcgggaggccgaggctggcggatcactcgcggttaggagctggagaccagcccggccaacacggcgaaaacccgtctccacccaaaaaatacgaaaaccagtcaggcgtggcggcgtgaggctgcaatcgcaggcactcagcaggctgaggcaggagaatcaggcagggaggttgcagtgagcagagatggcagcagtacagtccagcttcggctcggcatcagagggagaccgtggaaagagggaagaggggaggggcagagggagagggagagggagagggctgctcatttttaaattgggtttttttgttgttgttgagttgcaagtgttctttatatattctagatactagaccctcatcagatatatgactagcaaatattttttcccattctgtga

SEQ ID NO: 28039 - DNA, 907 bp, Artificial sequence
  DNA replication origin
caggagccccgagcccttggggtccagctgtgcccagaaaccagggcagacaaccccattgtgaggcccacacctgctgctggcaccgagaaccttgtgtctacttcattcctgcgaggccccagcctcttcctctgtcctcacagtccaggattgcagcagttggctcccaggtgcaagcccggctggaagagaaggttcaaggcttgggtgcctctgtgagaaggttccagcaattggtgggtatcacagcaggggagggtgggggctcaggttggagaggtccccctctgacctggcttgtagcccccactcaccaggcaggagggtctggggctctctctgccctggacctcaccctgattctgcctcggtttccctgtccaggtgcagccggcaggcaccctggacggcgtggcaggcctccttctgcagctgtcccaggcggggcgggaggccatgcaggcgagtggttgggcagtagccactttgtgggcccggagccaggcactgacccagcacctgcctctttacctggagtggctgcaggtggggctggagcagctgcgggaggagctggaatgtaagtgtgggagggggagggctcaatcctgtgcggaaatcaatgtcccccctctccaccggggccctaagcgctcacattggcctgtggcactgtttcaatcagaaatgtggcctcgcttcccatgggcctgtagcccagctgtgtttagccccctgccttatttgttatagatctacagcctttgttttttctgggtctgctgtgtcatttttacagagtctccaagctcatctcccttatgcctgctgcctaggttttttcagtctcccgcctgctttcttttgagtatacagccttgtttctgtgaagctcactgccaca

SEQ ID NO: 28040 - DNA, 1004 bp, Artificial sequence
  DNA replication origin
gtgcaggcaaaagacgctctccagaattcaagccaaggaatgaattaaaaaatcagaaggtgtgatatgataagcactgtaaagtagtaaagaggggccggacgtggtggctcatgcctgtaatcccagcactgagggaggccgaggccagtggatcacttgaggccaagaatttgagaccagcctggccaacatggcgaaatcctgtctctactaaaaatataaaaattagctgggtgtggtggtgtgtgcctgcaatcccaactgcttgggaggctgaggcgggaggatcgtttgagccctggaggtggaggttgcagtgagccaagatcacgccactgcactccagcctggtaacagagtgagacagtctcagaagaaaaaaagaaaaaaaaaagatgtgagactgagcgtgactgggtgggtgggtggggcagcaactgtaaggtgggtggtcagtgagagcctcatgggggaggcggccccgggatgggaaggagccgggcttgagagaagctggaggagcagcactgcaggcaacaggaaaagcccgtgcaaaggccctgtggtgggaatgagccgggtgctttggggagggctggaagggaaataagatgggaacagagtgactgggagggatgggtgacagggagatgaggtcagatgggcagggacagatcatgctggccctggaggccccagtgaggagcacggttgctttctgtctttggaaatgctgagtctgggtgttggggatgaggctttttttttttttcatttaaatgctttcagtctccagcctgggaatggctctgagctcttccagagatgggggtaggcagggcagtctctccaccctccatcctagttcctctagggatatctgggggaggggcaccagcttctccatcctccctagcctctcatttcccaacagagatggctgtggggacaccgttaacctctcctctcccctacatgtccccctttccccaccactgccc

SEQ ID NO: 28041 - DNA, 879 bp, Artificial sequence
  DNA replication origin
agatgaatgaatgatggctggatagatgatgggagggtgggtggatagatgatgggtgggtggatgaatggatgatggatgggtggatgggtgggtgggtggttagatgaatggatgatgggtgggtgggtggtgggtgggttggatgaatggatgatgggtgggtaggtggatgggtggatgaatggatgatgggtgggtggtaggatgaatagatgatgggtgggtggatgaatggataatgggtgggtgggtggatggatgaatggataatgggtgggtgggtgggtggttggatgaatggatgatgggcgggcgggtgggtggttggatgaacggatgatgggcgggtgggtggatgaatggatgatgggtgggggggtggggggctggatgaatgaatcatgggtgggtggtaggatgaatggatgatgggtgggtggatcaatggataatgggtgggtgggtgggtggatggacgagatgaatgagagggatgtgcgtggatggacggatggacagatgagcaggtcagtggatagatggaaggagggagggagggatggagtgatggaggcatgtaggtgaattgatagatgtatggacatatctatgggcaggtgggtgactagatattaggggaggagattgaacaatggaggcaagggatggatggacagacaggtaagtgactgggatattttttggcccaagtctaggagaggccctgcagaggctatagcaaggctcccctctaacctccagaaggttgaaggcacggcccatggtgtggatggtcaggttgactgtggcagaacggggaagaaaggaggcaggagagaagagaagggtcccctccaggttggctcccaggctgcc

SEQ ID NO: 28042 - DNA, 1075 bp, Artificial sequence
  DNA replication origin
gggcggggcagtggcgtggggggcggggcagtggcgtggggggcggggcagtggcgtggggggcggggcagtggcgtggggggcggggcagtggcgtggggggcggggcagtggcgtggggggcggggcagtggcgtggggggcggggcagtggcgtggggggcggggcagtggcgtggggggcggggcagtggcgtggggggcggggcagtggcgtgaggggcggggcagtggcgtggggaggggcagtggcgtgggggagggggcagtggcgtggggggaggcagtggcctgggcgggggcagtggcatgggataggcagtggtgtggggggtgggctgtgaagggcatttacccaccttctcggggtaggggccaatttctgtccccagccacgctccagaccccgcgggccagcctggcgccttcctgggcatctcagcccattcccccttccccccttcaccccacccccactcagtggtgttggggggcagtggtgtggggggggcagtggtatagaaggggcagtggcgtgggggggcaggcaggagggtgaggagacgggttgaagtggggaagggggaatgagggataggaggaaggggcaaaggggggaacccacccccaccctctccacctggagcttgcctgattcgcttcggccccactgggggcactgaagccggtactcaggacactggatgtcctcaccttgtcatcatccgagggctcctggatggtacagttctcacccaaggcgtctcccaggatcctcactagggagccgactccaggcagctggccgcagggcccgtccagagaagcacagaggttgtgcaccagggctgagatgcccaggaaggcgccagggctggccctcggggtctggagcagtggctggggacagaaatcggcccccacccgaggtggtgggtaaatgcacttcacaggcctcaccctggccacacaccgactcacctgggcaacttcataatacagagctgagtcccccagagtctgaacaaattgctcttttcagggaacattttaaaagcaccccagaggccagaca

SEQ ID NO: 28043 - DNA, 1065 bp, Artificial sequence
  DNA replication origin
tggactccagcctgggtgacaagagcaagactccatctcgagaaaaaaaaaaaaaggacagagctaggcagagattttatttctccacagctgccaagcagtccctgttctggagtgacgtgggtctagcacagaggcccctgttcacagccagggccccagggctggattttagagtgagcccagaatttgcattttgagaagccgtgagtgttggtatcatgcctggcctgggagccagcctctcctgggttaagtctcagttctatctatagctgtgggctacctgaggcacgtcccttaccctttctgtgtctcagcttcctgtgtctcagcttcctgctctgcaaaatgggaatgataagaaaggcaacgtgtgtgacatgttatcagcagtctggcttgtagtgaacacagtttgtttactaagatttgttggtctagactaggcacggtggctcatgcctgtaatcccagcactttgggagaccgaggcgggcagatcacttgaggtcaggggttcaccaccagcctggccaacatggtgaaacccggctttactaaaaatagaaaaatgagccaagggtggtggcacgtgtctgtaatctcagctacgtgggaggctgaggcaggggaatcacatgaacccaggaggtggaggttgcagtgggcctagatagggccactgcactccaggatgaatgagagagcaagactccatcttaaaaaaaaaaaaaaagatttgttggtctgatttctctgaggtgcctggggcagggagcagctgtgtcctgaaccccctcctgtttgccttcctttcactgaagccctggagtgagggtagctgggcgtctgagtcgtgggccacatggagtgccttttttgttttgttttcttttttttttttttttttggagacagagtttcgctctgccacccagggtgcagtgcagtggtacaatctcagctcactgcagcctctgcttcccgggttcaagggattcttgtgccttagcctcccgagtagttgggattacaggcacacaccaccatgctcggctaatt

SEQ ID NO: 28044 - DNA, 1409 bp, Artificial sequence
  DNA replication origin
attcacctggtctgcaaggtcattctacaaaatagtcccattgtccagacggggaaaattgaggcctgggaaagtaaagtaccttgcccaaggtcctgctggtgaggaatggggctgggatctgaaatgaggaagtccagatgggtttgtgctcttagttactgcacatgaatcgaacatatgtacaaataaacgagtgaaaggaggaagggggggaggggggaagggaggaagaggggagggggaagggagaaagggggcaaagagaggaaggggggaagggaggcagaggggaggggggaagggaggcagaggggaggggggagggaggcagaggggaggggggaagggaggcagaggggaggggggaagggaggcagaggggaggggggaagggaggcagaggggaggggggaagggaggcagaggggaggggggaagggaggcagaggggaggggggaagggagggagaggggagagggggaagggaggcagaggggaatgggggaaggggaaggagacagacatttccagggagatgggctaagcccagggcaggtcttgggtggttctggcattcctggtggccagcgtgccacctgctaggctgtgaactgtgggtgatgcctcttgggacccaatctgggcctggctctgagtcagtgcctgattcttgtctgctgagcagagccaacaacacagtctacctggaacagccccacctcaaaccctgcggtcaggggccagaaggcaagggctccctatattccacctggagggacagccagggctggaccagctccaggggctctcagatcctggtagggtccattctaccaatgcaggggtctctgatgcccccagggaccccagctgcctggcaccagctgtgtcttcactcccgctccctaccgatgccatctgacttggcactcactattagccgggacaagatggggagtgacaggtgacacccccttgcccaggaaagtgaggacacaccccaaggtctcaggtcagaattgaggtgaagggcagagcagctgcaatcccttgggcaagctgccctacctctttgggcctcggttttctcacctgcaaaatggggttgatgagagcacctacttcatagagacacctcaagggttaaatgagacctccacatatcgtagaaattattgacctcatctcacacagatttcctaatctccagactcattaaatatgtgtgtttataaatataatagctctgatttcaagtgctcagatttagtgccagacaccaggagaaccacttcacacacagcatttcattcctcactataagaccaggatagaggtaccactgccatcctccttatagagaccagaaaacagtcgggcgtggtggctcacacctgtaatccca

SEQ ID NO: 28045 - DNA, 819 bp, Artificial sequence
  DNA replication origin
agggtgggtggctgggtggatggatggataggagggagagtgggtgaatggatggatgcatggataacagcggggagtgggtgggtggatggatggataggagagggagtgggtgagtgggtagatggataggagggggaatgggtgagtaggtggatggatggataggagagggtagtgggtgggtggatggatggattggggggttggggggtggatggacggatgggggggtgggtggatggataggaggtggaagtgatgcgtggatggatggataggaggggggctgggggtgggtggatggatgggagggggagtgggtgaatggatgcgtaggaggggggttgggggtgggtgtataggaggggtgtggggagtgggcagatagatggataggagaggggagcgggtgggtggatggataggggaattgggggtgggtggataggagtgggggtgggggtggttggatggatgaatggatggataggagcagggagcaggtgggtggatggatgggagtggggatgggtagatggattgatggatgggaggaatggagacctgtatttgttgatggaattggcagagcttgctgacatattggactcaggtagtgatgagggatgtggaagcacgaatgattggcagcttgagctatcagggatgatggtgccagtacccaagatgaacaagagcaaattggacaaagggtagggcaatcacttccagtctttgtggccctccctcccctgaggacattttgcaaagtctggggagagctggcattatcatttctcatcttcttcccagagt

SEQ ID NO: 28046 - DNA, 1166 bp, Artificial sequence
  DNA replication origin
cagcgctggtcccggccgcgtctccggttgggttcagctcctgcgtcccagagtggcccgatcgcgcgtggcggggtcgtccggcccccacccgaacgagcgcccttcgcggcccgccgcgtccccctccccggagaggacggcccctgggctttttagaaaaaggcgcgattctctctagtgactcaggttgagatttccagaaatatcccccgggggttcagaaacaaaaccaaaacaaacaaaaaaaccccaacgaattcccaaatgctatttgccaaacatttgacttctaggggcgcgggtacccgcgtttctctccctgcccccgcgacttcgcgcaagatccgggaaggacacccgaggcccctgggagaccctggggaggtgaaaatcagagagcgaagcgggccgtggcccctaggcctgacccctccccgcggggtaaggcgggcaccccgcgagcgcaggggtcctcttactgctgatggcacccagctctgggcccagacgccgctcaccgtccaccgccggtgctgggtaggtgctggtgggaccagctggtgactggtggcagaagtggatctcgcccctccctgccaagctaggcaaataccctccccgctctggtttgcaggtcactgtggataggtggtcagttggtggtgtgcccgaagctcttcggggtcagggagaggaggtgataggggaaaggtgtatgttctggaagggccagtcatgcttcagggaccaggctagttggaccttcactggttttctacttcccgacagtggagctgatgtcactggctgttggactgagcagtggtcactgggaaatctacagtttgtggaagccacggggtcttccaagctcctaccagtcttcccaaagaggatgcctccctccccttggcctggtgcactggtgctggttcaaagactgtctgaagcccagcttggggtcctctttaggaaagccatgatttgccttaatgtgtgcttggctgcttcatctgccctctcaccccctgccttctcagagtgactctttttaggacttcctatttaggactaacccagatgcctacagagagaagtgcaggctggtatctggaattccaccagtgttttggttttatcagttggagcaggatctagatggc

SEQ ID NO: 28047 - DNA, 1522 bp, Artificial sequence
  DNA replication origin
agggcgctcgttcgggtgggggccggacgaccccgccacgcgcgatcgggccactctgggacgcaggagctgaacccaaccggagacgcggccgggaccagcgctgggaggccggaccccgccccggccgggcccccacgccctccgccgcgcctcgatgcccgcgacccgacccgcgccccctggcatcccaggaggccccagccaagggctcagtgcccggggcccccagcaggtgctggcgccaccggccccccgctgtctcccgctggtccccgcgccccggcgtccccgcgccgcactcaccgccgcccgcgccgcctgtcgagccgggaggtctgagctggcctctcgggcgccccgagaaaagggccgggcggcggggacgggggcgggggctggacccgccggggcggagcgcggccggcttgggcttccggcttctcccgcccccgcggcccgcacctgggccccaggcgagaccaccgccggttccccgcctcactctgatcgcccccaggctccatcccacacccggctcgctcgccaccccagagcttcccaggcttacccccgagacgcctggcgcggacctggtgtctcccccactctcctatcctgcccctgcctctcggtgccagccccacccgtccgcccccgacagcctggccctccctcctgatttgccgctcgcggctctccccactttcccccctccccgcgccgctccaccacttccaggcggcgggaccaccaacctcgaccccggacccgcgctggggcgctcccggccctctggagggcggcccttctcttcctgtaactctacagacgcgtccggacagaccaagacactctctgtgccttcgggcatgttacccatcctctctgagctcggcttcctgtctgcaaaatgggcacaatagcggtcctgtctcctaagaccgactgggagtgaactgggaagatggtaaagtttttagcacaggataggtattaggtaaggcttatcagctgcctgtccgctttgtgcccccagggtggtccgtgccgccaggtaggcctttctcagccatcactgaaagcaagctctggaaatcagtagccccatttcacatccgcccctaaatgggtgccatctgcccgtctgcttggagccccatcggccggctgcagtgataacagcagcagcctggatccagcaggctctctgggaaatcattagagggaattaagaagcatgcctggctttcagagtacacagagtcaggagatgggcagaaccatgatgtggccatccacaaacaaacgccatttggacagggagcttccgagccccatgctggcaaagacctggatcttagaaccctccggtgcccaaatcccatgcctttacccgaggtcctaaagatagtgaggcccagatagggagtgtggcttgtcccgggtccctcagcaaagtgtccccagccccaagttcttgccaccttgcgccatgtccactgacgggccaccctcagcc

SEQ ID NO: 28048 - DNA, 1341 bp, Artificial sequence
  DNA replication origin
tgggaggctgaggcaggaggatcacttgagcctaggattaagtttaagattagcctgggaaacccatctctacaaaaagtaaaaaattacccgggcgtggtggcgcatgcctgtagtcccagctactcgggtgtctgaggcgggagaattgctgtgctcaggaggtagaggctgcagtgagctatgatagcgccactgcactccagcctgggtgactacacaagaccctgtctctacaaagaaaaaagaaagcaaaaaagcatgctgggttttgtcccatttccagcctggctgtggggcctttagctcctcaacccctttctgggcctcagctataaaatgacggggctggagcggggaaaacaggcagagggctctccttcagactgcggagggcagggacttgcctcacctcacacagaactgcttgtttctgttctgtgagttgggctctgtaggacactgttttggaagggaaggttcttaggttctgtggccagaaagtcacagatctgggccatctagaaagctctaagctctccacagcatgggggctgagcatggacgtagagccagacagcttgggttcaaatcctactgctgccatgtgctggctgtgtgacctttgacaacctgcctgacctctctgggcctgtattgctaagtctgtaaagcggagatgataatatttcccttatagggttgctgggagagaggagtctggtggcctatgtgactgtgactgtttgttaggcgactataattctatgactcatgctccacccgcactccactgcccagcctctccccacacccccagtgggttgtggaatggagctcaaagaatgaaattcttctgtgttatgaagacgtgtgtttcctggaggctacaaggaagagaaagtgccagtagatgaccccaaagtcacagggtacttgtttattgtggatttttcctcccctgctcctaaccagaatataaactccaggggagttgggaccgctatcttgttaccccagttctagctcctgaaatggtgcctggttcctaggacacatcacctgagagggtgagaaagctgcctgacaacttcacgaatcagccagacctggtgcaaattttacctgtagtcaccttcttgctctgtgattcgaggcatgttactttacctgtctgggcttcagttgcctaatctgtaaaacagctggattgttgtaaggagaaaatgagatggtggatgtaaaagtgcttttacattccagggcctggcacccagtgggtactcagcttgtgtgcccatcactgtcttcctcctccccaccacctcctcctcctccccc

SEQ ID NO: 28049 - DNA, 1615 bp, Artificial sequence
  DNA replication origin
tccgatcattcattcattcaacatccatgtattcagcacccactgtgtggcaggcactgttctgtagacacagcagtgagtgcaatacacctagtcctgggagagaagaccaaaagttcatcacacaatgtcaaaaatgtacaatttcacaatgggtaggctgggcatggtggctcaagcctataatcccagcactttgggaggccggggcaggaggatcacccaggagtttgagaccagctcaggcaacaacaagagaccctatctctacaaaaaattaaaaaattagccgggcatggtggcatgcacctgtagtctcagctacctgggaggctgaggtaggaggatcgcttgagcccaggttacagtgacctatgattgcaccactgtactccagcctgggcgacagagcaagaccttctctctaaaaaaaagaaaaaaaattgcttcgtcaaatctgcccacattcatagatataggctgagtgggacgatggcttgagcccaggaaggagttggatggaggctgtagtgagctgtgattgcaccactgtactccagcctgagtgacagaccaagaccccgtctcaaaaacaaaacaaaaaaccccaagggagctactcttggctgggcgatcagggagggccctcctgaggaaggggcacttaagctgagatcgggaagatgaagtagaagagttccagctgcagggagccacataggcaaaggcctggcggtgggaaaggcttggtgcactgggcgcagggaagaaagcccagcgaggctgagtggagggagtgagggcctggccacctcagcctcgtgagcccaacccgccatgctcttccagaggcttctgcttgagaatgggaaagaagtttccagcaaataaggcccccgttcccaggaggaggtcccagctcgccctgccccctcctgtcttctcaagtcccctgggccacagaagccttgagggacccaccctcaccccttctgtgggccccagggctggggtgtcctctcgccgatggccttcttggggtggatgagtggagattactccaataactggagcctctgtcttcccaggtagacaggcctggcctcaaaaccctctctccatcaggagcaggctgtgggacttcagctctttggagcctcaggttcctcatctgtaaaatgggaagattctttcttccggagtcatcttaataaaatgtgttgggctgtttatacagggcaggcatttggtgggggccaaaccaccgggtaattatgctaaaaataactatgattataggtggcagaggggtgcaaatgcctcacagcctcatcccgcagaggaatgagagcttcgtcagggccgggaccttgtctggctcgtggctgctcccacgacgactggcgtggcaggcacgtggtcagtgttccgccatcgactgactgggcggatgaatgatacataaatgaattcgcgaacgactgatgcccagcttcctcccgaagcaaggtcattcacctcagcggtcgcgcctctcccctgcccctgccccggattccccgccgctctcagctctcgaggagtatgcagcactcttccgtgcagcgtgcctcag

SEQ ID NO: 28050 - DNA, 816 bp, Artificial sequence
  DNA replication origin
cagctacgctcccgccttcccccggcatttcggggttcttcaaaattctgggagctccggggagggctccggggataggggtccaggtgacgtccggcgcccgtctcgcgggtagggaaactgaggccgggccgcagcgttcggcgcccggttccgtgggcagcggctgcgcggcgtgggcatgcctagctcccctggtccccgtcccacaccccgcctccgtcgggccgattcgagctacctccccagctgccgtcccctctccagctgtcgccccctgggccgagccccctcctccctggagcctcgctttgctcctccgtggagtgggggagacgccggcgccgccgggcagggtggaacgggagggtgcgcggagcgcgcctggcaccgcgcctgccacgccgcccgcgctcagcactcgggagccgccggggcgctgtcacccctaagtccccagcacccagcccaggtcgcccagcccgccccagcgagggccacactggggttcacctgtccgcggcccctcaggcacgcgggagaggaggtagggagaatgtggcattttagagtcagggtcgaaatgcgggattttggatgcaggttgcctgggtttgaatccctgcgcgtctacttttgagctgtgtgaccttgggcaatggacttaacttctctgagccaccaatttctgtatctgccaagagggaacagtaatagctcaactgccctgttgtcttgaggcagaaaggagacatctgcgtgagctgtttatctcagtgtctggcacatataattgccaccaactttctccggcat

SEQ ID NO: 28051 - DNA, 1367 bp, Artificial sequence
  DNA replication origin
ccgcgcctgccacgccgcccgcgctcagcactcgggagccgccggggcgctgtcacccctaagtccccagcacccagcccaggtcgcccagcccgccccagcgagggccacactggggttcacctgtccgcggcccctcaggcacgcgggagaggaggtagggagaatgtggcattttagagtcagggtcgaaatgcgggattttggatgcaggttgcctgggtttgaatccctgcgcgtctacttttgagctgtgtgaccttgggcaatggacttaacttctctgagccaccaatttctgtatctgccaagagggaacagtaatagctcaactgccctgttgtcttgaggcagaaaggagacatctgcgtgagctgtttatctcagtgtctggcacatataattgccaccaactttctccggcatctacaagcaaagttgtttggccaaacaggccaaccctggggcagcctgtgaaaatgaccagcgggtgattcacagggtgggggcatgagcctctggcctggcccgaggaagaccccgactgaccttggggcagtcccggttcagagctctgcgggctcccgcttcctcttttgccactggggaacctaggggattctggagcgagtttcctcttctgaggatgggggtgtcatgggtgggggtggaggatgagataacactggccagagagctgggcacagccccatcagtgtcagtcccactggcatccggccgttcttggtcctggcttctggagggctggggccttgtgtgatgcgtccttgtgtcccactggctgctggaggcccagggcagaacggacgtcccgcctcgtcctggctgtgtccagcagtgccctcttctccctacaaccctgttttcccagtcagaacctggggcaggaaacgtttctggtttgtgacccggggttcgctgaagagtttgttggcacccttggcaggtggctttatggggggaggcagtactgaaagccccgtagggatggctggtcccctgtaagcagggcagccctcctggcgtctgtcaaggagcctcaggaggtggcggctgcaaggcgggggtgttttgctggtggtgagcccggcaatgctcatgatgtgcccggttgagttaggaggaggcagcgtgtccctggggaaggggtgtttgtggcactgggcctgggccaggctctgtgcccttctggccctgggggtgggcttggggatccctcgggctcagtgttctccctttgtccctgctgtagcacacaggaaggtgtggctggtgacatgcaaacctggtgacctcatgtcccttttgttttcacttttcttaccacttctcatcctccccacgac

SEQ ID NO: 28052 - DNA, 1687 bp, Artificial sequence
  DNA replication origin
cccctgtaagcagggcagccctcctggcgtctgtcaaggagcctcaggaggtggcggctgcaaggcgggggtgttttgctggtggtgagcccggcaatgctcatgatgtgcccggttgagttaggaggaggcagcgtgtccctggggaaggggtgtttgtggcactgggcctgggccaggctctgtgcccttctggccctgggggtgggcttggggatccctcgggctcagtgttctccctttgtccctgctgtagcacacaggaaggtgtggctggtgacatgcaaacctggtgacctcatgtcccttttgttttcacttttcttaccacttctcatcctccccacgacctggtagatgaggtcagggactcgtatccgctttgcgcattgagaaactgaggccaagaggagcagcttgcttggctgggcggaagcaggccgcaaaagtgagtgctggtctgggaggatggaggggactccagcctgctctactgcggtctgtgggccccccgggcctagagcacatggagtggcctctggagtgggatcaggctcagacaagccggggtcctgggagggagagcaggacaggaggatacccgtcccctctctggtagctggggcagggactgtccatttgaatggctctgacggggtggggttcacccccggctctgcccccatgctccttgggtcccagttacggatctctgtgggccttggcaaacccggcaggacagtgtcagtaacacctgcaagcttgggctgctggggaggagtggccaagggcggtgcaggcccccgctcacctggcatggctcaggcttgtcttgcagttgttattccttgggacatgtgtgggctctgccgggagacagagtgtgtcctgtgctgcagttgacctcctttggggttgtttgaggatgctggggcagggggttctggagagcctgggccttggatcttgcttttatagtgggtgggtgggatccgagagtcaggacccccttggcagaggatggcaagactgaaggcacatggagcaggagggtgtgtgtttgggggatccagatggccttgggcttcaaatgccaggcagaggggacactccagcctgcccagagatggaaggcccaggctgtgctctgggtcctggcccctctgcacttggaagaccccttggctctgctgggctcccctctgggctcccatcctgccttctggctttttgcttcacctccctgcgtgcgcctcagtttcctcacctgccagatggagatgctagggtgaacaaaggtggctgcagcctttctggatcagatgctggtgggaatgaatgtgagctgctgtcatgatggttgttgggtgggccaggattcccatgtgccagcctgggcatctccccaacccaagctgtggcccgtccctgtcccctgcatcctgtgggctttactggatcagggcgaggggttacccagcttgcaagacacagctttgctcagaggggctagaaaggaagaacagacaggtggggtccagccaggcacaggggcttgtggggacctgctgccctccgcgctttgagtttcccggggctctgcttggccacccccttccctccctgcctgccagcaagcatggagccagctgcccttccatgggctcaggcctgccctaatccactg

SEQ ID NO: 28053 - DNA, 1271 bp, Artificial sequence
  DNA replication origin
tagagaagggcaggtagcaaggagagcaaatgaagtagggcaaggctgtagtggtggggtgtgggaggaggggcgcctgggtccagggtggtctgggagggcagcctgcaagaggcgccttctgagaaagtcccgaataggaaggtgccagccgtggggcggtcagggcagaggtgggagcgtgggctcgcagcggagggtgtggggacgcctggggaggcagggagcttggattctctttggtgctggggaggattctgagtggggagaacgccatcacatttttgcaaagatcgtttctcaggaaacatttgctgagtgaatgaaggaacagatacgcactcgggagggccggaccacaggccaggcgtgactgtggctcagtcactgggctctgtgctcgcggcggggcagaaccccacatctggctctgcccatgcctcctggcctgggttcagggcagcagacggggttttggggtcaccactcctcttagagaatccctttgagctggggccgcctgtgcctcagtttcctcattagtcctggggccagtggttgaactggggcccttgaactcaggtgcctcctggcctgcccacctggctttgccccgcctatcccaggtcctggtgccattgtttgattttctacttcctgtccctgaaccacccccacccccaaacacacacacttccccttccgaattgatactgacttgtcttcctgtccagaaaccccaggggagggcaggcaccccagcaggccctgggaaccagaggtgcaggggagagggaggtgggaggtgggaggcacagggcaggttggtgttcttcttgcagggagagaacacagaggttgggacgagtgtagacaggctcacccagccatggtgggaaggctgtctgtggggtcagaggggtcccctgtccagtctggaggcgtgagagaacagctaagtggggttgtggaaccggatggtggcaggggagaggccagggtggtctgtacatgcaggggacagagcagggccaccgtggagctcatggcccgctggagggagaggtgggcgctaatcaggtggccatgctccagaagccagggttgcatgccaaggccactgctccggagggaaggagcccggccgggttgggaaagcttccctgccagagctggtattaaccgggtcagggtgtctttctccagccgggccatctgcgtggtgggggctgccctgtgcacgataggtgccagcaatatccatggtctcc

SEQ ID NO: 28054 - DNA, 916 bp, Artificial sequence
  DNA replication origin
cgactgggagcatgtaatgtcggaatgcggaggccgcggcggcggcagcagcagcagcgaggacgccgaggacgagggagggggcggcggcggccccgcgggctcagactgcctcagctcgagcccgaccctggccacagcgtcctcggcgggccggctccgtcgcgggctgcgtggcgccttcctcatggcgcgccagcggccggagctgctctgcggggccgtggcgctcggctgcgcgctgctcctcgccctcaagttcacctgcaggtgaggcggcccggaccctggggccccgctagggcgctccccttgctctgccgcctggagcctgcagggccgggtcgcagcggcctcagccggggaagtcgggcctgaccttgcccaggacggctgacccctcccggaacctgcggccacggcttcccaccttctcctcgccccggcccgcccgcggacattatggcgaggcttccgggtggagccctgcgccctatcgtcccgctttagtgccgagggaggcgggtcgggggtgctcctcacctgttggagtcactaggggtggacctgtcacttcggcccgggctgtaggaccctcatttctcaccgatttcattccccttaagcttcaggtgtagtgatccacaaccttgcgagagttccagaccccttttagaattcccgcactcattgatctaacgattatttttattttgagacggagtcacgcattgtgtcccaggcaggagtgcagtggcgcgatctcggctcactgaaacctccgcctcccgggttcaaggggttcttctgcctcagctcctgagtagctcggattacaggcgcgcgccaccacgcctggctaatttttgtatttttagtagagacagagtttcaccacgttggccaggctggtctc

SEQ ID NO: 28055 - DNA, 849 bp, Artificial sequence
  DNA replication origin
ggctcctctcagggtcctctcgggtccgcgggccccggaccccgccgcccctcccccgccccgcccgccgtccgttaacggccgcgcgcgagcacgaggcggcggcgcgcgcggggggggcgggggcgcgggcgcgcgcgtttccttcatgcccggcggcgtccccctacccctacctgtggggacgacgcgccggccggcggcagaaggcaggcggaggcgggcggcggcaggcgggcagcggtggcggcggcggcggcggggcctgggtgctcgctcgcagctctccctcggttagcggcggcggcagcggctcggttgcgcccgcggcggcgccctctagcggcgggaggccgcgcttgccgcccgggagacgccgccattggctgcgccggagctacgggctgggggcggtggcgccacgtctgactgggggcagggacctgggcgcgccgttcaatccggagccccggcgtcgacgcgcggcccactgggtgagccaatgggaaggccacgttgcgcactggacgcgctcggactcaagactgattaaccagcaccggggttttctggggcctcgcctgggccgcggcctgagcagaagcgctaggaggtagaacagcgtccagcggggagaggagctagagtcggcatcgggaagcccaccctggagcctgcttagcttgacgagccctcaaccggggcgccctgctctgcgaagagtaaccctgcatcctcagaacaaccgtgattgtcttcattcctacatatgaggaacggaggcgcggagccccacggcagccggggatccaaagacagcctccctccagttccatctgccggctcttg

SEQ ID NO: 28056 - DNA, 1278 bp, Artificial sequence
  DNA replication origin
ccactgggtgagccaatgggaaggccacgttgcgcactggacgcgctcggactcaagactgattaaccagcaccggggttttctggggcctcgcctgggccgcggcctgagcagaagcgctaggaggtagaacagcgtccagcggggagaggagctagagtcggcatcgggaagcccaccctggagcctgcttagcttgacgagccctcaaccggggcgccctgctctgcgaagagtaaccctgcatcctcagaacaaccgtgattgtcttcattcctacatatgaggaacggaggcgcggagccccacggcagccggggatccaaagacagcctccctccagttccatctgccggctcttggaaggcctggatccctgtccttcagggcccagcccaaatgccgcctcgtccatctgcattttacggccaggtgccccgctgcgggcacggcttcttgtaaaatgctcagctcagcagtgggcgaggcagggtccctgccccatgggatggagggcggagatcaggacccacaagagcccaaagaagaccattttggtcggtgaagaccaaagaaattcaagcaggaggatgtgacaggagcttttgggaaagcctctgaggaggtgacagccatgcaaccgtgttcggggaagtgtgccgcaggcagaggggaaatgagtgcaaaagccctgaagctggagttcggtgtctggataacaggaaaggcctgcatagctgatgtgtgccagaggggagaaagatctgtgacacaggggggccgccatgtttaatttggagttttgtgtggaagggggtcattcattgagtctgaattgggagttccgaggtctcatttatattttagaaagttctctcctgctactatgcagagattgggctgtaggagagacaagaggggaagtggggactctagctacagtagctcttccaggggtctgggtgacgtagatttacaaaccagagtattagctcaggctgccatgacaaaataccccagaccaggcagcttagacaacaggaatttattttctcacagttttagaggctgcaaatctaaggtctgggtgccggcagggctggtttctggtgaggcctctctccctggcttgcaaacagctgccttctcactgtgtcctcctatgaccttttctctgtgagcaggaatccctggtgtgtcttcctttttcttacaagaacaacaattttactagattagggccccaccctatgacttcatttaaccccagtgactacc

SEQ ID NO: 28057 - DNA, 880 bp, Artificial sequence
  DNA replication origin
gggcgccccacccaggcagacggcgccactgtcagcgccccacgtgccgaccgggccccagggccgcgcgcccccggaccgcacccctacgccatgtgggctccggcgcccggccggacttcctcccgcgtcccgggcctttacccgcacggcctcccgcgccgctgccggctccgtggttattggcggcgccgccaactgggggtggcggcgctgccgggccccgcaggaaggacggcacgaactcggcggcgtggacgttgggcacgaagggcttggcgttgacgttgagttgccggctgaaggccgcgctgaggttctcccgctgggcctcggccgccgccgccagggagccgccgccgccgcaagggcccggcccgggggcttccatgtccgcctggtcccagcagtcaggcgccgagtcgctgctgctgctgccgctgctgctcccgccgccgccgccgccgccgccgccgccgccactgcccggatccatgatcgggggggccgtgtgtgtggtggacagagagcgggaaatggaggcaggggcgcccggccggagaggagtgggcaacgctgactgagggaaggcggcggggcagaagggccgggagctagcgacaaagatccccggcgtcgccgcggcagcagctccagtcccgactccacactcgcgacgacgacagaggcggcggcggcggcagctcaaccctcctcctcgtgtgtgtgagcggatctcctcccacccaaccacctccgacggcctcacagccaaccccacccccggcgcggattgacccctcgccgccacccgtaccttcgcctcggtagttctctgttctggccgcccccgtttccggctatttagcgcggcgggagg

SEQ ID NO: 28058 - DNA, 1333 bp, Artificial sequence
  DNA replication origin
gccggagaggagtgggcaacgctgactgagggaaggcggcggggcagaagggccgggagctagcgacaaagatccccggcgtcgccgcggcagcagctccagtcccgactccacactcgcgacgacgacagaggcggcggcggcggcagctcaaccctcctcctcgtgtgtgtgagcggatctcctcccacccaaccacctccgacggcctcacagccaaccccacccccggcgcggattgacccctcgccgccacccgtaccttcgcctcggtagttctctgttctggccgcccccgtttccggctatttagcgcggcgggaggtggaactacaagttccggcagcgcccgcgctaccccgctgcggttttcccgggggccgacgggagtcgaagttcagggacagggcgcaaccggaagcggctccggctcccggcaggcaacgcgaggaggcggaggtctggtggccgctcggcggccccacctgtcacctggtgggggggcagcggcaggccctggttggtgcagctctgtgctgggccgaagaccgagagtattttagcccataggaggggtccactctggcctgctggacacaggctgggggaaaacggacagcatctataacatggggaagaaaaatacactcagctcccgaaaattcttgtactctcttttcaccacctttcctgcgttctctgcctcacagtctccgtaccttattctctctccaccttctttctcctcacccccagccagattttgcccttcatttcaaagccggtgcagattgcaaagctgatttcattttatgtaatcatttcgtggaagaaacaataaaaccgtgagatattccggcttaaaactgcagtgtggctcataaagcgctggggcccaggctctgcccaggcagaagggattgttaactggaaaatttcaatgactcaccgtttgtttgactagtcatataaagccttcacccaaatttttccatcctttcctcctccccgccaaagggtttgcaaattaaacagaggattgccgtattccatggtgtatccggcttacctaacagggttattttggtgagtctagcttccttatgcaccattacgtgaagtggtttccttttgaatggtctgatttgctcaagaattcccatagtacttttcatcgactgcatcttacacttacagattaggtaaacctgggaaaagaacaaaagcaaacgagaaatacttaagagttcgcatttaggcccttcatgaagtaggaaaaaatgttgctctgagtacctgttaagctttcctgtaattcacccatgtggagccc

SEQ ID NO: 28059 - DNA, 1146 bp, Artificial sequence
  DNA replication origin
tccagtaactgggataacaggtacgcaccaccaggcccgactaatcttttttggaattttttgtagagatggggtttcgctatgatgccctggctagtcttcaactcctggactcaagtgatctgcccacctcggccccctaaagtgctgggattacaggcctgagctgtgtaatttcatgccgcgtgacacagcccagtaaaaaggaagaaaccccgcgggtccagcgtctactcacacaggtggactgatggctgataaattccagcaggagccaaaagaggagccaaaagagcatccacagcacccgcatgtcctggtcctttcagggcgccctgaggcggccaggacagaggtggaggtggcttagggcagggggagggaaggggacagggaccgggccggatctgagttggggagggggaggggagggggaggggaaggggagaggaaggggggaagtaagggaagggaaaggaggagaagggggctgttgggcacctggaggaggtggaggaggaggaggagaagaagaaaggggtctgggaaaggatccggttcaaattaagttctcaagcgctggtggaaggtttagctacaggtcacggagaagatcagggaagcaacaggacacgcggggcaagggagcgtgaggcttaggggcaattagagggagacaaaggttctgctatccaccaaaccttcttcggtctgggccctcccttaccaaccctggggctttatactccctctccaccaatccctgatgaccccggtggtgcctcacaatggacgtgcctcacaatggacatgccaagtagcgcccgcatcattccaatgacccctcccccatctcagtctcccactctcctcccaaggacaggtcctctctggaaccttcacaaacctgatttctggtcctccccaaccagctccctgtccctgcttctgggcgctccttccttcctgagctcccagggttcctcaaggtcacttttggcgacaaaacataaaaaacaaatgatggcaggatggcaggaagaacctcatacccaagcagagtgccaggttttacagcctccgctcagccattcatatcctaagcaacaaaacatcagcaggatgcggaaggtcccgatagtaaac

SEQ ID NO: 28060 - DNA, 1677 bp, Artificial sequence
  DNA replication origin
ctaggcaaggggatcgcaggactggaacaactggggacaggggtttaggagctggtttttatggatggacaggagtcaggagaccaggagtgccccgccacgggagatcagagacccgcaggtgagcaggggccacgagccgggagtcctgggggccaggggtctggaaaagggagcgactgggagggggtctgcgagggagcggggcgcgaggacgcaggggccggagtgtgcagctggagcggcgggagccggggcggccggggcaggtgacagcggcggggccgccactcaccgctcatggtgcctctccccgggccggtgcctgcgccgcgccgccgccgctgccgcttctgcggctgccgagctccagacaggccgggagacaggagccccgccccggccgccccgccccggaagtagagcctggccgccgacgaggccccgcccgccgacccggaacgtaaaccgcggcgcagatccaagtcgccggacccggtgtggagagcggtgctgaggctacgcgggctggagactcagggtaaacccgagaccccgcgaggaggcgtcgctgtccccaagtgcccaagacgcctcccctgccttcctgaggttcccacgagtgatggggcgacttcgtcccagagagggatgcgagcgggaaaggaaataaaaatagaggaacgggacaaagcgtgggcacaggcggatgggcaatcccggagggcctctctaaggaggcgacttctgagcccagacctggatgatgagaggaacccagtccgggaagatccccagggaaagtgttccataaggaggggcaattgcaaggcccctgcctggaggggttgacaggagcgaggggatgagtgagaaaataggcctggtgcggtggctcacgcctgtaatcccaacactttgggaggccgaggcgagcggatcacctgaggtcaggagttcgagagggtgagtgagaaaaggagattgaggaggtggagggagggccttgcaggccagaggaaggagtttgggcttttctgcctaattctaggaaggtcccagcacttgggagggcggaggcaggcggatcgcttgaggccagcagttcaagagcagcctgggcaacgtagcgagacgccgttctctaccaaagaaaaaaaggactcaagcagaggagtgatacgatctgaattaggttttaagatatggctcctaggccggacgcggtgactcatgcctgtaatcccaaggcatgattgggaggccaaggtgggtgaatcacctgaggtcagaagttcgattccagcctggccaacatagtgaaaccccatctctactaaaaatacaaaaattagccaggcatggtggcgtgcgcctgtagtcccagctactggggaggctgaaacaggagaattgcttgaacccgggaggcagaggtttcagtgagccgagatcccaccactgcactccagcctgggtgacagagtgagactccctctcaacaacaacaacaacaaaaatggctcttcctgggatgagaatgaattataatgggggcagggtggagaaagagcaggtggttaaggagttattgcagttgtccaggcaagacatggtgcctgtctacagtggtggcagtggagatagaaaaggtgatggattggccgggcgcggtgg

SEQ ID NO: 28061 - DNA, 1523 bp, Artificial sequence
  DNA replication origin
caagcctaggagataggtactactaggtatcctcattttgctgggactcccagaatggtcgagaacttactcttaaataacacaggtttatgtggcagggccaagatttgaacccaggatgtctggcctcagggcctgcacttacaccaacctacctcagctcctgggggaagccagctcataacatctttactgaggtattactaacattcacgaatcagaaaccatacttaggcttaaaatcatttgatttgcaaccaaaggtggattatctcccaggaaactccccctcaccagccccctcattattaggactgtccatttcacaaatcttgcccttgaataacaaaaacaaaaggcacatcacttgtttaaacaaccaaccaacaaaaaaggtccacagagataactttaaaagttaaaattgaagacagcagtatcccttggccttgccccccgctcaacctccagaaatgcctgagtggaagacaacggccaggacggctggatgcagggatcctcagaaacaattccacagtgaggggaaaacaggcactaggaggataggcggggcttcctaaataaatccagatcccagagtggctggacagtcaggggagagctgagaggcttccctgagtcactcccatctccacatacaacacccaggaatgacttagcaccaaaacaccaataagactcctcagaggaaaggagggtagagtcaagggactaaacttcagaaaacattgaggacgagctgcccacacccacctccctctcacttccagcatccccatcaacaccaccccctcgatggtgagaggaagaagtttggactgggaagaagaaggacgaagtgacggtccccagatgggctgggcacgggacaagaagggaagggctgcaggacaaggcaagagagatcttaaatgataatgatgagccaggataagacatggacaaggatggaatatgcaaggatcatcgaaatgtaaaagccaggaccggagagggaagccgagtgggtaactgggaagaactggtgatgggaagagcaaagcactgggaacaggggtgggagggatgagagggatggggaagacaaacgggttgcagaattgagctcctctggggaccagaagctcctgggacacgggggtactggggtcagcaaactaactgtccagaaagactatgcctgtgtggaaactgcagggactggagaccaggggcctgggtagcggggatgactggggatgggggacctggaactggagctgggacgcagcgggtctaggagttaggagagactgagacctgggaggtctcagaactgggggtctggacactaggcaaggggatcgcaggactggaacaactggggacaggggtttaggagctggtttttatggatggacaggagtcaggagaccaggagtgccccgccacgggagatcagagacccgcaggtgagcaggggccacgagccgggagtcctgggggccaggggtctggaaaag

SEQ ID NO: 28062 - DNA, 1363 bp, Artificial sequence
  DNA replication origin
gcctttggaccacggggcagtggacacgacttgtgagccaagaggaggaggtcattttgggggcactgagcagtcttggatccccctggctctgtgatgggatggagggtgggtgccgtgctcttgtgagcttacagcctagtgcgacataagatggggttgtgagggtcaggatctgttggtaggcacagcggggtatcccagtagagttttctagaaggcagttagagatgtgggactgagattcaagacaggtctgggctagaggtgagggcttgagcactgtcgtcttcacggaggtgagaactgtagccaagaccttgccagatgtgccgagggtgacagagggccttggggccatgattcagggccaccttcactcaggaatcagagaaaagatggtggggaggagggccggagattagtgttgggaaggttgagagaggggagcgccaagtaggaggggatggtggggtgggggctgagggaggggttccttgggccattccagttgaccaggtgggaggatgaatgcccgaggtagccaggatctgttatggggtgagttgatgccaccctcactgagcattctcattgagttttacatgcgttaagatgtaacattcgggagtctgaggcaggaggattgcttgaggccaggagtttgagactggtctgggcaacatagtgagaccgtgtctctaaaataaataaataaataaataaataaataaataaataaataaataaataaataagcaggccagtcatgagggtgcatgcctgcagtcctagctactcaggaggctgaggtgggaggctctcttgagtccaggagtttgaggctgcagtgagctataatcgtgccactgctctccagcctgggtgacaggaaaaccctgcctctaaaaaaagcgggaggggaagtggacttgaacttcttgagaatttggagtcagtaaataacttgatggagacagcaaggtagaagaaaaggttaaaacaattttttttttcctggtaagtttccctgaagttcagcccctacagagctgggggttcttggggcaccttgagtaagccaagcaaagatggagggaatggcatggaggatggatgaggaaggcaccgaggcgtgctctctccagcaccatgttccttgtccccgatgcacggctggttccatagtggtcattcactaataagtttctttttctttttctctttttgagacggagtctcactctgtctcccaggctggagtgcagtgacgtaatctcagctcactgcaacctccaccttctgggttcaagcaattcttccacctcagttttccaagtagctgggattacaggcgtgcact

SEQ ID NO: 28063 - DNA, 1390 bp, Artificial sequence
  DNA replication origin
tgatttgtctttgccttctgagcttctcttttctctcatgtggggtgggggcatccatgtcctcctggtctcttggagtgcgttccaccttctccgtctgcttgctctccagggctttcttagccaggtccccggctggagtggatgtttgctatgagcttgggtctgtgcacgcgtccccggctggagtgagtgagtgttgagctcaggtcagttcacacgcccccagctggagtgagtgttcgctgagctccagtctgtgcatgcgcccccggctggagggagtgtttgctgagctcagatctgtgtgcgtgtgcccggctggagtgaatgtttgctctgagcttgggtctgtgcatgcgtccccagctggagtgagtgtttgttgagctcaggtcagtgcacgcgcccccggctggagtgagtatttgctgagctcgggtctgtgtgcgcgcccccggctggagtgagtgtttgttgagctcgggtctgtgcacgtgtccccggctggagtgagtgtgtgctgagctggggtctgcgcatgagtccctggctggagtgagtgtttgctgaggtgggatctgtgcatgagtccccggctggagtgagtggttcctgagctccagtctgtgcacgtgtccccggctggagtgagtgtttgctgagctccggtctgtgcgtgcgtccctggctggagtgagtgtttgctgagctcgggtctgtgtgcgcacccccgggtgaagtgagtgtttgctgagctcgggtctgtgcgcgcgtccccggctggagtaagtgtttgctctgagctccggtctgtgcgtgcgtccctggctggagtgagtgtttgctgagctcgggtctgtgcacgtgtccccggctggagtaagtgtttgctctgagctccggtctgtgcacgtgtcccccgctggagtgagtgttggctgagctcgggtctgtgtgcgcgcccccggctggagtgagtgtttgctgagctcgggtctgtgcacgtgtccccggctggagtaagtgtttgctctgagcttcggtctgtgtgtgcatccctggctggagtgagtgtttgctgagctcgggtctgtgcatgcgtccccggctggagtgagtggttcctgagctcgggtctgcacgtgtccccggctggagtgagtgtttgctgagctcgggtctgtgcgtgcgtccccggctggagtgagtgtttgctgagctcgggtctgtgcgtgcgtccccggctggagtgagtgtttgctgagctcgggtctgtgcacgtgtccccggctggagtaagtgtttgctctgagctccggtctgtgcgtgcatccctggctggagtgagtgtttgctgagctcgggtctgtgcatgcgtccccggctg

SEQ ID NO: 28064 - DNA, 1060 bp, Artificial sequence
  DNA replication origin
gatggatggcgggtggatggatggatggtgtgtgggtggatgggtggatggatggatggtgggtgggtggatggatggtgggtggatggatggatggatggcgggtggatggaattgatggttggtgggtggatgggtggatggtggatggatggatggtgggtgggtggatggatggtgggtggatggatggatggtgggtgggtggatggatggatggtggatgggtggatggatggtgggtgggtggatggatggatggtgggtggatggatggatggtgggtggtaggtggacaggtggatggatgaggggtgggtaggtggataggtggatggatggtgggtgggtggatggatggtgggtggatggatggtgggtggtaggtagctaggtggatggatgaggggtgggtgggtgggtggatggatgaggggtgggtgggtgggtggataagtggagggatgacaggtgaagggatgggtgggtggggggtatgggtgggtggatgataggtgggtggttgggtgttggggggtagatgagaacagtctggacaggtaagtggccttcctcaacctcagattgtctaagcctgtaccctcctgatccagttacatttctgaacccctggaaccgagaccaaggtcattctgatcagcccttaggtcagctaaggactcttcctggggtctcatgtgctggtgcagcttccagataattccattctgcaaggttaagaaattagggcattggcagcagaaagtaagagggaattcttaggagttctgtcttcaaacaccaagaggtcatataccagaatctgcctcctggacaacttgctctgtgacattcaatactgaagcctagcagtaattccaaaaaagtaccttccagaaatattcatatggaaaagttaacacatgcccccaaacacacacaccagtgcctcccatcagcagctaaacaacagtctcatcactgctgggcaggccccactcaccgggatcgatgacttaggaagccaatcaccaaaaccctcaattagagccctgacctg

SEQ ID NO: 28065 - DNA, 932 bp, Artificial sequence
  DNA replication origin
acacctgtaatcccagcactttgggaggccaaggcaggcagatcacctgaggtcaggagttcgaaaccagcctggccaatatggtgaaaccccgtctctactaaaaatacaaaaattagccaggtgtggttgtgggtgcctgtagtctcagctacttggcaggctaaggcaggagaatcgcttaaacctgggaggcggaggttgcagtgagccaagattgcaccactgcgctccagcctgagcaacaaagtgagactccttctcaaaaaagggaagaaagaaagaaaaaaaggaagggagggagggaggaagggaggaagagagggaggaaaggaggaagagagggaggaagggaggaagagaggaagagatggaggaagggaggaagacagggaggaagggaggaaaagagggaggaatggagggagagaaggaggaagggagggagggagggaaggagggagagaagaaggaagggaggaagggagggaggaaggaaggaaggaaggaagtcttacccatagagaggaaatgtcgtgtatgtctgttttgcagttcagtgctaagatagccaagcctgtgaatacgcgcctgtgtgagtgtctaattttaaggtggtaggagcccttttttctctggcagtgaacaagagtggttgtggtaagccccagggatgcatttatcctaaactgactcagaaagtctcaaaacgactgatttgtccacactggagagttcaagtctcacctcttctgtctaggcagaagtaaaaatgccagaccaggatgagtggctgggtacctttggttcagctgagggttagtcttctgcaaaccatgttagccagagaatgcaagcctagattgccaccacttaacagagagcaaaaaggctggcattagaaggagcttcggaaaattgtgtctgcttat

SEQ ID NO: 28066 - DNA, 972 bp, Artificial sequence
  DNA replication origin
cggagaggatggggacagactaaatggctttcactccaagacagactgggtgcagtctggtcaggatcgcccctcccaggcgtgcggggcctccttgcccttcccggctgcgccctccagccctgagcgcaacccgcatggctcaactctctgggcccaagcaaggacccaggcggagctgggaaggacaggtggcaagcccctgagccagggataagcaccctccgggggagaggggctcgggatgaacgaatcaaagaaggtcgggggtaagaggggacagccgaacaaggccgaggctatggcgtgtcctggaaggtctttccttggaagtcccccagcctctcgaacctgccgctttctgtccctcttcgcccccgcagcgttttctgcgctccacaggagggaacaccgcggcgccgcctctgcgctcccggatctggcgcagcgcaaggcctgggcacccagcctcagccaccctcccggacctggagcccgcgcatcggtctctggagctggctggcccctgtccccacggatccccccggaaatcctcaccgggggctgcagagctctgccttgcttcctcagcttccagcctcccgtctcctctgtgtttccaaatctgccctctctctcctagcgaattccagctccccggaggccctctctcatttctcccacctctttctctcctctgcttgaatttgactccagtagccccaaaacaggatttgcaccaaagctgctacaccaaatttagatctccccacgccccggcgttttgttttttaattgcattaactaagtatacactttgcaggctgctaggcgatttgcaaggagataatgtttccacaaccctcctctccacttggctgcagtcaagggcttctcagggcatcttcagagaacgaaaagttgggcgacatgtaaaatggtttactagggtcccctgaattgagaaagggt

SEQ ID NO: 28067 - DNA, 1136 bp, Artificial sequence
  DNA replication origin
cagggagcggcgcggggcgctcggtggtcggcggccactgcgctcggctcagcccgcgttcgcctcagcccgcgttcgcctccagcgcgccgcgcgccgaggggccggccggggaggagcgcgcccggccgggcggggggaggatgagcggggtcaagcgcggggtgcaggtccggccggccactgggtgaggcgggggtggagagcagaggagaatcgggctggcagcgcctagccttggccggcagccccggactggccgcccctagccctctcgcagtatccctctcacctcaccagctcgccaagtgcgctgaagagagcgaagcgacacttgtggaatgaagggagggcaggagggaagggggagggggaggagggcgggcagaggaggcgcgggtgggggggggcgggcgcgagctctagaggggcgggggcgcggggaagaggtgactagagcgggagctagctggggggcgtgcagagctgagccaggcgagcggacggggaggagcgagctcggcagcagccgaggctagaggagccgctcggatttccaggcaggtggaaaaccgcggcaggacctcccgcgccctctctgggtaggaggcgcggctcagccctgtccagagcgcagaggcggctcagctcgtagctttttcaccggtgcgtgtgcaggagcggcggccgaaatctgtgcatcaggggaaggatgactcggagaggatggggacagactaaatggctttcactccaagacagactgggtgcagtctggtcaggatcgcccctcccaggcgtgcggggcctccttgcccttcccggctgcgccctccagccctgagcgcaacccgcatggctcaactctctgggcccaagcaaggacccaggcggagctgggaaggacaggtggcaagcccctgagccagggataagcaccctccgggggagaggggctcgggatgaacgaatcaaagaaggtcgggggtaagaggggacagccgaacaaggccgaggctatggcgtgtcctggaaggtctttccttggaagtcccccagcctctcgaacctgccgctttctgtccctcttcgcccccgcagcgttttctgcgctccacaggagggaacaccgcggc

SEQ ID NO: 28068 - DNA, 1544 bp, Artificial sequence
  DNA replication origin
gggcgcggaagaaggggtggggagagggtagagaaaaatacagcgacttcgttgcccagactctgaaaggggacagttaaagcttatgccccaaccatccagctgttcgcaggccgctagtcactccttccaccccgcccgcccggacctcacgccaacccccagcctctcccgcggccgggggcttagtgctcctagtggctgcgtcctccgcctccaaagttacggagtttgcgaatcgatttagacacttaaaataaaaaaaatttaaaaaaagcaaaaggcaaatagctccattaatcccccaaagccttctcccatctgctggaactagctggtgctggggcttgcataatgaacaaggcaaacccgaaagttgacgaaatcagggtgcttggaagtgagggcgcgcgaggagggggctcgggcccccggagtccacgccagccagggcaaggggctcaatctgcagcgatggccacggccccgggcagggagaagtggtggccagagaaagggatgaggtgggtaaaggggcgggggcagctgaggtcccaaatccagggacggcgaagctctgggaaagcgaggcggccgctccaagcaaggcttttgttctcgccctcccctcactccacctccctcgtctccttttcgcgagtcgtacgagttgcaggcggcactcactctgaccctccctccttcacacacgcgcgctcgggctcacacacgcccccctcccctttcgggctcgcctgcccctgtttaccaaaaagctagcacctggaatccgaggggtgccatggaccctctccccaaacccgaagatttcggggccacgggctcccaggctacgtgtctcaagtccgcctcagtcaccagcgggaggaggcggccagagggtgagggagcagagtcacacacacacacacacacgctcacacacacacgaacacgctcagacccacacctgtgctgagcccagcgccccttctccgtgttccaagccgaagttggcttcccggtgacatcccccagcggagaggctgggatgcggggagcggggaccgtggggagcgccattgcctgggggaaggtggggaggagagagcagggagagcgaagccccgaggggagggcgaaggggaggcagcccacctggacatgtgctccctttggggccggtgcgctttctccagccccagcttggtgaagatgcccacgagcaccatgacggccaccaccccgcagatgatgtagacgatcaggttggtcttgtccttggtggggtcgtgcaaggggtcgtccttgcgggcggggggcttgccggtgttgagccagagcggcgtgtcgtagttggtgcaggtgctttggttcagtcgccgcttcttaaacgtgcagcagaaccggaagccacaagtcccgcagcagaagatgaagtcgcccgagctgcagttgaacggcgggtcccactggcccatgacatcgaagtagccccggcagaagtccggcgtgggcgcccgggtcgggggcgcgtccgatgc

SEQ ID NO: 28069 - DNA, 692 bp, Artificial sequence
  DNA replication origin
aacaaaagccttgcttggagcggccgcctcgctttcccagagcttcgccgtccctggatttgggacctcagctgcccccgcccctttacccacctcatccctttctctggccaccacttctccctgcccggggccgtggccatcgctgcagattgagccccttgccctggctggcgtggactccgggggcccgagccccctcctcgcgcgccctcacttccaagcaccctgatttcgtcaactttcgggtttgccttgttcattatgcaagccccagcaccagctagttccagcagatgggagaaggctttgggggattaatggagctatttgccttttgctttttttaaattttttttattttaagtgtctaaatcgattcgcaaactccgtaactttggaggcggaggacgcagccactaggagcactaagcccccggccgcgggagaggctgggggttggcgtgaggtccgggcgggcggggtggaaggagtgactagcggcctgcgaacagctggatggttggggcataagctttaactgtcccctttcagagtctgggcaacgaagtcgctgtatttttctctaccctctccccaccccttcttccgcgccccctctgccgggggcctgtgtgtgtgcgcgcgtgtgtgcacgcgctccgtgtgatgcctaaaaaatctgaacaaag

SEQ ID NO: 28070 - DNA, 2708 bp, Artificial sequence
  DNA replication origin
tttattccctctacacaagactaccttgacattaaatgctgctgacggcaaaacctagtctgatgtaagaacatcacaagtgctcaagaaatatttatttgtttattgttcattgattgattcacacaaatattgagcattgatcagctctgaggctgatgttggaccttagctggttggtatctaacattactggctattgactgttaccagggtcagagtacagaagcaacctgttttctttttctcttaacaatgattaataactatctcagaaatggccatcaatatttgcaattggcaggaggtgagaaggaggtgaaatccaactcattgacatattctagctactggcaatcccttagtttcttatagcctattggaaactcagtggtatatggaggctcacaaagattcggcagccccatgtgcatagatcagtttgcacagcagtttggagagggatgcagaggctgcctgagaggaagccttccctggggccctcctccaattcctctatcataacgctgacctcactgctgtcatgatctgttttcctctttgctcctctactccagctgagtatgagttcctggggtcagatacaatatttaattgatctgcacataaccaaagcattgcataaggtcaggcaaagaatgggcagttaatcagtgcagagagaggaagaggaagagggagagagagagggagagggaaagagagattgagggatggagagggaaggaaggatgagagagaaagggagattgaaggagggggagagagatggagggagagagggagagagaaagagactgagggagggagagagggagagaaagggggaaagagagagagaaagagagacagggagggaaagagatggaggcagaggggtggggagagagagaggtggagagagagactgaggaagggagagagagagagactgagggaagaagaaagtgggagggagagagagactgagagaaggaaagagagagtgactgagggaagaagagagagagagggagagagagctgagggaaagaaagagactgaggggaggagagagagagagagagctgagggaaagaaagagagagagactgagggaaagaaagagagagctgagggaagaagagagaaggaggaggagactgaaagaaggagagagagagagactgagggaaggagagagggagagagagctgagggaaggaaagagagagaatgagagaaggagagagagagagggagagaaggaaaaagactgtgggaaggagacagagagagccgaaggaaggaaggagagagactgagggaaggagagagagagggagagagacagctgagggaaggaaagagagagagactgagggaacagagagagggagggagagagagagagagtgaaggagggagagagggaagggggagagagtgagggtgggagagagaaagaaagagggagagagggaaagagagggagggggagaaagaatgagtgagggagagagagggaggtgggagagggagggagggagagaaagagatggagggagagagagagagtgagggagggagagagatgaaggggtgagagagtgagggagggagaaggagggaaggagagagaaaagagagggagggagagagaggaagagagagaaggagacagaggaggagggagagagggatagggagagagagatcgagggagggagagagagaaacaagtaaaagaggaaagaaaagagagaaaacaagaaaaggatagagaataaaggaagaaaagtaaagagaagcggaacttggaagggaaggagacagagagaagagaaggggagggagagcagcttgacaggtcagctcctgcagagtttctctggctgtcctccaaaagatgcactcttaagctgtaaacatgcactgggctccagggtaagcttaggaattttttattccagaagacccaattctctgtaagcctcagtccccttgtctgtgaaatgggcttaaccacgtctatttcacacagttgttgtggggattaagccataaaatcacagtgaaagagccagagctcccaagcacaggaggctgaagtccagatgtagcgctttggagagaagctcacagggagaggcctggactgctgggagagcccagcttctgatgctgacctcttagcccttccagttctaagcactgcgattgttcaattcttttattagatgcttttctctggctcaataggcccacgtctgtgaacgggacctttcctggggtgcatacagactgtgctattttgaattctgcatcattaagataattagatgcccagacggagtttaaatactattaagagtttggtgtatactggctggccctggtgacagagtcacttggggacacagtctctacttcctgctgattttctgagcccagaaccttgattagcacaaaaaggctctcctgggtgaaggaaaggaagggaagagaagacaggtgacatatttttgggcccattcttagtgccaggtgttctgcagggaattctatgtgcattgtctaatttaatttcgcccttctaacaaacctatcaggtgttgtgtggttgctcccatttcatagatgaagaaacacagtggtggaacagagggtaaatttgtgtgcttccaacctagcagctaggaggctcc

SEQ ID NO: 28071 - DNA, 972 bp, Artificial sequence
  DNA replication origin
gttgagggcctcctgagcggatgcgaggcctctgacagggatggaggggctctgagggggattcaggcccctgacactacgcgatgacacagagaaggatggcaggggtccccagggggatgcaggtccctcacactgcgggaacacagacgtatgtaaggggtcgctaggaggataccggtcgctcacaccgtgcggggacactgataagaattggaggggccccgagaaggctgcaggtccctggcaggagttgaagaacactaagaggaatgccagtccctgacactgtgcggggactctgagagggaagggaggggtcccaagaaggatgcaagtctttgaccagagttcaagaacactaagagaaatgggaggggtccccaggggatgcgggtccctgacactgtgcaggcacagtgagaatgatggaaggggtcccgagaaggatgcaattccctgacaacactaagagggatgggaggggtccccagaaggatgcaggtccctgacatgggtgcaagggcactgaaaggtgaaggggctctgagtggtaggagaggatcggaggtcgctgcaggggagggggagatgtcggaaggaggatctggataggaataacgggagagtcctgaagttggccattaagggagtttctgggggcagaaggaaggtccctgaaagggaacagtgatgaggatggaagatctctgagggtgatggggagacatgaaaggagatgctgaggcgctggaaaaaccccaatagggaaaaggagggaccaggaaataggacattcaccaaggctgtgttaagagggccatagggtcagaaagggattggagcttgacgctgaggatgttggcaaaggttaactacagttaaggacaatggagaacactgagaaagatggaatggggctacacatgggtctgaggggtgttgagaggggacacagcttggtcggacaag

SEQ ID NO: 28072 - DNA, 1250 bp, Artificial sequence
  DNA replication origin
ggacgaacagggatggctgcctgggacgcgggatgttcaccaggcccgctcccccacccagccctcggtctcggccgctctcacccggcctcagcccccaacggccgccaccgcccgccgctcacctccccggccgccgccgccgccgctcccgccgccgccgcgcgatctcgcgagacttcgctcccctcggcactccccctcctccccgcggcgcgcgcggaccccaggctagaagcggctcggcgcgctccccggacgctgcccaccccgcctcaagggtcaagcccggcctctctcgctgctcgcccccgactccgtccctgcgtgcactccgcccactcccgtgactgggaagggttaaagcccaggtgcgaggcggccgcctccttctcacctggccggccgggtgcgcgtgcgcatgcgcatgtccggggctcggccctgagcctctgcaaaggcttggacggtggcgacaaaggtgaccgctgccacccgtcctgagtgctcgctgcgcgccgagcacttaacagcccccttcggtcctcacactgccctccaaagtgggtattaccagcctccccattctagagagaggaaaaatggaggcctggcaaggaaagtacagtaatggctccatgtcacacagccaggaattggctgagccagtgttgggatctggggttgtctgatgcccagcccaaaacccatttctgcacctcagtgacagcccccaggccctgtccctctttccgttcaaggctcaaggcgctgcctctcagccgcagtcttcattctctcccaacattcaccaaggtgagaggaggagctcctgggaagtcatttgctacaatctgttttcaatggagctggcgacagtaaagtgcttctccctcactttacaaacttcccaaggcctgtgaagcccctgtgccactccctgtgcagctctgaagactgtgtgactatttttatgcggttctgtctcctccttagactggtggcgttttgctggtagagagcatgatggaatggcacacaggacagagaatcagaatgtacatgatgttagcacacagaaaagtgtgacttcttcccaggagtaagtcttaatgaaataataattgtttgtaaagaggaagggctaacatttattgcgggcatatcaaggtcataccaatcttcttgcaatcctggaggtggagaaagtagcctgtttccattgtgaaataggatttgaacctgggtct

SEQ ID NO: 28073 - DNA, 1221 bp, Artificial sequence
  DNA replication origin
acccttgaggcggggtgggcagcgtccggggagcgcgccgagccgcttctagcctggggtccgcgcgcgccgcggggaggagggggagtgccgaggggagcgaagtctcgcgagatcgcgcggcggcggcgggagcggcggcggcggcggccggggaggtgagcggcgggcggtggcggccgttgggggctgaggccgggtgagagcggccgagaccgagggctgggtgggggagcgggcctggtgaacatcccgcgtcccaggcagccatccctgttcgtccccgcagcagctgcggcgccgtttggtccgcaccgtccccgggactcgcgcggggcggggcggccggggccgcgggccggtgcctccttcaaccggtcctcgcgcccgggcgcgaccccggggccgcctcagtgtccatctcgactgcagagttggccctgctgacagtggcagcggcgtttatggagcctctgctgtgtgccgggcacttaagttgcgcgcttgcacgccggggctgcacagagaggtggagcgcccgggccagagccacactgcgaggaggcggtgggaggggaccgggacccctgcgcccccttcctcttcccacctcccactcccctcagcccttttctcctggggtcccgaccaggcttcagagggggtgtctgggagcgccctgaagttggatgcagcttggtatatgggtttcttgggagagagtttttccagggcttttgtctcgttcctaaaagggtccccgatccccaagtggtcaagaaccattgtttggccctgcttggaagcagaggtgggctgagagcagcgggcgtgtgctggtagtggggtgtcaggcccaatgaagtggaatattggagcccagggcttgccttaggcaaaggaaactcttctctaaaagttcgatttttgtttcagcacgcgattccactcttgggaacagtggttctcaacctcgtcagaatcaaggtcccttcttcccctttgcagcaaacatgtataaagccctctttactaccctgaaatgaaattcataaacaatgtgacctccctacacacatccttgaaaagcagtatgatggtttgattgaagcgtaagggcgaaatagagaacagtatatgacagatgttgctgtaccattcacatctaggacatactcttgtgctggaagacagtatatactggggtgcttgtgccagctt

SEQ ID NO: 28074 - DNA, 1533 bp, Artificial sequence
  DNA replication origin
taaatctcacgcctccattcagcaaccctggctgggcgtgggctccctgcaaggcggcggtggacggcccgcagtcgggccgataaggaaacctgctaccattccttggcttcctgggtgcctcactctagagggggaaactgagactccgagtcgagccgtcccgaagcgctacatcgctggcggggctgggattcgaacccgacttctgagatacaggccggtgccccgcccgcgggacctgcgggaccctcgggacaccgctccagccgcgccccgactccagaggttctccagcccactgcagacgacagaatcgcccgcgggtccccgagcccccgagcccgccggggcgcgcccgttgaagccccgccccgccggccgcagcagggagggggacggtgcgagctcgtgctcgctgggcgggcgcacgggagcggcgccaggatagaggttcgcgagaccgccatcgcaacgcaggcgcggtggccaagtggtaaggcgtcggtctcgtaaaccgaagatcacgggttcgaaccccgtccgtgcctgatatccaaccttcagctatagggtggagactttttaggagtggtcgactcttgccgtactctgcgagtagatccttccccctggactgcagacccagccaactgttttccttcaagggtttgggttcaagctcccatccttccctcgcagaaggtggaagtctgggtggtccagcctcggcgagtaaggtccgcaaatttggccggccccggcgatcggctccctacacacagctacccctggggcgcttcatcccctgggagaagatggagggctctgggggtggggcggggctcgcaaactcaaagggtcccctgcagatcatggcctcagggaagccccaacacccttggggcaaggagacctgcagctgctggagtttggcttaagggcccatccacattcttctgcacaggaaaatccaattttatccgctctaacaaaagccctgccgttgcctgatacagagcccacacccagagtcagctggtgtctgtctggcttgctatttttgaaaggaaatccactgtaggcattgcattcgaaagagaagcagccctgtccaggcttggagcaattctgacacgcaaatctgaaacctccggctctgagcctccgcttgcccctctgtaaaatgggcgcttgtgaagcagctgccaggagaggctgctgtggaggcggcctacgtagacggagctccagtcagatcgcacaggttttctttgcatcacgaaggatgcaccaaagggctgctggaatgcctttgaagacgtcatgcaatgaccccaacctccaggaccgccacatcgtgcactctgaaaaccagcttgagcgaatttggggaaggctgtatcagtctgagattcctaactggaggaggcattcgtggagcgcctcgtgtgtgcctggtggaactggattctgggcgtccctcggtgaactggccaggccagaacgggctctcgggaggtgacagggaga

SEQ ID NO: 28075 - DNA, 1283 bp, Artificial sequence
  DNA replication origin
agaccagcctggccaacatggtgaaaccccatctctactaaaaatacacaaattagctgggcatggtggcgcatgcctgtaatcccagttactctggaggctgaggcaggagaatcgcctacacctgggagatagaggttgcagtgagccgagatcgcgccactgccctccagtctgggcaagaggagtgaaactctgtctcaaacaaaaaaaaaaaaaagaaaaagaaagaaagaggatggagagggcagggacaccacaggcagaaggagaggaggccagctcgctccccttggctggggtccctgggacctcctctgtggcatcaggactgcccgctaagttgggtggtgtgttttatgagcgtgacctgtgttggccaacagaggacagcaaaatacattttttatgatcctgggaggttcaggccagtcacgttttcgcgcagagaggctgggcggtggagagggacaagtcatgtctcagttatgtggattctctttgcgaaagaggggccacttctgcaatggatttgggggtccctgggcaggggtgtgggggtgggggaagattttaggaaggggatgagctgctgggggggggcatctcccttactgcgggaaatgaaaagtattacagctatggctggtgagagtgtcagcaccagaggccagatctttgccaggtggaggggacacccttgtgccctacccccaagttccagcacctctccaagagcccttagccccggaagcagcaacaaagtgacattggactggggaggaggaagcacaactttattttctggcccgaagctgggttggtatttgggggagttcttgggaacacagtgtgtctgtgcaatttcaaccctgggggatccaggggactccagccattccagaggaggtgagagaccgtcatggggtgggtgtaagaggcttggggaacctgcctgatgctgctcctacttttactgtttgttcacgggggttgtgtgtgtttgtgcggcgggggaagcggggggtgctgaaaattgggggaagggccaaaagcgccagctggcattggcactgggtgttcccgaaagagggggacagaccgggtctgaatcttcagtggatgcgcccctagctcccggatacctcaagcgcctttggaggactccagcacgcccctcgggagggaagcccggcctcggttccgtctgtgggctgcggtggtactggaagtggggactctttccccctcctccgtgccccctgtttgaagcaccccgggct

SEQ ID NO: 28076 - DNA, 890 bp, Artificial sequence
  DNA replication origin
gcgcgcggagcaggccggccgcgcccgccgctccacgtgcgcccgagccccgctggcatgggcggcggcgcctgcgggggccgggccccggggatcccggactagccgggaaccaccgtccccagagagttaccgccgccccctaaagttgtcagctccctccccccgagaagcaggcagccctggcgcgttggctttagcttctgcaggacgggggcaaaaaaactaggttccggggtgcggagcggggtgtctgtgcccgagacaacaccaagttaggaaaaagaagttagaaaaaaaaagaaaaaggcattttgatttgggggtggggggagtggcgtttctggtttctctttgcttccaatccccaccaagcggagcgttggaatgcgccgcttatgtcctctgaggacacatccatatttataatttatttttaggagaagttgtgaaaaagggaggggggttaaaatgaggagaaaaggtgcgtgggggagtggcctttccagaacctagaggctaattaagctattaaaatggaaatcatttcccccaacttgggcgcgcagcaaatttgactttaatgagagacgattaaggacacaaataaccaaactttatttagctggagatggggtggggggaactgtacgaggcacctcggacacccgatttatccgctgctaagggacgtttggggcacccctcgtgttgtccgggaagcttttaggcctgtttgctgggcgagattggtgattgctccgggagggaagagacaccccgggatcaagcgatcctcttgccctcagccatggtgtggcaaatgtcccctcctcccacagcgaccccctggcattttggtgagatgaaccgccgccctgagggaacac

SEQ ID NO: 28077 - DNA, 862 bp, Artificial sequence
  DNA replication origin
caatttctctccagagcctcagcaaatgacattggacgtttccagcactaaggggactgagatcatgcatgagaaccatgccaacaggcttacctccagatgggacaaaatcggaacctggctaccattgagcatggctggaaacatgtagctatggttagaaaccctgtgggcaagtaaggttttgtcacaactacagtcattcattcaacagatgttttgtgagctcctgctacgcctcagacgtgttggagacactgcccgtggtgtgtggaggtgaatgagagtcgaatctctggatcatggggcttctgttctggggttgggggagggggtaggaaaaaaacaccatggaaataaagaaatgaggatgttggcttttgagttgagctagaaatgaccagcaggaatcaatcctgcagggacctgggagagatgctgttccaggcagaaggaatagcatgtgcgaaggactaggggcaggaaagagcttgatgtgtttgaggaatcaatggggcgccagcgtgcgggctctgtgagctggaggaaaatggcggggttgggcttggagatgcggtcagggcagggatttgcgtacctggggccagggtgagagcttcagtgttcccgtagtcttccgagggacacccattgagggttgtaagcagaggaatgatgtggtctggttttaccataaaagatcactttggcttctggactgaggtagaatcagggcagggagttaagatgtggttggggtgaggagggaaatggaagcagagaaacttggttgaactcagaatatttcagaggtagagtcaatagaattggatgttggggtgtgagaaagagaagaattttg

SEQ ID NO: 28078 - DNA, 863 bp, Artificial sequence
  DNA replication origin
gctcaatggtgcccaggctggagtgcagtggcgtgatctcggctcgctacaacctccacctcccagccgcctgccttggcctcccaaagtgctgagattgcagcctctgcccagccgccaccccttctgggaagtgaggaacgtctctgcctggccgcccatcgtctgggacgtgaggagcccctctgcctggctgcccagtctggaaagtgaggagcccctctcccggccagctgccctgtccgggagggaggtgggggggtcagccccccgcccggccagccaccccgtccgggagggaggtgggggggtcagccccccgcccggccagccgccccgtccaggagggaggtgggggggtcagccccccacccggccagccgcccctcccgggaggtgaggggcgcctctgcccggtcgcccccccgtctgggaggtgtgcccagcagctcattgagaacgggccatgatgacaatggcggttttgtggagtagaaaggggggaaaggtggggaaaggattgagaaatcggatggttgccgtgtctgtgtggagagaggtagacatgggagacttttcgttttgctctgtactaagaaaaattcttatcctgtttatctgtgaccttgcccccaaccctgtgctctctgaaacatgtgctgtgtccactcagggttaaatggattaagggcggtgcaagatgtgctttgttaaacagatgcttgaaggcagcatgctccttaagagtcatcaccactccctaatctcaagtacccagggacacaaacactgcggaaggccgcagggtcctctgcctaggaaaaccagagaacttcgttcacttgtttatctgctgaccttcc

SEQ ID NO: 28079 - DNA, 1045 bp, Artificial sequence
  DNA replication origin
gtacttgagattagggagtggtgatgactcttaaggagcatgctgccttcaagcatctgtttaacaaagcacatcttgcaccgcccttaatccatttaaccctgagtggacacagcacatgtttcagagagcacagggttgggggcaaggtcacagataaacaggataagaatttttcttagtacagagcaaaacgaaaagtctcccatgtctacctctctccacacagacacggcaaccatccgatttctcaatcctttccccacctttcccccctttctactccacaaaaccgccattgtcatcatggcccgttctcaatgagctgctgggcacacctcccagacgggggggcgaccgggcagaggcgcccctcacctcccgggaggggcggctggccgggtggggggctgacccccccacctccctcctggacggggcggctggccgggcggggggctgacccccccacctccctcccggacggggtggctggccgggcggggggctgacccccccacctccctcccggacagggcagctggccgggagaggggctcctcactttccagactgggcagccaggcagaggggctcctcacgtcccagacgatgggcggccaggcagagacgttcctcacttcccagaaggggtggcggctgggcagaggctgcaatctcagcactttgggaggccaaggcaggcggctgggaggtggaggttgtagcgagccgagatcacgccactgcactccagcctgggcaccattgagcactgagtgaaccagactccgtctgcaaccccggcacctcaggaggccgaggctggcggatcactcgcggttaggagctggagaccagcccggccaacacagcgaaaccccgtctccaccaaaaaaatatgaaaaccagtcaggcgtggcggcgcgcgcctgcaatcgcaagtactcggcaggccgaggcaggagaatcaggcagggaggttgcagtgagccgagatggcagcagtacagtccagcttcggcttggcatcagagggagaccg

SEQ ID NO: 28080 - DNA, 931 bp, Artificial sequence
  DNA replication origin
ggctgggcagaggctgcaatctcagcactttgggaggccaaggcaggcggctgggaggtggaggttgtagcgagccgagatcacgccactgcactccagcctgggcaccattgagcactgagtgaaccagactccgtctgcaaccccggcacctcaggaggccgaggctggcggatcactcgcggttaggagctggagaccagcccggccaacacagcgaaaccccgtctccaccaaaaaaatatgaaaaccagtcaggcgtggcggcgcgcgcctgcaatcgcaagtactcggcaggccgaggcaggagaatcaggcagggaggttgcagtgagccgagatggcagcagtacagtccagcttcggcttggcatcagagggagaccgtggaaagagagggagaccgtggggagacggagagggagagggagagggagagggagagggagagggagagggagagggagagggagagggagagggagaggttccaaactctgatttttaacaaatcaagtaaaatccatgtttccacgttctagctccccgctgccccacagctgctccactccacgtgccctctgtttcagtcatgccaaaggatgtgctggtcccacaatccaccacaggtttctcagccttcctctactaggcaactccaacttatgaccggagggtgagcacaggcatcaccatcgcctcctcggaagccttccctggtgaccctcttctgcatcttcctgccagtttgagccagttcactctccccaggatcttccctttatcacaacactcagtagccactgatgcactggttgtctacacacctgcctgcaccacaagacactgattccttgaatggaaagccaattatttcatcttccacatctaaattcagtccctcagtccttcaacagtacaaaggcaaata

SEQ ID NO: 28081 - DNA, 1445 bp, Artificial sequence
  DNA replication origin
ggtccgcagccggaaaagaccccaagaggcgcaccggcttaaggagggaaaagccctgaggggctgcctcagccccaggcccagccaaacacgccggccatggtctcggcctagcaggccaggggcagccgggtgtggggaggcggggaggtgtacggcggacacgcactgctcctgattatctccattctgcagagtggccggaaccttggccccacccgggcccgcgcccgcctcagcggttctactcgccgaattccgcggcgactgcggcagtagctgaggcagccgcagcggtgacgccggccgcgacttccggaaacagcgcgcgcctgctgcgcttgcgtcagcgcctgcgcggcggcgggggcggggccaaggctgggctcctttccctccttatagggacaggggaggggcgtggctatcgaagtccccaaggcgtggcctaatttgtgcgggctttcacttcagtagaaaaaatgtgcatgtctcgacatccagtcgaccaggaaatactgactgggtttctgtgatatgctagccactcttacaggggtggagatacagtgatgaacaggaagacgtgctccctgccccattgtagcttaaacttggggtaaggggaaattcaggcaggagtgaaacttgccatttggtaacacatgaaaatcgctattaagaaaaagagcggggcgatgtaatagagaataatgggatccgggtgcggtggctcacgcctgtaagcctaacactttgggaacccgaggcgggaggatccgttgaactgaagagttcgagaccagcctggacagcatagtgagacctgtctcttaaaaaaataaaattaggccggacccggtggcttatgcctgtaatcccagcactttggaaggccgaggcgggcggatcacgagatcaggagttcgagaccagcctggccaacatagtgaaaccctgtctctactaaaaatataaaaattggctgggcttggtgactcatgcctgtaatcctagcgatttgggaggcagaagcgggcggattacctgaggtcagaagttcaagagcagcctggccaacatggtgaaaccctgtctctattaaaaatacaaaaaattagccgggtgcagtggtgcgcgcctgtaatcccagctattcgggaagctgaggcaggagaatctcttgaacctgggaggcggaggttgctgtgaaccgagatcacgccactgcactccagcctgggtgacagaacgagacttgttttcaaaaaaaaaattaaattaaattaaaagaataataggggttgttacttaggtgatcacggaaagcaaagctgagacccttagctactgcattagcctctgggaatactatgtcgagtgcaacatatgaggcccggccctaatggaattgtatgttggtttggggttgctgttctccaatg

SEQ ID NO: 28082 - DNA, 1171 bp, Artificial sequence
  DNA replication origin
gggaagcggcgggtgcccagtgcctggaggtcgctctctccccacctctggctgcgggaacggagaggccgcggcggccggagcagggtgggcggcctgaggcgagagcccagccggcctccgcggggaatatggcgacctgcggcgagctgagcgtcaactgctgcgccgccgacttctcggagcagcgaaggcgactcgagagaagacgccgccaagtggaacccgggccccgcggccctgggatggggcagcagccactgcagccaggaagccctgggcggggcgctgggcgccaacgagcgtcacggcaacctccatgcggcgccctcaccagcctacaggcggcaccgcagcagcctccaggcagcgcccacaccagcctacaggggtcgccgctcgcactgcacctgcctccgccgccccggggtgtgaactgcgctgtctgtcggcctggctacgctgacccgggcagcccaggcccgcagcagccggacgaggagcccagggccactgcccggggttacgagaaggagcaggacggtgccccagaaaaatgcaagagctcagagctagggcccccgtgccaggaaaggctaggagcagaagatggagagatggagatggagaagcggcaggtgggaaggagcggcgctccaccggtggggtcagcatgcgctggcggggcttagagtatgaagaggaagaagctgggcagaaagagcggaaacgagaaggtgcaatgacacaacagagcacaatgcagaatccagccctaggactccaataaaggctgggtttaattgcaactcacacaccccacccctaatcagagaggatcaggggagagagaggacccaaggaacactggaacctgaagggcgggaatctgaggccaagactgattgttggaaattgtgggcatcaggaaaggagaaagtgagtcagaatgggtggaccgagggtggtgttggggcggggggggcagtgaactgggttaggaaggattagaaatcagaaccttaggaaggatccagaaaggaactgtccttaaaaaggtgcatgctgcggctgggtactgtggctcacgcctgtaatcccagcactttgggaggctgaggcgggcagatcacgaggtcaggagatggagatcatcctggctaacacagtg

SEQ ID NO: 28083 - DNA, 1145 bp, Artificial sequence
  DNA replication origin
gagatggggtttcgctatgatgccctggctagtcttcaactcctggactcaagtgatctgcccacctcggccccctaaagtgctgggattacaggcctgagctgtgtaatttcatgccgcgtgacacagcccagtaaaaaggaagaaaccccgcgggtccagcgtctactcacacaggtggactgatggctgataaatcccagcaggagccaaaagagcagccacagcacccatctactcacacaggtggactgatggctgataaatcccagcaggagccaaaagaggagccaaaagagtagccaccgcacccgcatgtcctggtcctttcagggctccctgaggcggccaggacagaggtggaggtggcttagggcaggggggagggaaggggacggggaccggggccggatctgagttggggagggggaggggagggggaggggaaggggaggggaaggggggaagtaagggaagggaaaggaggagaagggggctgttggggaggaggaggaggagaagaagaaaggggtctgggaaaggatccggttcaaattaagttctcaagcgctggtggaaggtttagctacaggtcacggagaagatcagggaagcaacaggacaggcagggcaagggagcgtgaggcttaggagcaattagagggagacaaaggttctgctttccaccaaaccttcttcggtctgggccctcccttagcaaccctggggctttagactctctctccaccaatccctgatgaccccggtggtgcctcacaatggacattccaagtagcgcccgcatcatcccaatgacccctcccccatctcagtcccccacgctcctcccaaggccaggtcctctctggaaccttcacaaacctgacttctggtcctccccaaccagctccctgtccctgcttctgggcgctccttccttcctgagctcccagggttcctcaaggtcacttttggcgacaaaacataaaaaacaaatgatggcaggatggcaggaagaacctcatacccaagcagagtgccaggttttacagcctccgctcagccattcatatcctaagcaacaaaacatcagcaggatgcggaaggtcccgatagtaaaccatctccatcacatccatgtagcc

SEQ ID NO: 28084 - DNA, 1125 bp, Artificial sequence
  DNA replication origin
ggggaagcggcgggtgcccagtgcctggaggtcgctctctccccacctctggctgcgggaacggagaggccgcggcggccggagcagggtgggcggcctgaggcgagagcccagccggcctccgcggggaatatggcgacctgcggcgagctgagcgtcaactgctgcgccgccgacttctcggagcagcgaaggcgactcgagagaagacgccgccaagtggaacccgggccccgcggccctgggatggggcagcagccactgcagccaggaagccctgggcggggcgctgggcgccaacgagcgtcacggcaacctccatgcggcgccctcaccagcctacaggcggcaccgcagcagcctccaggcagcgcccacaccagcctacaggggtcgccgctcgcactgcacctgcctccgccgccccggggtgtgaactgcgctgtctgtcggcctggctacgctgacccgggcagcccaggcccgcagcagccggacgaggagcccagggccactgcccggggttacgagaaggagcaggacggtgccccagaaaaatgcaagagctcagagctagggcccccgtgccaggaaaggctaggagcagaagatggagagatggagatggagaagcggcaggtgggaaggagcggcgctccaccggtggggtcagcatgcgctggcggggcttagagtatgaagaggaagaagctgggcagaaagagcggaaacgagaaggtgcaatgacacaacagagcacaatgcagaatccagccctaggactccaataaaggctgggtttaattgcaactcacacaccccacccctaatcagagaggatcaggggagagagaggacccaaggaacactggaacctgaagggcgggaatctgaggccaagactgattgttggaaattgtgggcatcaggaaaggagaaagtgagtcagaatgggtggaccgagggtggtgttggggcggggggggcagtgaactgggttaggaaggattagaaatcagaaccttaggaaggatccagaaaggaactgtccttaaaaaggtgcatgctgcggctgggtactgtggctcacgcctgtaatcccagcactttgggaggctgaggcgg

SEQ ID NO: 28085 - DNA, 1360 bp, Artificial sequence
  DNA replication origin
ggcccagggccagcgccaggcgggcgggcgcggcgggcggcatcgttagggcagcgcgcgcatggccccgccgtccccaggcccgcccgcgcgcggaggccgcggctcaggcggggccggcggacggcatggcgggcgcggggctggatggggctgcggccgcgacctgctgctgagcgacgcccgctcggggctcggggccaggccgctccgggagctcggccgcccgctcggacgttggcgctgcagtgcgggccccgccgcggctcctcctcctcctccccgcgcggcgcagggcggacggggcgagggggggcggggcgggtgcaggctccgcccccttcgccacagcgcgaccgggccagcgatgagggactggcatccggaggcttcaccctccgctccacagggtcggcagcagggcggggcctccggaagctccgccccacgctttcccggggcgcatgcgacgtggggcggagcgtctggaagctccgcccgtcgcactgtagagtcggccgaggcgcacgaggtatttttcacgctccgcccctctgcaggctaaagtgcgtgggcgggaagcggtgggcagggtgccatctggctccgcccttctcctgtggtgtgggccaggcggcggcttcctcctcctgcagcagccacaggctccactctgatccttctcccgcggcatggatccttctcccgcggcgtggatccttctcccgcaatctccgtgcgcgtccccagtcagtacccgcagcctcccgacgcacccgctggctccaagcctccctaccccaggtttcctggctaagagagagacagagggagagagggggaagagagagaacaggcaatgggaggttgatggtgagagcttattgaaagacaagagggaggaaacccacatccttcattccccatccattcatttattgccttatttattccattgaatcttcacagctctagaaaaagtgtgctacaattattccctttattaaatgaggtcactgaggcacagtttaagaaatttgccagcagggcacagtgggtcactccggtaatcccagaactttgagagggggaggaaggtggatcccttgagcccaggagttggagaccagcctggccaacatggcgagaccccgtttctacaaaaattagccaaaattagccaaactggctcacacttgtagtcccaggtactcgagaggctgaggccggaggagcgtgtgagcccaggaggcagtggctgcgctgagccgtgattgtgccactgcactccagcctgggcaacagagtaagaccctgtctcgaaaaaaaaaaaatggaaaaaagaaaaaaagaactggct

SEQ ID NO: 28086 - DNA, 1903 bp, Artificial sequence
  DNA replication origin
gggccatgcgcgcgctgccctaacgatgccgcccgccgcgcccgcccgcctggcgctggccctgggcctgggcctgtggctcggggcgctggcggggggccccgggcgcggctgcgggccttgcgagcccccctgcctctgcggcctagcgcccggcgccgcctgccgcgtcaactgctcgggccgcgggccgcgggctgcggacgctcggtcccgcgctgcgcatccccgcggacgccacagcgctgtgagtagcgggcccagcggcacccgggagaggccgcgggacgggcgggcgtgggcgcgttccctggcccgggacgggaagcaggacgcgggccaggacgctcccagggcgaggctccggcgcagcacagcggccctgctaaataaggaacgcctggagccgcggttggcacggccccggggagccgaaaaaccccgggtctggagacagacgtcccacccgggggctgtgcagacgccagcgggggcggggcgcggaggccgcgctcagctgggaggacaaacagtcgctaattggagaggaattgggatgcggcctggggctgcggggtacccggagaggtggggatggctgtagggggctgcagggaagagttccaggaggtgtctggacaaggatttgatggatgtgcaagaattgggctgatgcttaggaaggggcgatgaggtgggtccagaagaaggggggtgaacggtgtgagcaaagaccgtgaggctggaggctggccacgggaggtgtgaggggtaggggcagggtgggaggtgggctcgcgggtgggctggggtcatgaagggcctcaggcgctctgctattgggttccaaggctatcctgagaacaggggtgagggcggattgccgtggggggttaaagccttgtcatgttcgctttcgggagataaaaacaacaggtggcctttatggagacgctgcccagagccaggtctgtgccaggctcctgttgggggtcgtcatgcggaatcctgactctgaccatccgaggcatagggaccgtggagatttgcatttcacagatgaggaaacaggtttggagaggtgacacgacctgtcccaggcatcacagccaggacaggacctgtcccaggcatcacagccgggatgtgcatagcaggggtttggaactatgaggtgcccaggacccagggttggattgaaaagggcgcaggggactaagataagcagacagttgtccccagcgctggggagagtcttgggaccagtctgatgccttgtatttcccaggctccaggctcctcgccgggacagtgtctctttgggtgcgtgctggatccctgggggacgtggcacatccccaggcttgctaaacattgggtgggttctggcatttggttttgtaacgtttctgggtcactcccgcctgtggccacccttccttaggggagccgtgtgtccttggggctttgctgggtggtctcgagggtgggagaagaatgggttctcctggaccaatggagcccgtgcccctcggggccacattgctcctgcgctccctgactgcggacgcgtgtgtctcgcggctgtctctgtggagatggcctcctcctgcctggcaacagcacccacagaattgcatcagacctaccccacccgttgtttgtgatgctgtagctgagggctcctctgtctgccaggccggtcactggggactctgtccaggtcctggtggttcctgcttcccagcacctgatggtgtccatgagagcagcccctcgggagctgtccgggagagaagggcgctggtggctgctgagcggagagcaaggcccgtgttctccaggcccttggcacagcagtggagcccccgcccctgccttgtgttgtcctcttaggctctgg

SEQ ID NO: 28087 - DNA, 2263 bp, Artificial sequence
  DNA replication origin
tagcagtgcccattgccagagaagatctccgtgtccgaggggcagagcgggtgcaccgctggagaccggtgggaacgagggtgtcaacggtcagtgtgggcccaagacgggggtaccaggctctgccccatctggatggccctggggaggaaggggagtgggcagcagacactcacctcgggccggctcctcgcccagggccacgatgctgtaggcggcctccaggcctgaaccaccgcggttctggatgctgaggtcgaggctctcgtcactctgcaccgaggacgggcacacgagcttcagggcggcaggtgccgcttccacctgcacgtctgtccccagcagggctgagccggtccccagggccagcacggccgtcacgtgatagcgcccaggcagcacatagcgatgcgaggcagccggcccagcggcatccacctcgggggagccgtctccaaagtcccagcatgtggcagtgacagggagcggggcagcgatgtggaaggctgctagctggccggaggccaggggtccgtggggccccaccagggcggcccctggggaggcagggaagacgtgctggaggagggtggggctcctacaggtgggggcaggaggcggcagggggccggagcagagggacaggcaggcgaaggaggcactggagggctgggccgccccacacaggcaccagccctgctccgagagggctgcgaggccctggccggtggagaagcagaaggcgctgcaggcctctggctgaagcaggccttcgtgggcagctgaaaaggacactgctgccacggtgcctgagctgttgtcagggaggcaggcgacatactcctcacctagaagaggcagccactggaccccgggttctgctcctcctggctccaccccacacccccccatccgcccgccgcactcacaggctcccatgctgttcccttggcccggaggccccccccagagaggccttcctgagccctgcccagtgtctgcagggcccaggtcccacctggctgggaaggacagagctgccccacccaccggcactcaccacagccactgtccagcaaggggatgccaagcagaggctggccagccagggagccaggcccagcacacgtggctgcctcgggctgcaccacccgcacctgctgctcctccgcccatcgcggcagccacgccaggccacagtcacactcaaacgggttcccactcaggtttctgcggggcaggggcaggtgttggggaccaggtctggtgggaagggtctatgccagccccccactggcaaccaggccctggagccaccctgacagcaccgcctcccctgccccaaccaagccggcactggggggctccaagcaggtagtgaactgcccccaggatctggtctcaagcctggaaggggacacggaccaactgggagggcagaagggatactgggggcctggggtccagccaggaccccacccaaagaaccacaacttacatttcacttaaattaaataaattagcaaatattccttcttctaacgtagaaatcttgttgttgcttatatccctggaagagaggggggattcggcaaagctgacggaagcccccacagctgagcagcaagaggcggtgccgccagcccacccggagtgagccccgcatgctggcacgactgggggacactcacagctctgccagcgccgagaggttcgccaggagcccaacgtccagcgcccggagcaggttgtgggagacgtctctgaggagtgagtggccgtgggtcagggccagagcccttagtaggccagaggccatccctgggcccatcccacacattgccagcatccccaagctatggcctcccacccttgagctccccactcccagaggtcaggaggggcctttctgatggaagacccaaatgaacactcatctggggaaaccaagccgggagaggcctgggggcctcagccctctgcacccatctcagccctatgccgagtgccacctggacctgtccacccagggccaggaagggcacggacccccaacccatcccacgcagggacaaggccccccatcccctgtccacagtcccccacagagccaaggtctcccaaccctgtccacagcccccacacagactcgaggggcccccatctcctgttctgaacccaacagggtggtcccactgtgggaccacaaccaggtatgactgtgtgagaagcaggctcactaccaggctaccagggagcacag

SEQ ID NO: 28088 - DNA, 1351 bp, Artificial sequence
  DNA replication origin
aggagggaggtgggagctgggccggccctggtgagcaggtggcgccggccggtggggccgttcctgtcagctctgcagatgcagaggtggacgcgagctgggggcagcctccggacactcctgggcacgccatacgggaggtggcctgcacggggatccctgccggtgcccacaggccccgtgggtgggtgctgctgtgagcctgggctggtgggccctgctctccgggctctgagcctcagtttccccatctggaaagggggacagtgacggggctcccagcgggctgctgtgagggtgggaggatggaggagtgccctgagccccctgccatcccacacccgcccccaggagcctagacatgtggatcggcttctcgactgtgcagggggtggaggtgggcccagcgccgcagggcgaggccttcagcctggagagctgccagaactggctgcccggggagccacacccagccacagctgagcactgcgtccggctcgggcccaccgggtggtgtaacaccgacctgtgctcagcgccgcacagctacgtctgcgagctgcggcctggaggtgtgcggggggccaggcaggggcctgagacgctggctgtggttaggggcctgccgagcgcccgcggtggagcctgggctgaggaggaggggctggtgggggggttctcgggcggctcggtccccagtctgttcgtcctggtgtcctgggccctggcccggcgcctcactgtgcacttgccaccccaggcccagtgcaggatgccgagaacctcctcgtgggagcgcccagtggggacctgtagggacccctgatgcctctggcacggcagtacggcctctcagccccgcacgagcccctggaggtagtcggccccccacgttctataacctgccctcctgcctgcccctggaggcctcgcctgccctgcccactgtgggtctcgccaaaaaacttgggggccttaatgttgcttgtgcccagtgaagatggttgggaaaatccagagggcagagaggaaagcgtttactcacattacccccaggccttttctctgagtgtgggtgagttattcctgaaaggcaggtcaggggtcctgccccccatggacagtttccatcggagtcttcctctcgagcgacaggagccaggcctgtgggggtccgatggctcgctctccttccctcccctcttcctgggaagttcgggtggggggagtctgggcttcaggctgggatggggtctgtggagctgaggcggccccctgcccaccaggtcatggtattcccgggcctgcgtctgagccgtgaagccttcctcaccacggccgaatttgggac

SEQ ID NO: 28089 - DNA, 1655 bp, Artificial sequence
  DNA replication origin
gggtatcattggtctcccaggggcagccgggcacgaaggtggccaccagggcagggcaggcattctcaaagcgggcgctgacactgcccccaggccagcaagccgtggccgtggcgctggcaccagagtccacctggagcaccgaggctgagccgttggtgggcacgtagaggcggccgtcgcggggggcagggtagatgacccgcagcccagccactggggagaccacgtcaaagctgcaggacaggttgtgcctggacacgccattgcccacctctgcccggacctcatagcgcccaggcagccgcagcccagggttgggcctcaggcccagcagcacggtgagctgttccgtggctgcaagcagccgcagggcacaggcagggcaggcccaagtgccctccagctgggctggcaagtggggcagccatgacgaggcgttggcggagaggtacggggcctggggaccagggtggccgggagccggcgagcagtgcgggagggcgccagggccagcgtcgtgctgcaagccaacgaggtcaccagggagcatgaggacatcctggccgtggagggtgacctgtggagagggaggcagggctgcatcacgtcctcacggtcatggcccgtggacccctgcacgacggatgagggtggacacgcagggctccccgcttcgtcagccacacctcagggagcctccccacagtgctcgtgacaaggacaggcaggacagttgcagacagggggacacacggggagaggacacaggccaagacctgacagacaggaaggagcggctgtgctgggagagaggaagaggaggcacagctcgtgccaagggcccaggcgagagcttctcccactgggagaggggcaagggcactgcagaggtcggaggttggaggtcggaggtcggaggtcagaggtggcaaggacgtgggaggggcctgcaggctgggtgtgtctgctgcgcagacccagaccctgggcagcagacaggaaggtggcctgaggagatgcagggaacagacccaggtcagggccacacaccgagtactgcgcggggggccccgcgggaacggagaagaggaactctctccatagcgcatagggggacccgagtagccctggccctgacgtgcagccattggcgcaggcctgggggtggcaggaggcgtccagcggcaagcagatgttggctccagggcaccagcgtccccctggcatgcacgcggggaccagctgggtcctgttgtccggggacctgctctcaggctcgctgccgttctccggggtccctgcgaggaggggagggtgttggggccctgattcgcccatgggccaccgtcagagatgcccaactgcctgcaccagcgagcctggccttgctgtgaggacaggtctccccgcccgggcagcactcccagcccagtgctgcgtccctgtctccggccagctgactgacccaggccggtccccaggcaggccccacccgatccacccccaggacacctggaatgagctggtgtctctggaacccctgctctgtccacctaagactgggaaccactctgatggccacaggaccagcagacgtgagagctcagagaggccaccccgagtcctgcggcgcccaccaccccagagtccca

SEQ ID NO: 28090 - DNA, 2052 bp, Artificial sequence
  DNA replication origin
caacctcagcctgcgggtgacggcggaggagcccatctgtggcctccgcgccacgcccagccccgaggcccgtgtactgcagggagtcccagtggtgagtatggccgaggctccaccaccagcccccaggcaggtgcctgcagacagggtgctcacacagggcgtgaggcctggcttcccagtgagggcagcagcccagttactggggacgtcggccccgggcaggtcctgctggctggctcctcaggctacctggtgggctttaaattcctggaaagtcacggctctgacagcggctccgctaactcattccaccgtctcatttcacgaaatgaatttaaaactccgctccctgacctcacacgagtccccgtgagtctctcacgccctctgctgtgttctcgcctggctaaagcaagtggcttttgaggtggagtccgaacccctgatgggaaactgcgggctgcccgcggtgccaccatgctgggtacatgggggacagggctgttccatcttgcgggtacctgccccttcaccaggggccttgggaggggccatgagaaatggcgtgacctgtgcagcctgtcctgggttctgtaagccagtgtaggtgctgtccctgtgaggcccgtgtgcctcccctcactgctccgagctctctggctgaggagctggggcaggagccccgggagggtctgagaagactcagagagaggtggactctttgtagctggtactaggtttgctttacagatggggaaactgaggcacagagaggttgaggcattagtagtactacatggctggctggagagccggacagtcagtgtcccagcccgggcttggctctcatggcatgcagagccccgggcacctcctctcctctgtgccccacgtgggactctccagcccgacgggaggtgtgtccaggaggcgacaggctaagggcagagtcctccacagagcccaggctgacaccagtccccccgcagaggtacagccccgtggtggaggccggctcggacatggtcttctggtggaccatcaacgacaagcagtccctgaccttccagaacgtggtcttcaatgtcatttatcagagcgcggcggtcttcaagctctcagtaggtgggcgggagtggggaggggaggggatggggcggggcgggggcgggctccaccttcacctctgccttctgctctgcttcatgctgcccgaggacgctgccatggctgtggtgagtggagggagggacgccaagcagggcaggcctctcacctgccacctgggcccactgatgcctgtccctgcagctgacggcctccaaccacgtgagcaacgtcaccgtgaactacaacatcaccgtggagcggatgaacaggatgcagggcctgcgggtctctacagtgccagccgtgctgtcccccaatgccacgctggcactgacggcgggcgtgctggtggactcggccgtggaggtggccttcctgtgagtgactcaggggccggtttggggtgggcaccaggctcttgtccgggcaccaggctcttgtcccggctccagcctcagccgagggaccccacatcagggggttgcttttctgagcctcggtttccctgtctgttgggaggtactgggtgcacaggagccctgaggctgcacgggagccgggagaggcctcagcacagccgggtgggccctgaatggaggcccggggcgtgactgcagagtggagcctcggctgggtcccaagcaccccctgccccgccaccgcgcacctgtgccccgccactgcgcacccctgtcccggttcactcactgcctcccaccgccccggcaggtggacctttggggatggggagcaggccctccaccagttccagcctccatacaacgagtccttcccggttccagacccctcggtggcccaggtgctggtggagcacaatgtcacccacacctacgctgccccaggtgagggatgagggggtgagggggccactgcctttcaggctctgagcacggggcccccccagtcccccagtcaagc

SEQ ID NO: 28091 - DNA, 1461 bp, Artificial sequence
  DNA replication origin
gagggatgagggggtgagggggccactgcctttcaggctctgagcacggggcccccccagtcccccagtcaagctgccccgcttcctccccaacagccctcactgtgacctcacctgggctgatggcttaggcccctactggggtgagggaggggccaggcgtgggaggagtggacagggaagctgggccccctgaactgccccccaccgcggcctggctcttgctgctctgctgccccgagtgcagctgcacttggaggcggtgccgtcctcaccaggcagccctcagtgctgctgcacctgtgctccgtcccgcacgtggcttgggagcctgggacccttaaggctgggccgcaggcgcagccgttcaccccgggctcctcaggcggggggcttctgccgagcgggtggggagcaggtgggggtgccgcggctgccccacttgggcctgtccccacaggtgagtacgtcctgaccttgctggcatctaatgccttcgagaaccggacgcagcaggtgcctgtgagcgtgtgcgcctccctgccctctgtgagtgtgtgcgcctccctgactggggcctgctggtaccccagagtgggtgtctgttccccagtccctgctttcctcagctggcctgattgggggtctgcccagaggggtcgtctgaggggagggtgtgggagcaggttccatcccggctcagcctcctgacccaggccctggctaagggctgcaggagtctgtgagtcaggcctacgtggcaactgcggtcctcacacccccacatacgtctgttcccacacgcatccccccaggggccctcagtgagcattgcctgcctcctgtcagggtccagctggctccagtacaccagaacacacaccccagtgtcctctgccctgtgtatgcccttccgccgcccaggttggaaggtggcaaaccggatgagtatcctgggagggggtgagctcaccggcagtggccaggcccctgggaaacctggagtttgggagcagcatcctccacgggtcccccagaccttccagcaggccaaatagacctgtgttggaggtaaccccactcccacgccaggtgctgatccgcagtggccgggtgcccattgtgtccttggagtgtgtgtcctgcaaggcacaggccgtgtacgaagtgagccgcagctcctacgtgtacctggagggccgctgcctcaattgcagcagcggctccaagcgaggggtgagtgttgagcggggtgtgggcgggttggggatgggtcccatggccgaggggacggggcctgcaggcagaagtggggctgacagggcagagggttgcgccccctcaccatcccttctgcctgcagcggtgggctgcacgtacgttcagcaacaagacgctggtgctggatgagaccaccacatccacgggcagcgcaggcatgtgactggtgctgcggcgggg

SEQ ID NO: 28092 - DNA, 873 bp, Artificial sequence
  DNA replication origin
gggaaggggaggggaggggctaggggagggaagggggaggggaggggagagtggagggcacagagcagcatcttcttagtccctccccacatctgggcccctctttacaccctgggtcccccgagaggcaccctgcgttcacacaggacagcagaatggctgaggctactgaagcaggtcagagaccgaggaacgccatggcaggaaggagcccaggctggaggctcagctcctcggccaagctgcccgtctgccctggggggctgaacccagtaccctggcaggcatgcggggcggggagagcatgtggggccatcctaccatgcactgggccagcgcagcagcgatctgctggatgtcatccacagtgtggaccctcagggacaccagagtctccgtgatgttcttgcgtatctgggctcggcgctgccgctcgtgcttgggctctgccgccacgtccagggcccgctcgtactggggcaggcagggggcacagcaagctgtcagcagggcaggaggccggcaggaggccagcagatgcccacgactcccggggtgcagttacgtgctagatgctgtgtgatgtgggcactgacccgcaacactgagctgtttcttcatgggcaaaacagggtaagcacatgggccctcctgggcgggggctgcattgtggaaagcagacgccggagagggcccggtgggtgtggctgctgggagcggaacgtcggggtgctgcttcagggtcactgggatttatctctggggcccgggatgagccctccgcaaagctccaggcaggggaacaggtcttggtccccagcacgcatgcagcagatgtgaggtcccctcccaggctgcactcacctcgttcag

SEQ ID NO: 28093 - DNA, 2139 bp, Artificial sequence
  DNA replication origin
actgccaggtagggctcgggttcctcagacaggtagcggcctggggcagaacgcgcaggtcacacgcctgccgggaagctcaaccacccgggggacacccacgatggccctcctgagcccaccctctgccatgggcctgaaaggccataggagcctctgcaccagagctggcacctgcttctccgtggcccccagctcctctccggccaggcccccagcagcccatgaaacagaaagcaaatttcaccagagacacccatggaagccctacgagaaacgccttccccccaagaacaaggccagggggccgcgtgtgccccaaccgctgcatgcaccgtccagcagcgtatagttgagctgcagatgcagcacggccgcagggttgctgctgtccagggtgaccacagcaccgacggaggcctggggctggaccacaacggagttggcggagctgcggtggccccgggcagcccagtccgagttgttgggcaccttcacggtgaggcgcgctctgaggccagccgctcgatggggatctgggcgccggcctgtgtctggaacgccatcgaggccaccttggtggagacggtgtagttgctgatatagccaaagggaaagggattggagtccaccagaaagatgagctgcaccacgtcactgaggttggccggggccctgctgaaagcctaggggatggagaagtggcagccaggccctggggcgccgccatagcacagcaggctccgcgggtccgagcgcttgccctgggccacgatctcctcacccgccagcgtcaggggctcctcgttgagcacgcgggagcgcgtgaggatgggcgtgagggcagaggtcaggttgtaggcctgggacgccaccatccgcgatggtgactcggctcccagctctgagcgctgtggtgcccgcacgtctgagctggccaggtggatgaggtctcctgcagacaggcgtgaggtcagtgcagagacagggaggcagagggagggtgggggcaggcaaaaagggggagccggagggtggggactgggagaaagggggaacctgagggggcagagagcgaggtgcaggcagaaggaagggggaagctggagagagagtggtggagggggagggggaaggggatggggatgaggacgaagatgagggggatgatggggagagggaggaaaaaggaaggaaaagggtagagaaaagagaaaggggagaagaagaggagcagggggaagggaggggaaggggataaggcggataagggaggggaagggggataagggaggggaaggaggataagggggataagaaagatgaggggaatggacaaaaggacggggaggatcgggggggaaatggagaaaaggggagagagatggagaaaagggatggtaatagggaagggggagggggaggagaatgggaattgggggagggggataaggatgggaattgggggagggggataaggatgggaattgggggagcgggatgaggatgggaattgggggagggggatgaggatgggaattggggggaggggagggggacgaagatgggatggggcaaaggcgaggcggttgtggggaggagggaggcagaggaaagggcggcatggggcggacgggccacgtggggcgggcgggtggcgtggggcacgggccgcggcacctgtgatgttgaggatgctgtctccgatggcggtgggcgtcacggtgcccgcggtggtctctgcctgcaggatgcgcatcatggcctccagcttgtgcagcgtctgcttcaggcacgagcggcatacgagctccctgctgggcccctgtgtggagccagcagtgtccagccccgctcctggccccactccttgcacacgccctcctctctacacgggtcctcacctggctcccacctccagccctgcagctggagagcccacttgactggacccccccagtctcctcactaagcattttctgtggctctgcatgacccacggcctccacttggggaccacgtgatgcagcccaccgaccacacaaggcacctcttcacatgagaggaggaggaggggagaggggagagaggagaggggagtggagaaaaggggggagaggagagggaaggggagaggag

SEQ ID NO: 28094 - DNA, 1481 bp, Artificial sequence
  DNA replication origin
gcgctcccgcgtgctcaacgaggagcccctgacgctggcgggtgaggagatcgtggcccagggcaagcgctcggacccgcggagcctgctgtgctatggcggcgccccagggcctggctgccacttctccatcccctaggctttcagcagggccccggccaacctcagtgacgtggtgcagctcatctttctggtggactccaatccctttccctttggctatatcagcaactacaccgtctccaccaaggtggcctcgatggcgttccagacacaggccggcgcccagatccccatcgagcggctggcctcagagcgcgcctcaccgtgaaggtgcccaacaactcggactgggctgcccggggccaccgcagctccgccaactccgttgtggtccagccccaggcctccgtcggtgctgtggtcaccctggacagcagcaaccctgcggccgtgctgcatctgcagctcaactatacgctgctggacggtgcatgcagcggttggggcacacgcggccccctggccttgttcttggggggaaggcgtttctcgtagggcttccatgggtgtctctggtgaaatttgctttctgtttcatgggctgctgggggcctggccggagaggagctgggggccacggagaagcaggtgccagctctggtgcagaggctcctatggcctttcaggcccatggcagagggtgggctcaggagggccatcgtgggtgtcccccgggtggttgagcttcccggcaggcgtgtgacctgcgcgttctgccccaggccgctacctgtctgaggaacccgagccctacctggcagtctacctgcactcggagccccggcccaatgagcgcaactgctcggctagcaggaggatccgcccagagtccctccagggtgccgaccaccggccctacaccttcttcatttccccggggtgagctctgcgggccggcctggcagggcagggcagggcatcatgggtcagcattgcccgggttacgggccccgtggggacggcaggcagcgaggggactggaccgggtatgggctctgggacttcgacatccaacctggcggagcctgggctcacgtccactgccccttcccttcccaggaccagagacccagtggggagttaccgtctgaacctctccagtcacttccgctggtcggcgctggaggtgtccgtgggcttgtacacgtccctgtgccagtacttcagcgaggaggacgtggtgtggcggacagaggggctgctgcccctggaggagacctcgccccgccaggccgtctgcctcacccgccacctcaccgccttcggcaccagcctcttcgtgcccccaagccatatccgctttgtgtttcctgtgagtgaccctgtgctcctgggagcctctgcagagtcgaggagggcctgggtgggctcggctctatcctgagaaggcacagcttgcacgtgacctcctgggcctg

SEQ ID NO: 28095 - DNA, 1052 bp, Artificial sequence
  DNA replication origin
tcgcggcccccaccgaaccccgcccagcctcttcggcccacggggacccaagagacacccggccccgtgacgcgcccgggccccagccgccctcccggcgaggcctcctcaggcagggcctgtcagcccgcgtccccctgtccgggtcacaatggcagctcgcgactgggaaacagttgcctcggaagcgggagccccgggccgcagcaccgtccccatcgccccctcccggcacggaccttctccagggacgcgtccatggctgaggcggccggtggtggcctggcggtcccgggctctacttcctcctcccgcgccccgcagctccttccacgctggcagcgctgacgtcccccgcgcccgcggccggcggggcggagaagaggaggagctgccaggcggcgccgcgggctgccgaacctgatggttgagaggcggcggggcggggccccgtagcgctgggcggagccctctgggattccgtacctgggcgccacgccggccctccctaacgtgcgcaggtgaaggggggaggatgcccggtggattgttcaccaaactctttccagcagcctgttgcaatcatcaaggtagaagtataataatcacaaagtactattcatggagtgaaaggctggaaatactagtgacgcacctcacttccgggcccaggcttccaagtctcccgcctcacctcccgccggcatccctcgagaatggaacaggccattcgccaaggaggcggtgagcgagtgggcaaccttgcgcatgcgcaggactcgcagcgtcctcggcgcccggggacttgggggttttggggttgggggctgcttagtgaacgctgttcagagaaggcactgatctaagctgaggtgttgtctcagaccttaccgccgaattctagacggaaaaaattgttgtaacaaccggtccagcctctttcatgtcacaattatcacttgtcaggtaatgggtagtagtaataatgataatattaatacatcagctgctgttcttccattttcctatttcagcagctctaggagatcatt

SEQ ID NO: 28096 - DNA, 1719 bp, Artificial sequence
  DNA replication origin
cgccccgccgcctctcaaccatcaggttcggcagcccgcggcgccgcctggcagctcctcctcttctccgccccgccggccgcgggcgcgggggacgtcagcgctgccagcgtggaaggagctgcggggcgcgggaggaggaagtagagcccgggaccgccaggccaccaccggccgcctcagccatggacgcgtccctggagaaggtccgtgccgggagggggcgatggggacggtgctgcggcccggggctcccgcttccgaggcaactgtttcccagtcgcgagctgccattgtgacccggacagggggacgcgggctgacaggccctgcctgaggaggcctcgccgggagggcggctggggcccgggcgcgtcacggggccgggtgtctcttgggtccccgtgggccgaagaggctgggcggggttcggtgggggccgcgacgggcccggagcccaggactgggaccgcggggccgaccttgggccctgccgaggttccgcgagtggccggcctgagctcggctggccctttcggaggaccgggagctctccgttggcggccccagatgctcccggaaagaagccgcagttatttcagagccagctgcaaacctgtaggtttttcttggtctccgagttaggaatgaaaattgccaaagcagtggttttccaacttcagcctgagtgggaatcacctggggcctttggtaaaatgcggaggttcagtcccggggtcagaacctctgggggcgggaccgggaactgcgtgtttaaccgccaccgccccgctcccactccgccccacgcaggtgattctgatgctgagcctgcgatcaccgggcgagaacctctgagttccagaaaggggtgggtgttgcgtagattgcgaattgagttttggggatcgcagctgctccacaacttcctggctcccccattccagtggcgaggagggatccccgagtcaactcgaaatccactggtaacagagcctacctctggtttccccttgggggaacggcagcgtggtgtaccaggctgactgctctaccatgtgaaacggattctcattgtcccagtgttagggcttgtaaatggaaaccagtttgggtttcttcacggattcctgctttcggtacctgacattctgccctccctcaaagcccttctgtctgttccagcttgggagtctgcttgtccaatccagtgcatacccggtttttcatgcatgtggcattcaggagcaatgctcgtgttttaagacggctacattttaattttgagctggtaggaataatatattttgtcttttttcaaggcagcagctgctgtagattttgttcacttgtcactggagagttgaaggcaataattgtaaaggttgggccagatgtcttcatgtgctcacagtggtatagcctactcctgggttgcttagcataaattgggtggaagacaagaaaaagataatatggttttcttgtgccatctctggggtgaatgttacgtgttttcctggctgggaataaagtctttccggtcgtctgattagcagggtgtctaccttttggtactttgagtttgtccagatgagtggttcttaaagcagggggcaatttatttccccaggagacatttggctatctctggacatagttttgattgtcacaatgggggcagggaggtgctgccggtacctagtgggtagaggccag

SEQ ID NO: 28097 - DNA, 2080 bp, Artificial sequence
  DNA replication origin
cctcctctgcctgcttggcctcctactgctgcttctgtggtttggggggtccggcgcgcagcgggcggcgggcggcctgcacctgcttccctggtcctggggtgagccgggcgccaccgagccgtctgcctgcctggaggcggccacccgcgcctggcgcggcctgcgggagcgcggcgaggcggtaccgctgggccctggagtgccggccctggtggccaacggcttcctggccctggacgtggctgccaatcggctgtgggtgactcccggggagcgggagcccgccgtggcgccggactttgtgcccttcgtgcagctgcgcccgctgagcgcgctggctgaagctggagaggcggtgctgctgctgcgggaggggctgctgcgccgcgtgcgttgcctgcagctggggtccccaggtcctggccccgtggccgccggccccgggcccgcctccgtctctggccttgccgcggggtccggccgcgactgcgtgctgctgcaagagggctttctggcgcacaggggccgaccccacgtctacctgcagcgcatccagctcaacaaccccacggagcgcgtgaccgcgctgcagactgtggggcccactgccggcccagcccccaaggccttcaccagtaccctggagaaggtcggagaccatcagttcctcctctactcaggccggtccccgcctacgcccactgggttggtgcacctggtggtggtggccgccaagaagctggtgaaccgcctccaagtggctcccaagacgcagctggatgagacggtgctgtgggtggtgcacgtctctggccccattatcccccaggtgcccaaaagcaaagcagccaaggagctcaaggcgctgcaggacttggcacggaaggaaatgctggagctcttggagatgccagcggcggagctgcttcaagaccaccagctcctctgggctcagctcttcagcccaggagtggaaatgaagatcactgacacccacaggccgtctggcctcaccgtgaacctgacgctctattacatgctctcctgctcgccagccccgctgctcagcccctccctgagccacagggagcgagaccagatggagtcgacgctcaactatgaagatcaccgcttcagcgggcacgccaccatgcacgccgagaacctgtggccggggctgctgtcctccgtccagcagatcctgcagctctctgacctgtggaggctgaccctccagaagagtggctgcaaggggctggtgaaggtgggtgccccaggcatcctgcagggcatggtgctcagcttcggggggctgcagttcacagagaaccacctccagttccaggccgaccccgacgtgctgcagaacagctatgcattgcatggcatccgctacaagaacgaccatatcaacctggccgtgctggcggatgccgagggcaagccctacctacacgagtccgtggagtcccgtggccagcctgtcaagatctatgcctgcaaggcaggctgcctggacgagccagtggagctgacctcggcgcccacgggccacaccttctcggtcatggtgacacagcccatcacgccactgctctacatctccaccgacctcacacacctgcaggacctgcggcacacgctgcacctcaaggccatcctggcccatgatgagcacatggctcagcaggaccccgggctgcccttcctcttctggttcagcttggcctccctcatcaccctcttccacctcttcctcttcaagctcatctacaacgagtactgtgggcctggagccaagcccctctgcaggagtaaggaagatcccagtgtctgagtgaactaacagtcctgctttcagccaccatttgcacaagacacccagcactgaaagtcccactgccaggagcaagggatcctttggaagcacccgccctttgtgccttgttgggggaaaccagtgacgcagaagcgagtgtggatacaccagagtttgcattggaaggaatgagtgtcacgtggggagggaaggggccagtggaccttttgtaagctttccactcaataaaatgaacct

SEQ ID NO: 28098 - DNA, 1524 bp, Artificial sequence
  DNA replication origin
aaatacgccaggtgtggtggctcatgcctgtaatcccagcacttttgagaggtcaaggaaggaggatcagttgagtccgggagtttgagatgagcctgggcaacatggcaaaacctcgtctctacaaaaaatacaaaaaaagtaagccgggcatggtagtgcatgcctctggtctcagctactcaggaggctgaggcaagaggattgcttgagcccaggaggtcaaggctacagtgagacaagattgtgccactgcctgggtgacagagcaacaacctgtcaccaaaaaaaaaaaaaaaaatagacaaaatacagcttaggcaatatgacaaaaccccatatctgcaaaaagtacaaaaatcagccaggtgtggtggtgcacgcctgtagtcccaactacttgggaggtttaggtgggatgatcacttgagcctgggaggttgaggctctggtggtgagccatgatcacaccactgcactccagcctggtcaacagagaacctgtctcgacaacaacaaatacacacacacacacacacacacacacacacacacacacatatctatatacatatataatacatatatatacacacaaaatagtttagaagccacattgtgtgaacatgcatttataaacactaaaatcccgtgtaatgacaagatgcttaaactgaaaggcaggagggaaatgcagattcacaatccccaggtgaatctctgactctggagtgtacatgcagtttacgtaaacgtaaactggcttatgtttaaattgttcttgctggccgggcgcagtggctcacgactataatcccagcacgttgggaggccgaggttgacggatcacctgaggcccaggagttcgagaccagcttggctaacacggcaaaatcccgtctctactaaaaatacaaaaattagctgggcatggtcacgtatgcctgtagtcctaggtactcggaaggctgaggcaggagaatcgcttgaacccaggaggcggaggctgcagcgagctgaaattgcgacactgcacttcagccttggcgccagaccaagattgtctcaaaaaattaaataaaaataaataaatcattcttgctcttcagggagtaagcccaggggggagtgggtgggtaggaaaagcagcactgatagttaagtttgggtgaataaatgtgaacaatgactccaatgccatagaccctcacgtgtttgttgcattaattggataattcaaaatataaagtattatccagtttcaggataatattaagatctaaaccaatgaatgctctatgaaaagttgtagattaactgatcccttaaaactaaaaacagcgtcttcataagcttctactgggggcagctaccactttcttcatcacatttcttatcctcaatagctgtgggcaatgccaaaatagctgtatgatcaacattaataaacaacaccagggcaacagccagacacaaacctaaatgaagaattaaattgtaggagaaggaggaggaagcagcgat

SEQ ID NO: 28099 - DNA, 855 bp, Artificial sequence
  DNA replication origin
gacagaagggctacatttctttttcctcgtgatctatgtaacacttgaatacattcacataagacagaattattaatttcatttttgaaaaggtttgctttcaagggatttcaaggggaaacagcaattgttttaagttactaactagtttaccaagcaccgtgcgaggtctgtgagtgccacgatcatctaactaggcctcacagtgggtgccaacccgtgccaggcacagagcccgacacttgggacagaaggcaggtaaggtttctgtcatcttggagcttacattttagttgaggaaacagaccataaagaaagaaaatcactccatgtggttgttagtgtcacaagtgaagctgggggctctgatagaaaatgatggagtcccctcaggcacgataggcagggaaggctgaggatgtggatacttagtggagaccgaaatggtgaggaggagctggcaccagaagagagaaatgtgtgtaagacagagggaacgccgagtgttaagcccttgcggtaggaaagggcagagtgttctggagcgcggagaagactggtctgactgaggcacaacgaacaagagggagagtggaaggggggaaggcagaagcgaattcggggcagagtgtgcaggcctcatggggcatgggagagcctggcctttgttcgaccgaaatggtaagatacccaggggctctgggcagggaagtgacactgatacgggagtgctgggaagggaagagcgtggtccctttaaatgacacagaagcggggaagggaagtgctggggagagaaaggcgggtccctggctaggactctacccccacggacctaggtgaggacaagcactc

SEQ ID NO: 28100 - DNA, 1572 bp, Artificial sequence
  DNA replication origin
ctcgcccggaggctctcttggctggtgcagctgctccctggcagctctcctttccccgctccttcactcccacgcttttgggactacacttcccagcgccccttgcggaggaggcgggccgcgcgctgcttccagggccacttcctggctttggactacatttcccgtgaggccttgcggccatgtcctggatttctccagtctcttcggccggcaccgcctccgcctggactccacttcccggcagcgcccgcggtggggcggggcaggacgaggcgggacgcgcggcccgaggggcgggggcggcgggcggcccggggctgcaaagcggggggccgccgcctccctgggcctgcctgggcggccgcctccgcgatgccgctgctcgtcgaggggcggcgagtgcggctgccgcagtcagccggggacctcgtccgagcccacccgcctttggaggtgagtggggcgcggcgcggggcttcggggcgggcccgaggggaagctgcagggcgggctagcgcccccctcacgcgacacagacttgaaacttggcgctgttggcacatccggagccccggccgtcggctcgcgtcttccccttgaggggtcggggagtttttgccttctttagacttcagcgggctgccccggaggccactctctgacaagggaggggacgggggcccagagaggttaggtgacttgcccaaggtcgcacagcactgcggctcggggacacgccgggacccccattccccgacggggcggctgcagcccccatagggctgggtccgtttaggcaaatccggccgcccgccttcggggacccgcagcctgcggtgaacgttgcttcgtccttgcgtccccgtgaagcaggaggttattccagggtgggcttcggagagcgtttggcctgggggatcttggcggggacccccagtccttcctcctctctctcccctacccccggggcgtagggcgccgagttatttttagccgggagagagagccctgctttccgcagctgggccataggaccacgccctgatgcacgggttttgtttttgttttttctgcttttgtgctcaaatagatctctgaactcttgtccacgcttatgcagggactgttggcaagggggttctcaggttttaaaaagagcggggcgtggcggcgggggcagacgtcctatttgccatagatcctgttaaaggggaatcaatcagttccttgatttgagagtcaaatatcgagcccctaatatctgttgggcaacgtactgatcactgtccctgccctcggagtgtttatagtctagaagggagaatggtttctgatgaagaaggctcagatactataaactgttaagtaccataaagaaaaagcgtcccctttcactctgagatgggaagcacaggaacctgaccaagtgtgttgggttggggaaggcatttagaggtttcatctgtcacagctgtacagtttgtgattattttgtttgcttgtttgttctctattggtctgtcgccagaatgtaagcctcctgaaggcagataagagtagtgtcctcac

SEQ ID NO: 28101 - DNA, 1653 bp, Artificial sequence
  DNA replication origin
tccccgagccgcagtgctgtgcgaccttgggcaagtcacctaacctctctgggcccccgtcccctcccttgtcagagagtggcctccggggcagcccgctgaagtctaaagaaggcaaaaactccccgacccctcaaggggaagacgcgagccgacggccggggctccggatgtgccaacagcgccaagtttcaagtctgtgtcgcgtgaggggggcgctagcccgccctgcagcttcccctcgggcccgccccgaagccccgcgccgcgccccactcacctccaaaggcgggtgggctcggacgaggtccccggctgactgcggcagccgcactcgccgcccctcgacgagcagcggcatcgcggaggcggccgcccaggcaggcccagggaggcggcggccccccgctttgcagccccgggccgcccgccgcccccgcccctcgggccgcgcgtcccgcctcgtcctgccccgccccaccgcgggcgctgccgggaagtggagtccaggcggaggcggtgccggccgaagagactggagaaatccaggacatggccgcaaggcctcacgggaaatgtagtccaaagccaggaagtggccctggaagcagcgcgcggcccgcctcctccgcaaggggcgctgggaagtgtagtcccaaaagcgtgggagtgaaggagcggggaaaggagagctgccagggagcagctgcaccagccaagagagcctccgggcgagttcctggggcgggttctggctccgactgctgcgctttaggtcattgctccacgcttcccaggtgtgtgaccttccacaagcttgagtttgggaccctgctgtgcagctccgtaggattgcattcaatgagtaataataaacctaatcaggcgggcacggtggctcacgcctgtaatcccagcactttggggggccgaggcaggaggatcgcttgaggccaggagttcgagaccagcctgggcaacatagtgagacccaccctcccccataccctcgtctctgccaaaaatttaaaaattaactgggcacggtggcatgcacctgtgatcccagccactctgtaggctgaggcgggaggatctcttgaccccaggagtgggaggctgcaatgagctatgtttgggcactgcagagggacactctgtttctgaaaataataaaaataaatgtaaacggtcttaaactgagaaaatagatcctgaactgtgctagccccacgtactaaagagatcatcgattaacacgtcgtgattggaatgcaataggccactcacaggtgggctgggaaccgtgggggaaggatttgcggatactgactgcagagcccctaatctgaggacaggtccccaaggtgagaggcgtctcaccgtggagctctcttctaaaacttggaaatattgctcaaattcatccaactctgcagcacattaacaaaaagtaattttacaaaagatacagaggagccacatgatacagcagaaactttattagaattttatcatctgtattcatcgtcttctttcataaatctccccctcagcttacacaccccgttcaacaaaaataccaggaaatttactaaagaaatgactgtagaagatggtgttcccatcgccaggttacccaacttctcaccc

SEQ ID NO: 28102 - DNA, 1107 bp, Artificial sequence
  DNA replication origin
ggtttcgctatgatgccctggctagtcttcaactcctggactcaagtgatctgcccacctcggccccctaaagtgctgggattacaggcctgagctgtgtaatttcatgccgcgtgacacagcccagtaaaaaggaagaaaccccgcgggtccagcgtctactcacacaggtggactgatggctgataaatcccagcaggagccgaaagagcagccacagcacccatctactcacacaggtggactgatggctgataaatcccagcaggagccaaaagagaagccaaaagagcagccaccgcacccgcatgtcctggtcctttcagggcgcccggaggtggccaggacagaggtggaggtggcttagggcaggggggagggaaggggacggggactgggcgggatctgagttggggagggggaggggaaggggaggggaaggggaggggaaggggggagtaagggaagggaaaggagaagggggctgttgggtacctggaggaggtggaggaggaggaggagaagaagaaaggggtctgggaaaggatccggttcaaattaagttctcaagcgctggtggaaggtttagctacaggtcacggagaagatcagggaagcaacaggacacgcggggcaagggagcgtgaggcttaggagcaattagagggagacaaaggttctgctttccaccaaaccttcttcggtctgggccctcccttagcaaccctggggctttagactctctctccaccaatccctgatgaccccggtggtgcctcacaatggacattccaagtagcgcccgcatcatcccaatgacccctcccccatctcagtcccccacgctcctcccaagaccaggtcctctctggaaccttcacaaacctgatttctggtccaccccaaccagctccctgtccctgcttctgggcgctccttccttcctgagctcccagggttcctcaaggtcacttttggtgacaaaacataaaaaacaaatgatggcaggatggcaggaagaacctcatacccaagcagagtgccaggttttacagcctccgctcagccattcatatcctaagcaacaaaacatcagcaggatgcgga

SEQ ID NO: 28103 - DNA, 1347 bp, Artificial sequence
  DNA replication origin
cagggcaagcgctcggacccgcggagcctgctgtgctatggcggcgccccagggcctggctgccacttctccatcccctaggctttcagcagggccccggctaacctcagtgacgtggtgcagctcatctttctggtggactccaatccctttccctttggctatatcagcaactacaccgtctccaccaaggtggcctcgatggcgttccagacacaggccggcgcccagatccccatcgagcggctggcctcagagcgcgccatcaccgtgaaggtgcccaacaactcggactgggctgcccggggccaccgcagctctgccaactccgttgtggtccagccccaggcctccgtcggtgctgtggtcaccctggacagcagcaaccctgcggccgtgctgcatctgcagctcaactatacgctgctggacggtgcgtgcagcgggtgaggcacacgcggccccctggccttgttcttggggggaaggcgtttctcgtagggcttccatgggtgtctctggtgaaatttgctttctgtttcatgggctgctgggggcctggccggagaggagctgggggccacggagaagcaggtgccagctctggtgcagaggctcctatggcctttcaggcccgtggcagagggtgggctcaggagggccatcgtgggtgtcccccgggtggttgagcttcccagcaggcgtgtgacctgcgcgttctgccccaggccgctacctgtctgaggaacccgagccctacctggcagtctacctgcactcggagccccggcccaatgagcacaactgctcggctagcaggaggatccgcccagagtccctccagggtgccgaccaccggccctacaccttcttcatttccccggggtgagctctgcgggccggcctggcagggcagggcagggcatcatgggtcagcattgcccgggttacaggccctgtggggacggcaggcagcgaggggactggaccgggtatgggctctgggactccgatatccaacctggcggagcctgggctcacgtccactgccccttccctgcccaggaccagagacccagtggggagttaccgtctgaacctctccagccacttccgcctgtcggcgctggaggtgtccgtgggcctgtacacgtccctgtgccagtacttcagcgaggaggacgtggtgtggcggacagaggggctgctgcccctggaggagacctcgccccgccaggccgtctgcctcacccgccacctcaccgccttcggcgccagcctcttcgtgcccccaagccatgtacgctttgtgtttcctgtgagtgaccctgtgctcctgggagcctc

SEQ ID NO: 28104 - DNA, 1400 bp, Artificial sequence
  DNA replication origin
ggggcagaacgcgcaggtcacacgcctgctgggaagctcaaccacccgggggacacccacgatggccctcctgagcccaccctctgccacgggcctgaaaggccataggagcctctgcaccagagctggcacctgcttctccgtggcccccagctcctctccggccaggcccccagcagcccatgaaacagaaagcaaatttcaccagagacacccatggaagccctacgagaaacgccttccccccaagaacaaggccagggggccgcgtgtgcctcacccgctgcacgcaccgtccagcagcgtatagttgagctgcagatgcagcacggccgcagggttgctgctgtccagggtgaccacagcaccgacggaggcctggggctggaccacaacggagttggcagagctgcggtggccccgggcagcccagtccgagttgttgggcaccttcacggtgatggcgcgctctgaggccagccgctcgatggggatctgggcgccggcctgtgtctggaacgccatcgaggccaccttggtggagacggtgtagttgctgatatagccaaagggaaagggattggagtccaccagaaagatgagctgcaccacgtcactgaggttagccggggccctgctgaaagcctaggggatggagaagtggcagccaggccctggggcgccgccatagcacagcaggctccgcgggtccgagcgcttgccctgggccacgatctcctcgcccgccagtgtcaggggctcctcgttgagcacgcgggagcgcgtgaggatgcgcatgagggcagaggtcaggttgtaggcctgggacgccaccatccgcgatggtgactcggctcccagctctgagcgctgtggtgcccgcacgtctgagctggccaggtggatgaggtctcctgcagacagacgtgaggtcagtgcagagacagggaggcagagggagggtgggggcaggcaaaaagggggagccggagggtgggggctgggagaaagggggaacctgagggggcagagagcgaggtgcaggcagaagaaagggggaagctggagagagagtggtggaggggggagggggaaggggatggggatgaggacgaagatgagggggatgatggggagagggaggaaaaaggaaggaaaagggtagagaaaagagaaaggggagaagaggaggagcagggggataagggaggggaagggggataaggggataagggaggggaaggaggataagggggataagaaagatgaggggaatggacaaaaggacggggaggatcgggggggaaatggagaaaaggggagagagatggagaaaagggatggtaatagggaagggggagggggaggagaatgggaattgggggagggggataaggatg

SEQ ID NO: 28105 - DNA, 1067 bp, Artificial sequence
  DNA replication origin
ggcaggggaggggctaggggagggaagggggaggggaggggagagtggaaggcacagaacagcatcttcttagtccctccccacatctgggcccctctttacaccctgggtcccccgagaggcaccctgcgttcacacaggacagcagaaaggctgaggctactgaagcaggtcagagaccgaggaacgccatggcatgaaggagcccaggctggaggctcagctcctcggccaagctgcccgtctgccctggggggctgaacccagtaccctggcaggcatgcggggcggggtgagcatgtggggccatcctaccatgcactgggccagcgcagcagcgatctgctggatgtcatccacagtgtggaccctcagggacaccagagtctccgtgatgttcttgcgtatctgggctcggcgctgccgctcgtgcttgggctctgccgccacgtccagggcccgctcgtactggggcaggcaggcggcacagcaagctgtcagcagggcaggagaccggcaggaggccagcagatgcccacgactcccggggtgcagttacgtgctagatgctgtgtgatgtgggcattgacccgcaacactgagctgtttcttcatgggcaaaacagggtaagcacatgggccctcctgggcgggggctgcattgtggaaagcagacgccggagagggcccggtgggtgtggctgctgggagcggaacgtcggggtgctgcttcagggtcactgggatttatctctggggcccgggataagccctccgcaaagctccaggcaggggtacaggtcttggtccccagcacgcatgcagcagatgtgaggtcccctgccaggctgcactcacctcgttcaggacggtgaccagggccagcgagtactcgatgacgtgctggggatcggcctgccgcagcagccccgggagcacactagcggtgagcccgtgcagccagactgtgagccccattgcgctgccgttgggctctgggagggtgatggccagagacctacgagcagaggggggtggtgagcaggtggcagtctcgggggcgccct

SEQ ID NO: 28106 - DNA, 2528 bp, Artificial sequence
  DNA replication origin
gagcacactagcggtgagcccgtgcagccagactgtgagccccattgcgctgccgttgggctctgggagggtgatggccagagacctacgagcagaggggggtggtgagcaggtggcagtctcgggggcgccctcccacggcctggctcacctgttgagggcgaccacagcggctcccagctggtcctgcaccaccacggccaggcccacctcgaagtgtggcctgaaacccgggggcagcacggctccgtagccggagaggctgcccttgtagacacagaactcctcgcagtggccctggcgacagcgctgcagcagcagggcgtacaccagcggggcgccagcatcctccgcgtcatgccagcctgagggacggtccccatggcatcacgggagggctccgtgacgtcacagtcgggggatcccgctgctccccctaagcaggcctgtactcacccgtgcattcgaagtgcaccttggtggtgagggcgtgcacagcgcccagtgggaagaggcggcaagagccccccagcggcgggcggttgggggacagggggatggaggcgcagccctcctcctcgccagagcggcccagcaccgtcagcgtgaaggtgtatccctcgccgtcccgcagcacgccccgccgcagcaccagtcacatgcctgcgctgcccgtggatgtggtggtctcatccagcaccagtgtcttgttgctgaacgtacgtgcagcccaccgctgcaggcagaaggggtggtgagggggcgcaaccctctgccctgtcagccccacttctgcctgcaggccccgtcccctcggccatgggacccatccccagcccgcccacaccccgctcaacactcacccctcgcttggagccgctgctgcaattgaggcagcggccctccaggtacacgtaggagctgcggctcacttcgtacacggcctgtgccttgcaggacacacactccaaggacacaatgggcacccggccactgcggatcagcacctggcgtgggagtggggttacctccaacacaggtctatttggcctgctggaaggtctgggggacccgtggaggatgctgctcccaaactccaggtttcccaggggcctggccactgccggtgagctcaccccctcccaggatactcatccggtttgccaccttccaacctgggcggcggaagggcatacacagggcagaggacactggggtgtgcgttctggtgtactggagccagctggaccctgacaggaggcaggcaatgctcactgagggcccctggggggatgcgtgtgggaacagacgtatgtgggggtgtgaggaccgcagttgccacgtaggcctgactcacagactcctgcagcccttagccagggcctgggtcaggaggctgagccgggatggaacctgctcccacaccctcccctcagacgacccctctgggcagacccccaatcaggcccgttgaggaaagcagggactggggaacagacacccactctggggcaccagcaggccccgcctgacagcagcaggagcagccaccacgggctcagggtcaccaagcctcctggccggtccagagtggggagcgtgagggtgagaaccggcccaccacatccagcaacagggacatgggctggggacagtggctgcctctggggtgggaaggggctcttcctcactgttggtattgctgggggactgtgtagcttttgtcactagagcatatgtggcttgaagactgtatgtggaactgtggcaggtttggaaggaagcaaagctgaagcaggctgtcgtgttacgtagaatttgcatcagaaacagagagggaagagcgcgcggcctccaccagcactaaaacacggaaaacagtagatgagcagggaggttgggctgtccaaggcaagtggccgaggggcgggcggcacccaccgtctggttggtggcctcctccttgcggccggccttccacacggtgaggctgaaggtgtactccacgccagccgccagccgttcccgtggaatggtgaccgtgctgctcccgcggggcccaaagttcagcgcacacccgccagcctccctctgcaggccgagaacaaggggcgacgtggcccgagaaccccatccagttttaaagcagagcccggcccaggagacagcgcgggagaccccctccccatgctgggacggggcccaccaggcactgaggacgggccagccctggtggcaagctgggtgttctctgggctcatgggtgtggacgggtgaggggcatggaggacggccctgccacgcactgacctgtgtcgaagccacacaggcccactggaaactgagcggcgtctggtcgccatcctccaggttggggtcgtaggactcgctcccatccagcaccaggtcctgtgtgtctgaccacacgcggtatgagccaccctcagtgatgggcaccaggcgctcaggggccaccgtcacattggcctggatgctccgtgccagtggcgtgtccccaaatgacacga

SEQ ID NO: 28107 - DNA, 974 bp, Artificial sequence
  DNA replication origin
cacctcgggccggctcctcgcccagggccacgatgctgtaggcagcctccaggcctgaaccaccgcggttctggatgctgaggtcgaggctctcgtcactctgcaccgaggacgggcacacgagctccagggcggcaggtgccgcttccacctgcacgtctgtccccagcagggctgagccggcccccagggccagcacggccgtcacgtgatagcgcccaggcagcacatagcgatgcgaggcagccggcccagcggcatccacctcgggggagccgtctccgaagtcccagcgtgtggcagtgacagggagcggggcagcgatgtggaaggctgctagctggccggaggccaggggtccgtggggccccaccaggggggcccctggggaggcagggaagacgtgctggaggagggtggggcccctacaggtgggggcaggaggcggcggggggccggagcagagggacaggcaggcgaaggaggcactagagggctgggccgccccacacaggcaccagccctgctccgagagggctgcgaggccctggccggtggagaagcagaaggcgctgcaggcctctggctgaagcaggccttcgtgggcagctgaaaaggacactgctgccacggtgcctgagctgttgtcagggaggcaggcgacatactcctcacctagaagaggcagccactggaccccgggttctgctcctcctggctccaccccacacacccccatccgcccgccgcactcacaggctcccatgctgttcccttggcccggagcccccccccagagaggccttcctgagccctgcccagtgtctgcagggcccaggtcccacctggctgggaaggacagagctggccccacccaccggcactcaccacagccactgtccagcaaggggatgccaagcagaggctggccagccagggagtcaggcccagcacacgtggctgcctcgggctgc

SEQ ID NO: 28108 - DNA, 908 bp, Artificial sequence
  DNA replication origin
tgtatgtatttatttatttttgaggtagagtctcgccgtttcaccccagctggagtacagtgatgcgatctcagctccctgtagccttgacctctctgggctcaagtgatttttctctcctctacctcccgagtacttgggaccccaggcgcatgccgccatgcctggctaatgtgtatttttttgtagatacggggtctcactgtgttgcccagggtggtttcaaaatcctgggctcaggcgatccttccgtctcagctcccacggtgctgtgttaccggcgtgtgccccagtgcctggccgtcttggaggtcttgtttctctgggtttatgcctcaaggtggcgcctgctcccctgtgctccctggtagcctggtagtgagcctgcttctcacacagtcatacctggttgtggtcccacagtgggaccaccctgttgggttcagaacaggagatgggggcccctcgagtctgtgtgggggctgtggacagggttgggagaccttggctctgtgggggactgtggacaggggatggggggccttggccctgcgtgggatgggttgggggtccgtgcccttcctggccctgggtggacaggtccaggtggcactcggcatagggctgagatgggtgcagagggctgaggcccccaggcctctcccggcttggtttccccagatgagtgttcatttgggtcttccatcagaaaggcccctcctgacctctgggagtggggagctcaagggtgggaggccatagcttggggatgctggcaatgtgtgggatgggcccagggatggcctctggcctactaagggctctggccctgacccacggccactcactcctcagagacgtctcccacaacctgctccgggcgctggacgttgggctcctggcgaacc

SEQ ID NO: 28109 - DNA, 1068 bp, Artificial sequence
  DNA replication origin
ctcccggagcccagggcacaggcataggctctctgagtgtcccacagcccctgggggaagggaactgcacccccaaccgtgccctccatccgcagatggaacgagaagctccgggagccagtgcccagcgtctcatctgtctgggcgcccagcccaggtgagggctcggctccaccgtccgtggctggggctgcttcctggcacggagaaggcctcggctgctctgtcccctcagctggggtggcctctggtccccttctttgttggttcccttttcaagcccttgccctggccccgggccccaccaggcagcctgtgtgtgcgtctctcctgcgccgggtaggctgctgcgggagcggagctccggtgggaggagcagggctggctggaggctggcagggctgggcgggtgctcagggctggaggccggcaggggctgggcgggtgctcagggatggagggtggcagggactggcaggggctgggcgggtgctcagggatggaggccggtaggggctgggcgggtgctcagggatggaggccaccccggcttgggcctggctgccgggtggtcattgctgggaagagcaagtctaggcagaggcacctgctgggtcactcgtggggagggtgacacctggggaagtagaggcccgtggcaggaggtgaggtctcggggtcctggggagcaggggggtggtgtgcagacctgcggagccacagtccctgtgccaggagcactactgggagtgcgtgggaccaggaggggtgcccagggtgggcggcagggtgacccccgaggtgcttgaggccgaggggaggtggagttctcggtttgccccagctctctggcttctcacctccacatcaccagctccaggacctggtttgtaactcgggcagctctgaaaagagagacatgctgccgccctttggtttctgttgccttttcttcactgactgctgacatgggatgtctttcccatggctgtgaccaattgtgcttcttttaattgcctggtttttctttttttgtttttggagttttctctttctttcctccctccc

SEQ ID NO: 28110 - DNA, 1176 bp, Artificial sequence
  DNA replication origin
gccaggccccgtcctctcctggaggagccggttcccctccgcccagcaagaggacccccaggcccgtccctcccgagagcaggcccagggtgaggaaatggggtgcagtgtgggcgctggagaggacaggggacaggcagcagtgccacccccactgtggccccttcctcgctgggccagccgagccatgacctcttctgtttccctctgcgctgtgctcctttctatttaaggagagtgaggcggcttccagggccggaaatgatcctgtttaaattaacaggctgcagtttgggacggtgctcatttgaaaaaaaacagtgcagccccgggctgggcagacggctgctggctccgcctaccacttccatggggagggccagggaggccggccacaaccctggccccacgaggggtgggggttgcagcctctgatagaggacgaggctgccaggccccaggcaacagagccctgcacgaggttctctgggtcccggacacggggtgtgagactagccggggagccccaggctcagcggcattctgtccttacagatccctcccatggctcaactgttcccaggatgagacgccgggggtgacatgggcagcctcaggtcctcccgggacccacaggcaggcacagggatggagactccggcctcggaggctgaacgagggagatgagaaaggggagtctgcgatgtccttgcctacacggatggaaaaacacagccagctcaaaaagggccgtttggagacaagcccacctgtgggtgtaggaaggagagcgcttcatacgtatgccacctgccgctggggtcggggccacccttccagttcaaggggagaatgagggccggctcctggtgcccctgcacacagctgacatggagccaggcgttgtgacccccttgcatccctctccactcccacccttcacagcctgggtgggcaggtgctgcactgaccttatgctcctgatgggcacagaggctcaagaggccctcctcctcccccaacaccatcccccaaacacctccccgggcagccagcagggtccagagtgtcaatggaggaagccaaggtaggaagagggtggtggggggggccaagcaaactggccatctgcgcccggctgtgcgggcacagcagtgccctggagagggcagcagc

SEQ ID NO: 28111 - DNA, 1789 bp, Artificial sequence
  DNA replication origin
ggggccatgcgcgcgctgccctaacgatgccgcccgccgcgcccgcccgcctggcgctggccctgggcctgggcctgtggctcggggcgctggcggggggccccgggcgcggctgcgggccttgcgagcccccctgcctctgcggcctagcgcccggcgccgcctgccgcgtcaactgctcgggccgcgggctgcggacgctcggtcccgcgctgcgcatccccgcggacgccacagcgctgtgagtagcgggcccagcggcacccgggagaggccgcgggacgggcgggtgtgggcgcgttccctggcccgggacgggaagcaggacgcgggccaggacgctcccagggcgaggctccggcgcgggcacagcggccctgctaaataaggaacgcctggagccgcggttggcacggcccgggggagccgaaaaaccccgggtctggagacagacgtcccacccgggggctgtgcagacgccagcgggggcggggcccggaggcccgctcagctgggaggacaaacagtcgctaattggagaggaattgggatgcggcctggggctgcggggtacccggagaggtggggatggttgtagggggctgcagggaagagttccaggaggtgtctggacaaggatttgatggatgtgcaagaattgggctgatgcttaggaaggggcgatgaggtgggtccagaagaaggggggtgaacggtgtgagcaaagaccatgaggctggaggctggccacgggaggtgtgaggggtaggggcagggtgggaggtgggctcgcgggtgggctggggtcatgaagggcctcaggcgctctgctattgggttccaaggctatcctgagaacaggggtgagggcggattgccgtggggggttaaagccttgtcatgttcgctttcgggagataaaaacaacaggtggcctttatggagacgctgcccagagccaggtctgtgccaggctcctgttgggggtcgtcatgcggaatcctgactctgaccatccgaggcatagggaccgtggagatttgcatttcacagatgaggaaacaggtttggagaggtgacacgacctgtcccaggcatcacagccaggacaggacctgtcccaggcatcacagccgggatgtgcatagcagggatttggaactatgaggtgcccaggacccagggttggattgaaaagggcgcaggggactaagataagcagacagttgtccccagcgctggggagagtcttgggaccagtctgatgccttgtatttcccaggctccaggctcctcgccgggacagtgtctccttgggtgcgtgctggatccctgggggacgtggcacatccccaggcttgctaaacattgggtgggttctggcatttggttttgtaacgtttctgggtcactcccgcctgtggccacccttccttaggggagccgtgtgtccttggggctttgctgggtggtctcgagggtgggagaagaatgggttctcctggaccaatggagcccgtgcccctcggggccacattgctcctgcgctccctgactgcggacgcgtgtgtctcgcggctgtctctgtggagatggcctcctcctgcctggcaacagcacccacagaattgcatcagacctaccccacccgttgtttgtgatgctgtagctgagggctcctctgtctgccaggccggtcactggggactctgtccaggtcctggtggttcctgcttcccagcacctgatggtgtccatgagagcagcccctcgggagctgtccgggaga

SEQ ID NO: 28112 - DNA, 1392 bp, Artificial sequence
  DNA replication origin
cggggccccccgccagcgccccgagccacaggcccaggcccagggccagcgccaggcgggcgggcgcggcgggcggcatcgttagggcagcgcgcgcatggccccgccgtccccaggcccgcccgcgcgcggaggccgcggctcaggcggggccggcagacggcatggcgggcgcggggctggatggggctgcggccgcgacctgctgctgagcgacgcccgctcgaggctcggggccaggccgctccgggagcttggccgcccgctcggacgctggcgctgcagtgcgagccccgccgcggctcctcctcctccccgcgccgcgcggggcggacggggcgcggtgggggcggggcgggtgcaggctccgcccccttcgccacagcgcgaccaggccagcgatgagggactggcatccggaggcttcaccctccgctccacagggtcggcagcagagcggggcctccggaagctccgccccacgcgttcccggggcgcatgcgacgtggggcggagcgtctggaagctccgcccgtcgcactggagagtcggccgaggcgcacgaggtatttttcacgctccgccccactgcaggctaaagtgcgtgggcgggaagcggtgggcagggtgccatctggctccgcccttctcctgtggtgtgggccaggcggcgggttcctcctcctgcagcagccacaggctccaccctgatccttctcccgcggcatggatccttctcccgcggcgtggatccttctcccgcaatctccgtgcgcgtccccagtcagtacccgcagcctcccgacgcacccgctggctccaagcctccctaccccaggtttcctggctaagagagagacagaaggagagagggggaagagagagaacaggcaatgggaggttgatggtgagagcttattgaaagacaagagggaggaaacccacatcctccattccccatccattcatttattgccttatttattccattgaatcttcacagctctagaaaaagtgtgctacaattattccctttattaaatgaggtcactgaggcacagtttaagaaatttgccagcagggcacagtgggtcactccggtaatcccagaactttgagagggggaggaaggtggatcccttgagcccaggagttggagaccagcctggccaacatggcgagaccccgtttctacaaaaattagccaaaattagccaaactggctcacacttgtagtcccaggtactcgagaggctgaggccggaggagcgtgtgagcccaggaggcagtggctgcgctgagccgtgattgtgccactgcactccagcctgggcaacagagtaagaccctgtctcgaaaaaaaaaaaatggaaaaaagaaaaaaagaactgg

SEQ ID NO: 28113 - DNA, 1075 bp, Artificial sequence
  DNA replication origin
ctatgatgccctggctagtcttcaactcctggactcaagtgatctgcccacctcggccccctaaagtgctgggattacaggcctgagctgtgtaatttcatgccgcgtgacacagcccagtaaaaaggaagaaaccccgcgggtccaacgtctactcacacaggtggactgatggctgataaatcccagcaggagccaaaagagcagccacagcacccatctactcacacaggtggactgatggctgataaatcccagcaggagccaaaagaggagccaaaagagcagccaccgcacccgcatgtcctggtcctttcagggctccctgaggcagccaggacagaggtggaggtggcttagggcagggcggagggaaggggacggggaccggggccggatctgagttggggagggggaggggagggggaggggaaggggaaggggaggggaaggggagaagtaagggaagggaaaggaggagaagggggctgttggggaggaggaggaggagaagaaaggggtctgggaaaggatccggttcaaattaagttctcaagcgctggtggaaggtttagctacaggtcacggagaagatcagggaagcaacaggacaggcggggcaagggagcgtgaggcttaggagcaattaggagacaaaggttctgctttccaccaaaccttcttcggtctgggccctcccttagcaaccctggggctttagactctctctccaccaatccctgatgaccccggtggtgcctcacaatggacattccaagtagtgcccgcatcatcccaatgacccctcccccatctcagtcccccacgctcctcccaaggccaggtcctctctggaaccttcacaaacctgatttctggtcctccccaaccagctccctgtccctgcttctgggcgctccttccttcctgagctcccagggttcctcaaggtcacttttggcgacaaaacataaaaaacaaatgatggcaggatggcaggaagaacctcatacccaagcagagtgccaggttttacagcctccgctcagccattcatatcctaagcaacaaaaca

SEQ ID NO: 28114 - DNA, 1577 bp, Artificial sequence
  DNA replication origin
ccggagcttctggagggggcagatgcaggtgccggctgctgcagtgcagtagctgctggaggctggggaggcccggacccggtgcaggaagacgccgaccacgcgggctcctgatcgcgggcgcccacagcgcggacatggcgggctggtggccggcgttgtcgcgcgcggcccggcgccacccgtggcccaccaacgtgctgctttacggctcgctcgtctcggccggggacgcgctgcaacagcggctgcagggccgcgaggccaactggcgccagacgcggcgcgtggccacgttggtggtgaccttccacgccaacttcaactacgtgtggctgcgcctgctggagcgcgcgctcccgggccgagcgccgcacgccctgctggccaagttgctgtgcgaccaggtggtcggtgcgcccatcgcggtctcggccttctatgtcggtgaggggccgggaggggacctggggggtgggacccagtattgggggactggaggctgggactcggggatcaagcggctggagggagggcgctgcaggagcctggggacccgggcaggagccggggctctgagaccggagctgcttcagaggcctgaagggccagggcaaaggctagaggctggggtgtttgattgcgaaaatttgcaggaggcactggctggggagccgagaaattggggagccagaggtccaccaggtcaggaatttagaggactagggtcggggctcagactctggggttgggtgtagaccaaggctggaggtaggcagggctgcggaggtctttgccccctgaaaaaggcccacgggaaaataaaggagatcccagttcaaggccgtagcagctgcaatgaccgtgaaccagtcgtgggacagggaaggaaccgacctgctgttcagaaaatccacgcctggggccccggggccaacacaggaacaaaatgcaaggggatcagtgaccctgaggggcagagcaggtggaatctgaggttgggcctggatcttcagcaaattcatgcccaggggcctagtcctggtttggtaacaagattttcccctggggtctcacggaaaacatcaagggaccttggatccttgccatggaggactatatacctgtgagggttcagggaaccctctccttagaaaatccgacccgggcctggggtgtgggggacaggggcttgactgtggaaaccttctctactgcatacaataagaacaatggaaatggtacctgaaaaataccggggttcattcccttaacgagtcacaaaggactccaccaagaggcggattttgatcaatgggagttttacttggcacaagaaaggaagacactgggcgtattctcccaagtagtgtgtcccccagagaaagagacaggagggttttataaggtgatggagaaaggagagggtgcatgactgcatgtagagtaggggtcccagtgagtcatgatgctagcacataggctgcataggttgcataggttatagtcgtgaagctatagcttctcccggggtgaagactttagcatggtaatgaggagagttaacttgggttcat

SEQ ID NO: 28115 - DNA, 867 bp, Artificial sequence
  DNA replication origin
gagtcggtgctgctggccaggtcagtggcagtgttggttgtgtagacagaagccaccttggagtgtggtgaggagtgaggagaggtgagaaaatggcccaggtcatctggacagcatcctggtttgtctgcttgtgaagatggagggctgtggcagcagctagaggctgtggggctgagggagcaagggaggatttgggctgttggttttcctacctggaaaaacttgagcatgtctgaaagccattgatgtggatctgtctagagagagaagatgaacatacaagggcgagaaggggtaagacaggagggccttgaggtgtgggagactaggaaacagcacacagaggaaggaggaagtatacagggcaataggctgggggcaggcatgggcaggtctgatgtttatcatcaggaatagaagggagtcctcttccaagagtggttttccactagagagagggactgatctctgcttagagagagagaggagaggcagggctcaggacttaggagtggggagaaggtccacagttgtcatggtgagtggagagtggcttgatcaggatgtcacgtggagtgcaggggtatcgagagctcactgcaagttggcaccgtagactctgggagagcagcagttggggtgtggctatgcaggtgtcggttcagggaaagcaggtggttggattcaaggtgggagtttaccgatgggcgtcaggaaaaggcatgggatgagcgaatttaaatattgacaagaatgtcagtgccagcatgacaaaagaggagagtgaagcaagggagtgggctggcaaattgggagcagataggaggcagtgatgctgctgaggtttgagaaggggcggagttg

SEQ ID NO: 28116 - DNA, 1446 bp, Artificial sequence
  DNA replication origin
gatacagaggtcatcaaagaactagatgtgattaagcagacattatccatcaccttctactcttaaagaggcctctgaggtggagccaggctctgaagacccatttccttcccaaagagagatctgagaacagttaccaatacgttcaatggtcacctaacaatgtagaaatcccagcatcatatctgctggtagacaatgccacagtggcaagcatttcttaaatccactccctggcttcagtcctactagttcagtgctcagctctcacaagcttcatttcatcaaaaatctcctaggcttggttttacattgtatctctagtactggcacatagatggtaggtgctgaattatgcttgttagatggatggattgagggatggatgagtagatggatgggaagatgagtggacggaaggaaggaagaaaggaaggaagggtagatgggtgaatggaagggtgggtagatgggtaggtagatggatgggtgggtgggtggatgaatagacagatggacgggagggtggataagcagatgagtaggtgagtaggtgggtgggtggatgggcagatgggtgggaaaatggatggatagatgagtagatggatgggaggatggaagaagaggtggatgggcaagtgagtggaaggaaggaagaaaggaaagaaggaaggaagaaaggatgggtggatggaagaatggatggataggtaaatggacgggaggataaatggatgggaggctgggtgaataggcagacagatggctggatggaaggatggatagatggacaggtagagagacaggaagacaaatggatgagtgggtgggtgggtaggtggacgaatagatggatggaaagaaggaaggatggatggatagataggaagaaagaaagaagaaaggagggaagggtgtgtagatgggtagatgggtgggtatatagctggttggacggatggttggacggaggagggaaggatgagtgagtggatgagagagtggatgggtgggtgaatgggagggaggacagagtgtataggccggtaaatgagttggatggatggatggatggatggatggatggatggatggatggatgggaatatgaatgggaggatggatgggactgaagaaggcaaggtgaaagagatgactctttcttccatctgtaatcttaagagagaactgattggatgtgggcacgttcctcagattctatgcccaactccaatcagttctctctctcttccctcggattatagatggatgtttgggtggcctggttgaacgaaatcctcaagacaaaaggcctaaagactagtcagctctggggtttcaattctggtgtgtttatataatggcacatttaaaaataggcaggccgggcgcagtggctcatgcctgtaatctcaccactttgggaggccaaggagggtggat

SEQ ID NO: 28117 - DNA, 977 bp, Artificial sequence
  DNA replication origin
ggttgtagactaagggcctgcgtcaagtacagaacccaggaggggtctgcccaactttaaccctctctccaaatcctctagcctgaagcagcagaaacccacgtgggactgggggctgcccccttccgggccttccccaagcagaggggtccccatctagccccgcggggcaacggcggccggtggctgcgtgaagggccccctcccccgacgccggggagcaggaaggccactcggcaccatatttagtcagggggagccggcagcccagagctggtatgcggcgctgggaattcctgcaggaaggagtccgcgcctgccctttttgggttgtctcccgcccgccgctcccgccgctcccggggagggggaccggcccggcccggcccggcccgggaacctcggaggagctggtgccgcgcggggagcggagcgcccgggctgcccgcgggtccccggcctggcgcggggccagcccaccgcctcgacttccttttatggcctgtgtgtgcgtgcgtggacaggagcggggagggagggacggggagaagacggagagcctggggaagagagagagagaaagcgcagagataggagtgagacacgcgggagagatggagagcaagagacacagagaccagagacaaagtgagacaggagggagagacagatacatcgacagatctagagaagcgagagggacagagacaaaagatagagcgagagacagcaatgatcagagtgacagacatgcagagacagtggcagagacagagcgagagagcctgtgatggagagagacagggaatgcaattttaggcgaggaatccttggggaagggaagttgttgaagggaactcgcagactctgggggcacacccactttctccttggatcttgacacttgcatcttgtaaataacgtaattatcaccgccaccgccttcccccattttgtagctatggacaccaagtctc

SEQ ID NO: 28118 - DNA, 1224 bp, Artificial sequence
  DNA replication origin
ctgtgtctcttgctctccatctctcccgcgtgtctcactcctatctctgcgctttctctctctctcttccccaggctctccgtcttctccccgtccctccctccccgctcctgtccacgcacgcacacacaggccataaaaggaagtcgaggcggtgggctggccccgcgccaggccggggacccgcgggcagcccgggcgctccgctccccgcgcggcaccagctcctccgaggttcccgggccgggccgggccgggccggtccccctccccgggagcggcgggagcggcgggcgggagacaacccaaaaagggcaggcgcggactccttcctgcaggaattcccagcgccgcataccagctctgggctgccggctccccctgactaaatatggtgccgagtggccttcctgctccccggcgtcgggggagggggcccttcacgcagccaccggccgccgttgccccgcggggctagatggggacccctctgcttggggaaggcccggaagggggcagcccccagtcccacgtgggtttctgctgcttcaggctagaggatttggagagagggttaaagttgggcagacccctcctgggttctgtacttgacgcaggcccttagtctacaaccactcctcttgcaaccaggtggaggggctgggggccgggggtgcggggggtggctttattaatacccccattttgcaggtgagaaaattgagtccctgcaggggtaaagggatttgaccaagctctcactgggacagtcattgattggtgctggcactggaacctttctgatgacaccattcacttccagagaggagacattaaagggaaatgcccaggcaaactggccttgaggcccagggcgtgtatctgagagtagatgtctggctttgaatctgccagtgctgctttctacctatatgaccatgggcaagtaactttgcctctccatgcctcaatttccctacctgtaagatgggaagaacatcagctacttcctggcctttttgtaagcagtccttgagatgatccatgtaaaatgaacatggtgcaccgcttcatgtgagctgctgttactcgcaacaaacatgaaaccaactagagttgcaccaggcctccgggatataaagagaggcctcttcccctgcaggctcccaggcccatctggagagctctgcatctcagacccttttgggtccttcttcatccttc

SEQ ID NO: 28119 - DNA, 1343 bp, Artificial sequence
  DNA replication origin
gccgagaggtggctggtccggctgcccacgccgagacgcgcgaggtgagcgggcgccggggcggggcggggtggggcggggccgccgcatccccgtgacgcgcgggccaaccaggcggcgttgcggccccggccccggctccctgcgccgccgccgccgccgccgccagcgctagcgccagcagccgggcccgatcacccgccgcccggtgcccgccgccgcccgcgccagcaaccgggcccgatcacccgccgcccggtgcccgccgccgcccgcgccaccggcatggcgctccggggcttctgcagcgccgatggctccgacccgctctgggtacgtgccgggggccgcgtgaggccggcgggacggagggaggccggcggggagggaaagcaccgggcccgcagccgcccggggcaccccgctccccgctctgctgccggcctcgggggcccgggaccctcacgtcgcccgcggcccagcccctttcgggggtgcaaggcatgggggaaacttgggtgactcagttcctgcggagcagagcgtggggggccgcgtgcccagccctggggttttggagggtcgggtcgggtcagagccgccgtgaggaggccttcctgttttggggttcccgtctgtaaaaacaaccttccagggaaggggacgctagagatggggggcgggaagaggggtgtctctctgcttctgttttcccatcttttttgtggttagggtccccccttttcacgaaaaatactccgtgaccaacggggtgagctggggaggggcttagattgtagaaagggactttcattgtctccccaaagttgtcgtacaagccacattactcttctgtggttacctagctttgttttttttgttctttctacttagatactgcgggggaagtttgggggaaccagggaagaagggggatgtccacccttgatgtgccctacctgaccctcggctcggggcagacttggggtgcagctgaggacgcccaggaccctggtagctgtggtcctgccctcccttccctgcaacacgtggagctcctctctggggatgccccttagatttaaccccggcaagttttcttctgtaacgtggcctgcggagcctgactgggtgtctggagtccacttgctgtggtttaagccccagtcttttgggcttcagcttctccgtaatgcgatttgcctctttgttccaggaaggcaggcacttctgtctcgtgctgtcttgattgttggtgaacgcagtaggcaaatctggacacgactgtttctctctcctcttttgtttaggaatcaggagaaacagccttggttcttaggagc

SEQ ID NO: 28120 - DNA, 1433 bp, Artificial sequence
  DNA replication origin
ttgggtagatggatacatagacaggtggatggattggttggtggatggatggatgaactgttgggtgggtagatggattgatgggtgaatgaattggtaggtgggtagggtggatggatgaattggtggatgggtaggtggatggatgaatgaactggtgggttgctggatgggtggatgaattggtaggtgggtggatggatggattgatgggtgaatgaattggtaggtgggtagggtggatggatgaattggtggatgggtaggtggatggatgaatgaactggtgggttgctggatgggtggatgaattggtaggtgggtggatggatggatggatgggtgaatgaattggtaggtgggtagggtggatgggtgaattagtggatgggtaggtgcatggatgaatgaattggtgggttggtggatgggtggatgaattggtaggtgggtggatggatggatggatgggtgaatgaattggtaggtgggtagggtggatgggtgaattggtggatgggtaggtggatgtataaatgaattggtgggtgggtggatggatggatgaactggtgggtgggtggatggatggatggatgggtgaatgaattggtaggtgggtagggtggatgggtgaattggtggatgggtaggtggatgtataaatgaattggtgggtgggtggatggatggatgaactggtgggtgggtggatggatggatgggtgaatgaattggtaggtgggtagggtggatgggtgaattggtgaatgggtaggtggatggatgaatgaattggtgggtgggtggatgggtggatgaattggtaggtgggtagctgaatggatgaattggttggggggggtggatggatgaattggtgagtgggtagttgggtggatggatgcattggtgggtgggtggatggatgaattggtggatggatggatggatgggttcatggttgggtgataaatatatccatgggtatacatatggatgtgtacatagataattctctggctatgatagggaggactggctgtggtggggaacactgactgtggtggggagcactggctgtagcggggaggactcagtaggacaaggagaggctggaggcagtgaagacttaggaagcagttgcatagtcctggcaaggaataatttggggctaggatcaggtcaattaaatgtttaacattggaactatgtctcttgtatacataactgcatatgtcaagtcttggtatcgttttctttctagcagggcacattcctttggaatgagcttttactggcaactgctcagaagctgttctgtatataatgaccaccaacagtttaatccttttttcagccatcacctcaggaattaacagtagtatgaaatcaattaaaataatcagtctttgagatgtcatgccttctcc

SEQ ID NO: 28121 - DNA, 867 bp, Artificial sequence
  DNA replication origin
gaagaccagcctggccaacatgatgaaaccctgtctctactaaagatacaaaaattagccaggcatggtggcaggcgcctgtagtcccagctactcgggaggctgaggcacgagaatcgcttgaacccaggaggtggaggttgcagtgagccgagattgcgccatggcactccagcctgggtgacagagcgagactccatctcaaaaaacaaaaacaaaacaaaacagcagcagcagcagaaaacagtaaaacaacaacaaaaattgacaaagtcggagcctaaacgtatcagaccgcggagatctgagaaaggatcccggacctgcagttgctacaggggtcaggagagagcaaagaccatgcggcatagcacggtgcctggaacagacaaacacttcgtagatgtcgcttttgccatggttatcatccggacatggttatggtccggaattggtgggtcttggtctcactgacttcaagaatgaagccgcagaccctcacggtgagtgttacagttcttaaaggtggcacgtctggggtttgttccttctgctgttcggatgtgttcggagtttcttccttctggtgggttcgtggtctcgctggcctcaggagtgaagctgcagaccttcgcggtaagtgttacagctcttaaggtggcgtgtctggagtcgttcgttcctcccgctgggtttgtgctctggctggcttcaggagtgaagctgtagaccttgatggtgagtgttacagctcacaaaggcaatgtggacccaaacactgagcagcagaaagatttatcgcaaagagtgaaacaataaagcttccacagtttggaagggtaccccagtaggtggccactgctggct

SEQ ID NO: 28122 - DNA, 1171 bp, Artificial sequence
  DNA replication origin
ataaacagcattgttggctgggtgctgtggcttatacctgtaatcccagcactttaggaggccaaggtgggcagatcacttgaggccagaagtttgagaccagcctggccaacatggtgaaatcccgtgtctactaaaaatacaaaaattagccgagcatggtgacaggcacctgcagtcccagctactagggaggctgaggcaggagaattgcttgaacctgggaggtggaggttgcagtgagctgagatcgcaccactgcactccagcctgggcaatagagcaagactttatctcaaaaataaataaataaataaataaataaagcattgttcatcacactgtattacatttactcaattgcactgtttcctagaccggatgatgggcacactggagcaaggactctttaatttctatacttccggtgcctaaacaggtacttggcatacagtggggtgacccacatgtttccatcattaattaaacaaataatgttgaacccacaccatgtgtcagacactgaggatgcaatagtagcaagagagataaggatggagggtggataacagcatgggagatggataacagaatggacacatggataagatggaggatgaatggaaggatggatgagggaaggatggactggatggatggatgggagaaaataaatgaatgaaaggattagtgaattgatggatgaatagggaagaagaaacgagagacggatagacagatgaatggatggatgaatggaatggggtggaagagagatggagggatgggattgaggatggatgatggatggatggatggcaggatggggtggaaaaaaggataagggatggatggacggacagacagatggatgggatggggtagaaaaaaggatgagagatgatggagaggtgtaaatagaaggatgaggaaagatggaggaactaaaggaagggtggggagaaagatgggagagagatatcaggataagggaaagatagagaagaacacagatggaagactggatggattgatgggtggatatatagaaaggtagacagatggaaagagagatggaaggtagacctttacacaatgagggatggatagacagatctcgggtacagcagaaagatctccccaataaatgcccacaaaccctctggtcaga

SEQ ID NO: 28123 - DNA, 717 bp, Artificial sequence
  DNA replication origin
accaccatcatcctgtacctggacttctgcaggagtgcccctgggataatgtgccccatggaggaagcctctgatgcccggagaacagaggcagcctgagcccacctgggtatgacaccatcaggaaggctacctggaggtggttgatgcctgagctacgtctttttttttttttaccttttacattttttgtggagttggggtctcactatgttgcccaggttggcctcgagctcctgggctcaagtgatcctctgccctcagcctcctaaaatgctgggattacagcctgagctaaatcttaaatgaccaggaagtgcgtgctgagcaggcagaggatggggggatggagctggagaagagggaggggaggggcttgagatgggggtggggggtgggggctggggggtaggggggtggcgggggcacctaaaacccaggcacagggaatagcatgactcagaggacactcagtgtgaccagaggagcgtgtgggcagggtcacttggcactttaaagtcaggcagaagaattcagggtctcctgtgcttcaccatggggcggggggcatcatcagaggggcagctgcctggagaaggttttactttttgagaccgagtcttcctctgtcgcccaggctggagtgcagtggtgtggtctcggctcactgtaacctccgcctcctgggttcaagcgattctcctgcctgagcttccc

SEQ ID NO: 28124 - DNA, 1011 bp, Artificial sequence
  DNA replication origin
cattatctcagctcactgcaacttccacctccaaggctcaagcgattctcctgcctcagcctcctgagtggatggggttataggcacccaccactatgcccggctaatttttgtatctttcagtagagacggggttggccaggctggtctggaactcctggcctcaagtgatccacctacctcaccccccaaattgctgagattataggcatgagccactgtgcctggcccagagtctgattttaatttaaaaaaagaaaatcctataccacaacgttaaaggaatgaagttggaaagtaaatgttttgtttgttttgtttggttgtttcctgatggctactttgtgttttttgaacactaagtagcaatttttccccctaaaatgttctcctcttgtgttttgtggacagtggctatggtggtgcctcagggttactggtaacttcaaaacatggttaacttgcctactgggtaccctaatagcacatggggaagtatcaacgtcatcatcatcatctttctacagaggaaactgaggcccagagagggtgaacttcctgcccaaggtcaagtgaaggtcatccttattgaggacttttcccatcgtatcagacaatagtaggcaaattgagacaggattggaggaggaggagaaggaggagatgggggtggaaggggaggagaaaaaggaggagaggaagaagaaagggaagagaaggagagggaagagcagagggaagagagggaggacggtagaggagaagaagggagaagggaagaagtgggagggaagatgacagggagcagaaaggaagaagaaggtggagcaggagagaggaagaggaggaggagggggaaggaggaaaaggaaggggtgcaggaagaggagggggtgcgtgggcagaaggtgggagagatgcaggaggagggagggtgcagggaggggtgcaagaggaggggggcaggaggaggaggctggggcagagggagaggggaggaagccttatgag

SEQ ID NO: 28125 - DNA, 1393 bp, Artificial sequence
  DNA replication origin
agccgcgcccggggccccccgccagcgccccgagccacaggcccaggcccagggccagcgccaggcgggcgggcgcggcgggcggcatcgttagggcagcgcgcgcatggccccgccgtccccaggcccgcccgcgcgcggaggccgcggctcaggcggggccggcggacggcatggcgggcgcggggctggatggggctgcggccgcgacctgctgctgagcgacgcccgctcggggctcggggccaggccgctccgggagctcggccgcccgctcggacgttggcgctgcagtgcgggccccgccgcggctcctcctcctcctccccgcgcggcgcagggcggacggggcgagggggggcggggcgggtgcaggctccgcccccttcgccacagcgcgaccgggccagcgatgagggactggcatccggaggcttcaccctccgctccacagggtcggcagcagggcggggcctccggaagctccgccccacgctttcccggggcgcatgcgacgtggggcggagcgtctggaagctccgcccgtcgcactgtagagtcggccgaggcgcacgaggtatttttcacgctccgcccctctgcaggctaaagtgcgtgggcgggaagcggtgggcagggtgccatctggctccgcccttctcctgtggtgtgggccaggcggcggcttcctcctcctgcagcagccacaggctccactctgatccttctcccgcggcatggatccttctcccgcggcgtggatccttctcccgcaatctccgtgcgcgtccccagtcagtacccgcagcctcccgacgcacccgctggctccaagcctccctaccccaggtttcctggctaagagagagacagagggagagagggggaagagagagaacaggcaatgggaggttgatggtgagagcttattgaaagacaagagggaggaaacccacatccttcattccccatccattcatttattgccttatttattccattgaatcttcacagctctagaaaaagtgtgctacaattattccctttattaaatgaggtcactgaggcacagtttaagaaatttgccagcagggcacagtgggtcactccggtaatcccagaactttgagagggggaggaaggtggatcccttgagcccaggagttggagaccagcctggccaacatggcgagaccccgtttctacaaaaattagccaaaattagccaaactggctcacacttgtagtcccaggtactcgagaggctgaggccggaggagcgtgtgagcccaggaggcagtggctgcgctgagccgtgattgtgccactgcactccagcctgggcaacagagtaagaccctgtctcgaaaaaaaaaaaatggaaaaaagaaaa

SEQ ID NO: 28126 - DNA, 1877 bp, Artificial sequence
  DNA replication origin
gccctaacgatgccgcccgccgcgcccgcccgcctggcgctggccctgggcctgggcctgtggctcggggcgctggcggggggccccgggcgcggctgcgggccttgcgagcccccctgcctctgcggcctagcgcccggcgccgcctgccgcgtcaactgctcgggccgcgggccgcgggctgcggacgctcggtcccgcgctgcgcatccccgcggacgccacagcgctgtgagtagcgggcccagcggcacccgggagaggccgcgggacgggcgggcgtgggcgcgttccctggcccgggacgggaagcaggacgcgggccaggacgctcccagggcgaggctccggcgcggcacagcggccctgctaaataaggaacgcctggagccgcggttggcacggccccggggagccgaaaaaccccgggtctggagacagacgtccccacccgggggctctgcggacgccagcgggggcggggcgcggaggccgcgctcagctgggaggacaaacagtcgctaattggagaggaattgggattcggcctggggctgcggggtacccggagagatggggatggctgtagggggctgcagggaagagttccaggaggtgtctggacaaggatttgatggatgtgcaagaattgggctgatgcttaggaaggggcgatgaggtgggtccagaagaaggggggtgaacggtgtgagcaaagaccgtgaggctggaggctggccacgggaggtgtgaggggtaggggcagggtgggaggtgggctcgcgggtgggctggggtcatgaagggcctcaggcgctctgctattgggttccaaggctatcctgagaacaggggtgagggcggattgccgtggggggttaaagccttgtcatgttcgctttcgggagataaaaacaacaggtggcctttatggagacgctgcccagagccaggtctgtgccaggctcctgttgggggtcgtcatgcggaatcctgactctgaccatccgaggcatagggaccgtggagatttgcatttcacagatgaggaaacaggtttggagaggtgacacgacctgtcccaggcatcacagccaggacaggacctgtcccaggcatcacagccgggatgtgcatagcaggggtttggaactatgaggtgcccaggacccagggttggattgaaaagggcgcaggggactaagataagcagacagttgtccccagcgctggggagagtcttgggaccagtctgatgccttgtatttcccaggctccaggctcctcgccgggacagtgtctctttgggtgcgtgctggatccctgggggacgtggcacatccccaggctttctaaacattgggtgggttctggcatttggttttgtaacgtttctgggtcactcccgcctgtggccacccttccttaggggagccgtgtgtccttggggctttgctgggtggtctcgagggtgggagaagaatgggttctcctggaccaatggagcccgtgcccctcggggccacattgctcctgcgctccctgactgcggacgcgtgtgtctcgcggctgtctctgtggagatggcctcctcctgcctggcaacagcacccacagaattgcatcagacctaccccacccgttgtttgtgatgctgtagctgagggctcctctgtctgccaggccggtcactggggactctgtccaggtcctggtggttcctgcttcccagcacctgatggtgtccatgagagcagcccctcgggagctgtccgggagagaagggcgctggtggctgctgagcggagagcaaggcccgtgttctccaggcccttggcacagcagtggaacccccgcccctgccttgtgttgtcctc

SEQ ID NO: 28127 - DNA, 1103 bp, Artificial sequence
  DNA replication origin
tgtcaggagggtatttttggcctttagtatgtcgtctaagttgctagtgcttttctgagattgtagtttgttttctaattttatttatattttgcgtagaagttgtgtattttagatggagttaggtcggctggtctttgatgttttatttattaattatgtatgtatttatttatttttgaggtagagtctcgccgtttcaccccagctggagtacagtgatgcgatctcagctccctgtagccttgacctctctgggctcaagtgatttttctctcctctacctcccgagtacttgggaccccaggcgcatgccgccatgcctggctaatgtgtatttttttgtagatacggggtctcactgtgttgcccagggtggtttcaaaatcctgggctcaggcgatccttccgtctcagctcccacggtgctgtgttaccggcgtgtgccccagtgcctggccgtcttggaggtcttgtttctctgggtttatgcctcaaggtggcgcctgctccgctgtgctccctggtagcctggtagtgagcctgcttctcacacagtcatacctggttgtggtcccacagtgggaccaccctgttgggttcagaacaggagatgggggcccctcgagtctgtgtgggggctgtagacagggttgggagaccttggctctgtgggggactgtggacaggggatggggggccttggccctgcgtgggatgggttgggggtccgtgcccttcctggccctgggtggacaggtccaggtggcactcggcatagggctgagatgggtgcagagggctgaggcccccaggcctctcccggcttggtttccccagatgagtgttcatttgggtcttccatcagaaaggcccctcctgacctctgggagtggggagctcaagggtgggaggccatagcttggggatgctggaaatgtgtgggatgggcccagggatggcctctggcctactaagggctctggccctgacccacggccactcactcctcagagacgtctcccacaacctgctccgggcgctggacgttgggctcctggcgaacctctcggcgctggcagagctgtgagtgtcccccagtc

SEQ ID NO: 28128 - DNA, 1602 bp, Artificial sequence
  DNA replication origin
ccaggcggtagcagtgcccattgccagagaagatctccgtgtccgaggggcagagcgggtgcaccgctggagaccggtgggaacgagggtgtcaacggtcagtgtgggcccaagacgggggtaccaggctctgccccatctggatggccctggggaggaaggggagtgggcagcagacactcacctcgggccggctcctcgcccagggccacgatgctgtaggcggcctccaggcctgaaccaccgcggttctggatgctgaggtcgaggctctcgtcactctgcaccgaggacgggcacacgagctccagggcggcaggtgccgcttccacctgcacgtctgtccccagcagggctgagccggtccccagggccagcacggccgtcacgtgatagcgcccaggcagcacatagcgatgcgaggcagccggcccagcggcatccacctcgggggagccgtctccgaagtcccagcgtgtggcagtgacagggagcggggcagcgatgtggaaggctgctagctggccggaggccaggggtccgtggggccccaccaggggggcccctggggaggcagggaagacgtgctggaggagggtggggcccctacaggtgggggcaggaggcggcggggggccggagcagagggacaggcaggcgaaggaggcactggagggctgggctgacccacacaggcaccagccctgctcggagagggctgcgaggccctggccggtggagaagcagaaggcgctgcaggcctctggctgaagcaggccttcgtgggcagctgaaaaggacactgctgccacggtgcctgagctgttgtcagggaggcaggcgacatactcctcacctagaagaggcagccactggaccccgggttctgctcctcctggctccaccccacacccccccatccgcccgccgcactcacaggctcccatgctgttcccttggcccggaggccccccccagagaggccttcctgagccctgcccagtgtctgcagggcccaggtcccacctggctgggaaggacagagctgccccacccaccggcactcaccacagccactgtccagcaaggggatgccaagcagaggctggccagccagggagccaggcccagcacacgtggctgcctcgggctgcaccacccgcacctgctgctcctccgcccatcgcggcagccacgccaggccacagtcacactcaaacgggttcccactcaggtttctgcggggcaggggcaggtgttggggaccaggtctggtgggaagggtctatgccagccccccactggcaaccaggccctggagccaccctgacagcaccgcctcccctgccccaaccaagccggcactggggggctccaagcaggtagtgaactgcccccaggatctggtctcaagcctggaaggggacacggaccaactgggagggcagaagggatactgggggcctggggtccagccaggaccccacccaaagaaccacaacttacatttcacttaaattaaataaattagcaaatattccttcttctaacgtagaaatcttgttgttgcttatatccctggaagagaggggggattcggca

SEQ ID NO: 28129 - DNA, 1439 bp, Artificial sequence
  DNA replication origin
cgactacctccacgggctcgtgcggggctgagaggccgtcctgccgtgccagaggcatcaggggtccctacaggtccccactgggcgctcccacgaggaggttctcggcatcctgcactgggcctggggtggcaagtgcacagtgaggcgccgggccagggcccaggacaccaggacgaacagactggggaccgagccgcccgagaacccccccaccagcccctcctcctcagcccaggctccaccgcgggcgctcggcaggcccctaaccacagccagcgtctcaggcccctgcctggcccctcgcacacctccaggccgcagctcgcagacgtagctgtgcggcgctgagcacaggtcggtgttacaccacccggtgggcccgagccggacgcagtgctcggctgtggctgggtgtggctccccgggcagccagttctggcagctctccaggctgaaggcctcgccctgcggcgctgggcccacctccaccccctgcacagtcgagaagccgatccacatgtctaggctcctgggggcgggtgtgggatggcagggggctcagggcactcctccatcctcccaccctcacagcagcccgctgggagccccgtcactgtccccctttccagatggggaaactgaggctcagagcccggagaacagggcccaccagcccaggctcacagcagcacccacccacggggcctgtgggcaccggcagggatccccgtgcaggccacctcccgtatggcgtgcccaggagtgtccggaggctgcccccagctcgcgtccacctctgcatctgcagagctgacaggaacggccccaccggccggcgccacctgctcaccagggccggcccagctcccacctccctcctcctgagactccccagccgcaggctctgccccactgcttcagagatctcccaacctatggcccctcggggggtggggcaggcacctggtgacccgggagaccaggaagcgctgcacggcgggactgtccaccattgccagggtggccccggcccaggcccgacactgctcctgcgcctgcagccaggccgccttctccaccaccaggcggtagcagtgcccattgccagagaagatctccgtgtccgaggggcagagcgggtgcaccgctggagaccggtgggaacgagggtgtcaacggtcagtgtgggcccaagacgggggtaccaggctctgccccatctggatggccctggggaggaaggggagtgggcagcagacactcacctcgggccggctcctcgcccagggccacgatgctgtaggcggcctccaggcctgaaccaccgcggttctggatgctgaggtcgaggctctcgtcactctgcaccgaggacgggcacacgagctccagggcggcaggtgccgcttccacctgcacgtctgtccccagcaggg

SEQ ID NO: 28130 - DNA, 2457 bp, Artificial sequence
  DNA replication origin
cactcctgggcacgccatacgggaggtggcctgcacggggatccctgccggtgcccacaggccccgtgggtgggtgctgctgtgagcctgggctggtgggccctgttctccgggctctgagcctcagtttccccatctggaaagggggacagtgacggggctcccagcgggctgctgtgagggtgggaggatggaggagtgccctgagccccctgccatcccacacccgcccccaggagcctagacatgtggatcggcttctcgactgtgcagggggtggaggtgggcccagcgccgcagggcgaggccttcagcctggagagctgccagaactggctgcccggggagccacacccagccacagccgagcactgcgtccggctcgggcccaccgggtggtgtaacaccgacctgtgctcagcgccgcacagctacgtctgcgagctgcggcctggaggtgtgcgaggggccaggcaggggcctgagacgctggctgtggttaggggcctgccgagcgcccgcggtggagcctgggctgaggaggaggggctggtgggggggttctcgggcggctcggtccccagtctgttcgtcctggtgtcctgggccctggcccggcgcctcactgtgcacttgccaccccaggcccagtgcaggatgccgagaacctcctcgtgggagcgcccagtggggacctgtagggacccctgatgcctctggcacggcaggacggcctctcagccccgcacgagcccgtggaggtagtcggccccccacgttctataacctgccctcctgcctgcccctggaggcctcgcctgccctgcccactgtgggtctcgccaaaaaacttgggggccttaatgttgcttgtgcccagtgaagatggttgggaaaatccagagtgcagagaggaaagcgtttactcacattacccccaggccttttctctgagtgtgggtgagttattcctgaaaggcaggtcaggggtcctgccccccatggacagtttccatcggagtcttcctctcgagcgacaggagccaggcctgtgggggtccgatggctcgctctccttccctcccctcttcctgcgaagttcgggtggggggagtctgggcttcaggctgggatggggtctgtggagctgaggcggccccctgcccaccaggtcatggtattcccgggcctgcgtctgagccgtgaagccttcctcaccacggccgaatttgggacccaggagctccggcggcccgcccagctgcggctgcaggtgtaccggctcctcagcacagcaggtgggactctggggtggtgggcgccgcaggactcggggtggcctctctgagctctcacgtctgctggtcctgtggccatcagagtggttcccagtcttaggtggacagagcaggggttccagagacaccagctcattccaggtgtcctgggggtggatcgggtggggcctgcctggggaccggcctgggtcagtcagctggccggagacagggacgcagcactgggctgggagtgctgcccgggcggggagacctgtcctcacagcaaggccaggctcgctggtgcaggcagttgggcatctctgacggtggcccatgggcgaatcagggccccaacaccctcccctcctcgcagggaccccggagaacggcagcgagcctgagagcaggtccccggacaacaggacccagctggtccccgcgtgcatgccagggggacgctggtgccctggagccaacatctgcttgccgctggacgcctcctgccacccccaggcctgcgccaatggctgcacgtcagggccagggctactcgggtccccctatgcgctatggagagagttcctcttctccgttcccgcggggccccccgcgcagtactcggtgtgtggccctgacctgggtctgttccctgcatctcctcaggccaccttcctgtctgctgcccagggtctgggtctgcgcagcagacacacccagcctgcaggcccctcccacgtccttgccacctctgacctccgacctccgacctccaacctccgacctctgcagtgcctttgcccctctcccagtgggagaagctctcgcctgggcccttggcacgagctgtgcctcctcttcctctctcccagcacagccgctccttcctgtctgtcaggtcttggcctgtgtcctctccccgtgtgtccccctgtctgcaactgtcctgcctgtccttgtcacgagcactgtggggaggctccctgaggtgtggctgacgaagcggggagccctgcgtgtccaccctcatccgtcgtgcaggggtccacgggccatgaccgtgaggacgtgatgcagccctgcctccctctccacaggtcaccctccacggccaggatgtcctcatgctccctggtgacctcgttggcttgcagcacgacgctggccctggcgccctccc

SEQ ID NO: 28131 - DNA, 2320 bp, Artificial sequence
  DNA replication origin
cctcggtgctccaggtggactctggtgccagcgccacggccacggctcgctggcctgggggcagtgtcagcgcccgctttgagaatgcctgccctgccctggtggccaccttcgtgcccagctgcccctgggagaccaatgataccctgttctcagtggtagcactgccgtggctcggtgagggggagcacgtgatggacgttgtggtggaaaacagcgccagccgggccaacctcagcctgcgggtgacggcggaggagcccatctgtggcctccgcgccacgcccagccccgaggcccgtgtactgcagggagtcccagtggtgagtatggccgaggctccaccaccagcccccaggcaggtgcctgcagacagggtgctcacacagggcgtgaggcctggcttcccagtgagggcggcagcccagttactggggacgtcggccccgggcaggtcctgctggctggctcctcaggctacctggtgggctttaaattcctggaaagtcacggctctgacagcggctccgctaactcattccaccgtctcatttcacgaaatgaatttaaaactccgctccctgacctcacacgagtccccgtgagtctctcacgccctctgctgtgttctcgcctggctaaagcaagtggcttttgaggtggagtccgaacccctgatgggaaactgcgggctgcccgcagtgccaccatgctgggtacatgggggacagggctgttccatcttgcgggtacctgccccttcaccaggggccttgggaggggccatcagaaatggcgtgacctgtgcagcctgtcctgggttctgtaagccagtgtaggtgctgtccctgtgaggcccgtgtgcctcccctcactgctccgagctctctggctgaggagctggggcaggagccccgggagggtctgagaagactcagagagaggtggactctttgtagctggtactaggtttgctttacagatggggaaactgaggcacagagaggttgaggcattagtagtactacatggctggctggagagccggacagtcagtgtcccagcccgggcttggctctcatggcatgcagagccccgggcacctcctctcctctgtgccccgcgtgggactctccagcccgacgggaggtgtgtccaggaggcgacaggctaagggcagagtcctccacagagcccaggctgacaccagtccccccgcagaggtacagccccgtggtggaggccggctcggacatggtcttccggtggaccatcaacgacaagcagtccctgaccttccagaacgtggtcttcaatgtcatttatcagagcgcggcggtcttcaagctctcagtaggtgggcgggagtggggaggggaggggatggggcggggcgggggcgggctccaccttcacctctgccttctgctctgcttcatgctgcccgaggacgctgccatggctgtggtgagtggagggagggacgccaagcagggcaggcctctcacctgccacctgggcccactgatgcctgtccctgcagctgacggcctccaaccacgtgagcaacgtcaccgtgaactacaacatcaccgtggagcggatgaacaggatgcagggcctgcgggtctctacagtgccagccgtgctgtcccccaatgccacgctggcactgacggcgggcgtgctggtggactcggccgtggaggtggccttcctgtgagtgactcaggggccggtttggggtgggcaccaggctcttgtccgggcaccaggctcttgtcccggctccagcctcagccgagggaccccacatcagggggttgcttttctgagcctcggtttccctgtctgttgggaggtactgggtgcacaggagccctgaggctgcacgggagccgggagaggcctcagcacagccgggtgggccctgaatggaggcccggggcgtgactgcagagtggagcctcggctgggtcccaagcaccccctgccccgccaccgcgcacctgtgccccgccactgcgcacccctgtcccggttcactcactgcctcccaccgccccggcaggtggacctttggggatggggagcaggccctccaccagttccagcctccgtacaacgagtccttcccggttccagacccctcggtggcccaggtgctggtggagcacaatgtcacccacacctacgctgccccaggtgagggatgagggggtgagggggccactgcctttcaggctctgagcacggggcccccccagtcccccagtcaagctgccccgcttcctccccaacagccctcactgtgacctca

SEQ ID NO: 28132 - DNA, 1438 bp, Artificial sequence
  DNA replication origin
tcacccacacctacgctgccccaggtgagggatgagggggtgagggggccactgcctttcaggctctgagcacggggcccccccagtcccccagtcaagctgccccgcttcctccccaacagccctcactgtgacctcacctgggctgatggcttaggcccctactggggtgagggaggggccaggcgtgggaggagtggacagggaagctgggccccctgaactgccccccaccgcggcctggctcttgctgctctgctgccccgagtgcagctgcacttggaggcggtgccgtcctcaccaggcagccctcagtgctgctgcacctgtgctccgtcccgcacgtggcttgggagcctgggacccttaaggctgggccgcaggtgcagccgttcaccccgggctcctcaggcggggggcttctgccgagcgggtggggagcaggtgggggtgccgcggctgccccacttgggcctgtccccacaggtgagtacgtcctgaccttgctggcatctaatgccttcgagaaccggacgcagcaggtgcctgtgagcgtgtgcgcctccctgccctctgtgagcgtgtgcgcctccctgactggggcctgctggtaccccagagtgggtgtctgttccccagtccctgctttcctcagctggcctgattgggggtctgcccagaggggtcgtctgaggggagggtgtgggagcaggttccatcccggctcagcctcctgacccaggccctggctaagggctgcaggagtctgtgagtcaggcctacgtggcaactgcggtcctcacacccacacatacgtctgttcccacacgcatccccccaggggccctcagtgagcattgcctgcctcctgccagggtccagctgggtccagtacaccagaacgcacaccccagtgtcctctgccctgtgtatgcccttccgccgcccaggttggaaggtggcaaaccggatgagtatcctgggagggggtgagctcaccggcagtggccaggcccctgggaaacctggagtttgggagcagcatcctccacgggtcccccagaccttccagcaggccaaatagacctgtgttggaggtaaccccactcccacgccaggtgctgatccgcagtggccgggtgcccattgtgtccttggagtgtgtgtcctgcaaggcacaggccgtgtacgaagtgagccgcagctcctacgtgtacctggagggccgctgcctcaattgcagcagcggctccaagcgaggggtgagtgttgagcggggtgtgggcgggttggggatgggtcccatggccgaggggacggggcctgcaggcagaagtggggctgacagggcagagggttgcgccccctcaccatcccttctgcctgcagcggtgggctgcacgtacgttcagcaacaagacgctggtgctggatgaga

SEQ ID NO: 28133 - DNA, 2146 bp, Artificial sequence
  DNA replication origin
tgggccggggctccgagtgcaggtagactgccaggtagggctcgggttcctcagacaggtagcggcctggggcagaacgcgcaggtcacacgcctgccgggaagctcaaccacccgggggacacccacgatggccctcctgagcccaccctctgccatgggcctgaaaggccataggagcctctgcaccagagctggcacctgcttctccgtggcccccagctcctctccggccaggcccccagcagcccatgaaacagaaagcaaatttcaccagagacacccatggaagccctacgagaaacgccttccccccaagaacaaggccagggggccgcgtgtgccccaaccgctgcatgcaccgtccagcagcgtatagttgagctgcagatgcagcacggccgcagggttgctgctgtccagggtgaccacagcaccgacggaggcctggggctggaccacaacggagttggcggagctgcggtggccccgggcagcccagtccgagttgttgggcaccttcacggtgaggcgcgctctgaggccagccgctcgatggggatctgggcgccggcctgtgtctggaacgccatcgaggccaccttggtggagacggtgtagttgctgatatagccaaagggaaagggattggagtccaccagaaagatgagctgcaccacgtcactgaggttggccggggccctgctgaaagcctaggggatggagaagtggcagccaggccctggggcgccgccatagcacagcaggctccgcgggtccgagcgcttgccctgggccacgatctcctcacccgccagcgtcaggggctcctcgttgagcacgcgggagcgcgtgacgatgggcgtgagggcagaggtcaggttgtaggcctgggacgccaccatccgcgatggtgactcggctcccagctctgagcgctgtggtgcccgcacgtctgagctggccaggtggatgaggtctcctgcagacaggcgtgaggtcagtgcagagacagggaggcagagggagggtgggggcaggcaaaaagggggagccggagggtggggactgggagaaagggggaacctgagggggcagagagcgaggtgcaggcagaaggaagagggaagctggagagagagtggtggagggggagggggaaggggatggggatgaggacgaagatgagggggatgatggggagagggaggaaaaaggaaggaaaagggtagagaaaagagaaaggggagaagaagaggagcagggtgaaagggaggggaaggggataagggggataagggaggggaagggggataagggaggggaaggaggataagggggataagaaagatgaggggaatggacaaaaggacggggaggatcgggggggaaatggagaaaaggggagagagatggagaaaagggatggtaatagggaagggggagggggaggagaatgggaattgggggagggggataaggatgggaattgggggagggggataaggatgggaattgggggagcgggatgaggatgggaattgggggagggggatgaggatgggaattggggggaggggagggggacgaagatgggatggggcaaaggcgaggcggttgtggggaggagggaggcagaggaaagggcggcatggggcggacgggccacgtggggcgggcgggtggcgtggggcacgggccgcggcacctgtgatgttgaggatgctgtctccgatggcggtgggcgtcacggtgcccgcggtggtctctgcctgcaggatgcgcatcatggcctccagcttgtgcagcgtctgcttcaggcacgagcggcatacgagctccctgctgggcccctgtgtggagccagcagtgtccagccccgctcctggccccactccttgcacacgccctcctctctacacgggtcctcacctggctcccacccccagccctgcagctggagagcccacttgactggacccccacagcctcctcactaagcattttttgtggctctgcatgacccagggcctccacctggggaacacgtgatgcagcccactgaccacacaaggcacctcttcacatgagagaaggaggagggcagaagggagagaggagagggaagtggagaaaaggggggagag

SEQ ID NO: 28134 - DNA, 1435 bp, Artificial sequence
  DNA replication origin
ctacaacctgacctctgccctcacgcccatcgtcacgcgctcccgcgtgctcaacgaggagcccctgacgctggcgggtgaggagatcgtggcccagggcaagcgctcggacccgcggagcctgctgtgctatggcggcgccccagggcctggctgccacttctccatcccctaggctttcagcagggccccggccaacctcagtgacgtggtgcagctcatctttctggtggactccaatccctttccctttggctatatcagcaactacaccgtctccaccaaggtggcctcgatggcgttccagacacaggccggcgcccagatccccatcgagcggctggcctcagagcgcgcctcaccgtgaaggtgcccaacaactcggactgggctgcccggggccaccgcagctccgccaactccgttgtggtccagccccaggcctccgtcggtgctgtggtcaccctggacagcagcaaccctgcggccgtgctgcatctgcagctcaactatacgctgctggacggtgcatgcagcggttggggcacacgcggccccctggccttgttcttggggggaaggcgtttctcgtagggcttccatgggtgtctctggtgaaatttgctttctgtttcatgggctgctgggggcctggccggagaggagctgggggccacggagaagcaggtgccagctctggtgcagaggctcctatggcctttcaggcccatggcagagggtgggctcaggagggccatcgtgggtgtcccccgggtggttgagcttcccggcaggcgtgtgacctgcgcgttctgccccaggccgctacctgtctgaggaacccgagccctacctggcagtctacctgcactcggagccccggcccaatgagcgcaactgctcggctagcaggaggatccgcccagagtccctccagggtgccgaccaccggccctacaccttcttcatttccccggggtgagctctgcgggccggcctggcagggcagggcagggcatcatgggtcagcattgcccgggttacgggccccgtggggacggcaggcagcgaggggactggaccgggtatgggctctgggactccgacatccaacctggcggagcctgggctcacgtccactgccccttcccttcccaggaccagagacccagtggggagttaccgtctgaacctctccagccacttccgctggtcggcgctggaggtgtccgtgggcttgtacacgtccctgtgccagtacttcagcgaggaggacgtggtgtggcggacagaggggctgctgcccctggaggagacctcgccccgccaggccgtctgcctcacccgccacctcaccgccttcggcaccagcctcttcatgcccccaagccatgtacgctttgtgtttcctgtgagtgaccctgtgctcctggga

SEQ ID NO: 28135 - DNA, 1170 bp, Artificial sequence
  DNA replication origin
taagccaccacagccagtttccttttcttctttttaactggaatagttgactttttctttattagctgtgtgtcaggagggtatttttggcctttagtatgtcgtctaagttgctagtgcttttctgagattgtagtttgttttctaattttatttatattttgcgtagaagttgtgtattttagatggagttaggtcggctggtctttgatgttttatttattaattatgtatgtatttatttatttttgaggtagagtctcgccgtttcaccccagctggagtacagtgatgcgatcttagctccctgtagccttgacctctctgggctcaagtgatttttctctcctctacctcccgagtacttgggaccacaggcgcatgccgccatgcctggctaatgtgtatttttttgtagatacggggtctcactgtgttgcccagggtggtttcaaaatcctgggcccaggcgatccttccgtctcagctcccacggtgctgtgttaccggcgtgtgccccagtgcctggccgtcttggaggtcttgtttctctgggtttatgcctcaaggtggcgcctgctcccctgtgctccctggtagcctggtagtgagcctgcttctcacacagtcatacctggttgtggtcccacagtgggaccaccctgttgggttcagaacaggagatgggggcccctcgagtctgtgtgggggctgtggacagggttgggagaccttggctctgtgggggactgtggacaggggatggggggccttggccctgcgtgggatgggttgggggtccgtgcccttcctggccctgggtggacaggtccaggtggcactcggcatagggctgagatgggtgcagagggctgaggcccccaggcctctcctggcttggtttccccagatgagtgttcatttgggtcttccatcagaaaggcccctcctgacctctgggagtggggagctcaagggtgggaggccttagcttggggatgctggaaatgtgtgggatgggcccagggatggcctctggcctactaagggctctggccctgacccacggccactcactcctcagagacgtctcccacaacctgctccgggcgctggacgttgggctcctggcgaacctctcggcactggcagagctgtgagtgtccccca

SEQ ID NO: 28136 - DNA, 1510 bp, Artificial sequence
  DNA replication origin
cagtgtgggcccaagacgggggtaccaggctctgccccatctggatggccctggggaggaaggggagtgggcagcagacactcacctcgggccggctcctcgcccagggccacgatgctgtaggcggcctccaggcctgaaccaacacggttctggatgctgaggtcgaggctctcgtcactctgcaccgaggacgggcacacgagctccagggcggcaggtgccgcttccacctgcacgtctgtccccagcagggctgagccggcccccagggccagcacggccgtcacgtgatagcgcccaggcagcacatagcgatgcgaggcagccggcccagcggcatccacctcgggggagccgtctccgaagtcccagcgtgtggcagtgacagggagcggggcagcgatgtggaaggctgctagctggccggaggccaggggtccgtggggccccaccagggtggcccctggggaggcagggaagacgtgctggaggagggtggggcccctacaggtgggggcaggaggcggcggggggccggagcagagggacaggcaggcgaaggaggcactggagggctgggctgacccacacaggcaccagccctgctcggagagggctgcgaggccctggccggtggagaagcagaaggcgctgcaggcctctggctgaagcaggccttcgtgggcagctgaaaaggacactgctgccacggtgcctgagctgttgtcagggaggcaggcgacatactcctcacctagaagaggcagccactggaccccgggttctgctcctcctggctccaccccacacccccccatccgcccgccgcactcacaggctcccatgctgttcccttggcccggaggccccccccagagaggccttcctgagccctgcccagtgtctgcagggcccaggtcccacctggctgggaaggacagagctgccccacccaccggcactcaccacagccactgtccagcaaggggatgccaagcagaggctggccagccagggagccaggcccagcacacgtggctgcctcgggctgcaccacccgcacctgctgctcctccgcccatcgcggcagccacgccaggccacagtcacactcaaacgggttcccactcaggtttctgcggggcaggggcaggtgttggggaccaggtctggtgggaagggtctatgccagccccccactggcaaccaggccctggagccaccctgacagcaccgcctcccctgccccaaccaagccggcactggggggctccaagcaggtagtgaactgcccccaggatctggtctcaagcctggaaggggacacggaccaactgggagggcagaagggatactgggggcctggggtccagccaggaccccacccaaagaaccacaacttacatttcacttaaattaaataaattagcaaatattccttcttctaacgtagaaatcttgttgttgcttatatccctggaagagaggggggattcggcaaagctga

SEQ ID NO: 28137 - DNA, 2423 bp, Artificial sequence
  DNA replication origin
tgcacggggatccctgccagtgcccacaggcctcgtgggtgggtgctgctgtgagcctgggctggtgggccctgctctccgggctctgagcctcagtttccccatctggaaagggggacagtgacggggctcccagtgggctgctgtgagggtgggaggatggaggagtgccctgagccccctgccatcccacacccgcccccaggagcctagacatgtggatcggcttctcgactgtgcagggggtggaggtgggcccagcgccgcagggcgaggccttcagcctggagagctgccagaactggctgcccggggagccacacccagccacagccgagcactgcgtccggctcgggcccaccgggtggtgtaacaccgacctgtgctcagcgctgcacagctacgtctgcgagctgcggcctggaggtgtgcgaggggccaggcaggggcctgagacgctggctgtggttaggggcctgccgagcgcccgcggtggagcctgggctgaggaggaggggctggtgggggggttctcgggcggctcggtccccagtctgttcgtcctggtgtcctgggccctggcccggcgcctcactgtgcacttgccaccccaggcccagtgcaggatgccgagaacctcctcgtgggagcgcccagtggggacctgcagggacccctgatgcctctggcacggcagtacggcctctcagccccgcatgagcccgtggaggtagtcggccccccacgttctaaaacctgccctcctgcctgcccctggaggcctcgcctgccctgcccactgtgggtctccccaaaaaacttgggggccttaatgttgcttgtgcccagtgaagatggttgggaaaatccagagtgcagagaggaaagcgtttactcacattacccccttttctctgagtgtgggtgagttattcctgaaaggcaggtcaggggtcctgccccccatggacagtttccatcggagtcttcctctcgagcgacaggagccaggcctgtgggggtccgatggctcgctctccttccctcccctcttcctgcgaagttcgggtggggggagtctgggcttcaggctgggatggggtctgtggagctgaggcggccccctgcccaccaggtcatggtattcccgggcctgcgtctgagccgtgaagccttcctcaccacggccgaatttgggacccaggagctccggcggcccgcccagctgcggctgcaggtgtaccggctcctcagcacagcaggtgggactctggggtggtgggcgccgcaggactcggggtggcctctctgagctctcacgtctgctggtcctgtggccatcagagtggttcccagtcttaggtggacagagcaggggttccagagacaccagctcattccaggtgtcctgggggtggatcgggtggggcctgcctggggaccggcctgggtcagtcagctggccggagacagggacgcagcactgggctgggagtgctgcccgggcggggagacctgtcctcacagcaaggccaggctcgctggtgcaggcagttgggcatctctgacggtggcccgtgggcgaatgagggccccaacaccctcccctcctcgcagggaccccggagaacggcagcgagcctgagagcaggtccccggacaacaggacccagctggcccccgcgtgcatgccagggggacgctggtgccctggagccaacatctgcttgccgctggacgcctcctgccaccccaggcctgcgccaatggctgcacgtcaggggccagggctactcggggccccctatgcgctatggagagagttcctcttctccgttcccgcggggccccccgcgcagtactcggtgtgtggccctgacctgggtctgttccctgcatctcctcaggccaccttcctgtctgctgcccagggtctgggtctgcgcagcagacacacccagcctgcaggcccctcccacgtccttgccacctctgacctccgacctccgacctccaacctccgacctctgcagtgcccttgcccctctcccagtgggagaagctctcgcctgggcccttggcacgagctgtgcctcctcttcctctctcccagcacagccgctccttcctgtctgccaggtcttggcctgtgtcctctccccgtgtgtccccctgtctgcaactgtcctgcctgtccttgtcacgagcactgtggggaggctccctgaggtgtggctgacgaagcggggagccctgcgtgtccaccctcatccgtcgtgcaggggtccacgggccatgaccgtgaggacgtgatgcagccctgcctccctctccacaggtcaccctccacggccaggatgtcctcatgctccctggtgacctcgttggcttgcagcacgacgctggccctggcgccctcccgc

SEQ ID NO: 28138 - DNA, 2036 bp, Artificial sequence
  DNA replication origin
aggcccgtgtactgcagggagtcccagtggtgagtatggccgaggctccaccaccagcccccaggcaggtgcctgcagacagggtgctcacacagggcgtgaggcctggcttcccagtgagggcagcagcccagttactggggacgtcggccccgggcaggtcctgctggctggctcctcaggctacctggtgggctttaaattcctggaaagtcacggctctgacagcggctccgctaactcattccaccgtctcatttcatgaaatgaatttaaaactctgctccctgacctcacacgagcccccgtgagtctctcacgccctctgctgtgttctcacctggctaaagcgagtggcttttgaggtggagtctgaacccctgatgggaaactgcgggctgcccgcggtgccaccatgctgggtacatgggggacagggctgtctccgtcttgcgggtacctgccccttcaccaggggccttgggaggggccatcagaaatggcgtgacctgtgcagcctgtcctgggttctgtaagccagtgtaggtgctgtccctgtgaggcccgtgtgcctcccctcactgctccgagctctctggctgaggagctggggcaggagccccgggagggtctgagaagactcagagagaggtggactctttgtagctggtactaggtttgctttacagatggggaaactgaggcacagagaggttgaggcattagtagtactacatggctggctggagagccggacagtcagtgtcccagcccgggcttggctcccatggcatgcagagccccggccacctcctctcctctgtgccccgcgtgggactctccagcctgacgggaggtgtgtccaggaggcgacaggctaagggcagagtcctccacagagcccaggctgacaccagtccccccgcagaggtacagccccgtggtggaggccggctcggacatggtcttccggtggaccatcaacgacaagcagtccctgaccttccagaacgtggtcttcaatgtcatttatcagagcgcggcggtcttcaagctctcagtaggtgggcgggggtggggaggggaggggatggggtggggcggggcgggctccaccttcacctctgcttcatgctgcccgaggacgctgccatggctgtgggtgagtggagggagggacgctaagcagggccaggcctctcacctgccacctgggcccactgatgcctatccctgcagctgacggcctccaaccacgtgagcaacgtcaccgtgaactacaacatcaccgtggagcggatgaacaggatgcagggcctgcgggtctccacagtgccggccgtgctgtcccccaatgccacgctggcactgacggcgggcgtgctggtggactcggccgtggaggtggccttcctgtgagtgactcgggggccggtttggggtgggcaccaggctcttgtcccggccccagcctcagccgagggaccccacatcagggggttgcttttctgagcctcggtttccctatctgttgggaggtactgggtgcacaggagccctgaggctgcacgggagccgggagaggcctcagcacagccgggtgggccctgaatggaggcctggggcgtgactgcagagtggagcctcagctgggtcccaagcaccccctgcccccccaccgcgcacctgtgccccgccactgcgcacccctgtcccggttcactcactgcctcccaccgccccggcaggtggacctttggggatggggagcaggccctccaccagttccagcctccgtacaacgagtccttcccggttccagacccctcggtggcccaggtgctggtggagcacaatgtcacgcacacctacgctgccccaggtgagggatgagggggtgagggggccactgcctttcaggctctgagcacggggcacccccagtcccccagtcaagctgccccccttcctccccaacagccctcactgtgacctcacctgggctgatggcttaggtccctactggggtgagggag

SEQ ID NO: 28139 - DNA, 2351 bp, Artificial sequence
  DNA replication origin
atctgctgccctcgcctgggggtgttctttacacgtgggacttcggggacggctcccctgtcctgacccagagccagccggctgccaaccacacctatccctcgaggggcatctaccacgtgcgcctggaggtcaacaacacggtgagcggtgcggcggcccaggcggatgtgcgcgtctttgaggagctccgcgggctcagcgtggacatgagcctggccgtggagcagggcgcccccgtggtggtcagtgccgcggtgcagacgggcgacaacatcacgtggaccttcgacatgggggacggcaccgtgctgtcgggcccagaggccacagtggagcatgtgtacctgcgggcacagaactgcacagtgaccgtgggtgcggccagccccgccggccacctggcccggagcctgcacgtgctggtcttcgtcctggaggtgctgcgcgtcgagcccgccgcctgcatccccactcagcctgacgcgcggctcacggcctacgtcaccgggaacccggcccgctacctcttcgactggacctttggggatggctcctccaacacgaccatgcgggggtgcccgacggtgacacacaacttcacgcgtagcggcacgttccccctggcgctggtgctgtccagccgcgtgaacagggcgcgttacttcaccagcatctgcgtggagccagaggtgggcaacgtcaccctgcagccagagaggcagtttgtgcagctcggggacgaggcccggctggtggcatgtgcctggcccccgttcccctaccgctacacctgggactttggcaccgaagaagccgtccccgcccgtgtcgggggccctgaggtgacgttcatctaccgagacccaggctcctatcttgtgacagtcaccgcgtccaacaacatctccgctgccaatgactcagccctggtggaggtgcaggagcccgtgctggtcaccagcatcaaggtcaatggctcccttgggctggagctgcagtagccgtacctgttctctgctgtgggccgtgggcgccccgccagctacctgtgggatctgggggacggtgggcggctcgagggtccggaggtcacccacgcttacaacagcacaggtgacttcaccgttagggtggccggctgcaatgaggtgagccgcagcgaggcctggctcaatgtgacggtgaagcggcgcgtgcgggggctcatcgtcaatgccagctgcacggtggtgcccctgaatgggagcatgagcttcagcacctcgctggaggccggcagtgatgtgcgctattcctgggtgctctgtgaccgctgcacgcccatctctgggggtcctgccatctctttacaccttccgctccgtgggcaccttcaatatcatcgtcacagctgagaacgaggtgggctccgcccaggacagcatcttcgtctatgtcctgcagctcatagaggggctgcaggtggtgggcggtggccgctacttccccaccaaccacacggtacagctgcaggccgtggtcagggatggcaccaacatctacagctggactgcctggagggacaggggcccggccctggccggcagcggcaaaggcttctcgctcactgcgctcgaggccggcacctaccatgtgcagctgcgggccaccaacatgctgggcagcgcctgggctgactgcaccgtggacttcgtggagcctgtggggtggctgatggtggccgcctccccgaacccagctgccgtcaacacaagtgtcaccctcagtgccgagctggctggtggcagtggtgtcgtatacacttggtccttggaggaggggctgagctgggagacccccgagccatttaccacccacagcttccccacacccggcctgcacttggtcaccatgacggcagggaacccgctgggctcagccaacgccaccgtggaagtggatgtgcaggtgcctgtgagtggcctcagcatcagggccagcgagccgggaggcagcttcgtggcggccgggtcctctgtgcccttttgggggcagctggccacgggcaccaatgtgagctggtgctgggctgtgcccggcggcagcagcaagcgtggccctcatgtcaccatggtcttcccggatgctggcaccttcaacatccggctcaatgcctccaacgcagtcagctgggtctcagccacgtacaacctcacggtggaggagcccatcgtgggcctggtgctgtgggccagcagcaaggtggtggcgcccgggcagcttgtccattttcagatcctgctggctgccggctcagctgtcaccttccgcctgcaggtcggcggggccagccccgaagtgctccctgg

SEQ ID NO: 28140 - DNA, 2384 bp, Artificial sequence
  DNA replication origin
ggtcctgcaccaccacggccaggcccacctcgaagtgtggcctgaaacccgggggcagcacggctccgtagccggagaggctgctcttgtagacacagaactctttgcagtggccctggcaacagcgctgcagcagcagggcatacaccagcggggcgccagcatcctccgcgtcatgccagcctgagggatggtccccacagcatcacgggagggctccgtgacctcacagagtcgggggatcccgctgctccccctacgcaggcctgcactcacccgtgcatttgaagtgcaccttggtggtgagggcgtgcacagcgcccagtgggaagaggcagcaagagccccccagcggcgggcggttgggggacagggggatggaggcgcagccctcctcctcgccagagcggcccagcaccgtcagcgtgaaggtgtatccctcgccgtcccgcagcacgccccgccgcagcaccagtcacatgcctgcgctgcccgtggatgtggtggtctcatccagcaccagcgtcttgttgctgaacgtacgtgcagcccaccgctgcaggcagaagggatggtgagggggcgcaaccctctgccctgtcagccccacttctgcctgcaggccccgtcccctcggccatgggacccatccccaacccgcccacaccccgctcaacactcacccctcgcttggagccgctgctgcaattgaggcagcggccctccaggtacacgtaggagctgcggctcacttcgtacacggcctgtgccttgcaggacacacactccaaggacacaatgggcacccggccactgcggatcagcacctggcgtgggagtggggttacctccaacacaggtctatttggcctgctggaaggtctgggggacccgtggaggatgctgctcccaaactccaggtttcccaggggcctggccactgccggtgagctcaccccctcccaggatactcatccggtttgccaccttccaacctgggcggcggaagggcatacacagggcagaggacactggggtgtgtgttctggtgtactggagccagctggaccctggcaggaggcaggcaatgctcactgagggcccctggggggatgcgtgtgggaacagacgtatgtgggggtgtgaggaccgcagttgccacgtaggcctgactcacagactcctgcagcccttagccagggcctgggtcaggaggctgagccgggatggaacctgctcccacaccctcccctcagacgacccctctgggcagacccccaatcaggcccgttgaggaaagcagggactggggaacagacacccactctggggcaccagcaggccccgcctgacagcagcaggagcagccaccacgggctcagggtcaccaagcctcctggccggtccagagtggggagcatgagggtgagaaccggcccaccacatccagcaacagggacatgggctggggacagtggctgcctctggggtgggaaggggctcttcctcactgttggtattgctgggggactgtgtagcttttgtcactagagcatatgtggcttgaagactgtatgtggaactgtggcaggtttggaaggaagcaaagctgaagcaggctgtcgtgttacatagaatttgcatcagaaacagagaggggagagcgcgcggcctccaccagcactaaaacacggaaaacagtagatgagcagggaggctgggctgtccaaggcaagtggccgaggggcgggcggcacccaccgtctggttggtggcctcctccttgtggccggccttccacacggtgaggctgaaggtgtactccacgccagctgccagccgttcccgtggaatggtgaccgtgctgctcccgcggggcccaaagttcagcgcacacccgccagcctccctctgcaggccgagaacaaggggcgacgtggcccgagaaccccatccagttttaaagcagagcccggcccaggagacagcgcgggagaccccctccccatgctgggacggggcccaccaggcactgaggacgggccagccctggtggcaagctgggtgttctctgggctcatgggtgtggacgggtgaggggcagggaggacggccctgccacgcactgacctgtgtcgaagccacacaggcccactggaaactgagcggcgtctggtcgccgtcctccaggttggggtcgtaggactcgctcccatccagcaccaggtcctgtgtgtctgaccacacgcggtaggagccaccctcagtgatgggcaccaggcgctcgggggccaccgtcacattggcctggatgctccgtgccagtggcgtgtccccaaatgacacgacaaacacaaagcagtagtgccccacaggcagcgcca

SEQ ID NO: 28141 - DNA, 1131 bp, Artificial sequence
  DNA replication origin
aaaggggagggaagggggaggggaggggagagtggagggcacagagcagcatcttcttagtccctccccacatctgggcccctctttacaccctgggtcccccgagaggcaccctgcgttcacacaggacagcagaaaggctgaggctactgaagcaggtcagagaccgaggaacgccacggcaggaaggagcccaggctggaggctcagctcctcggccaagctgcccgtctgccctggggggctgaacccagtaccctggcaggcatgcggggcggggtgagcatgtggggccatcctaccatgcactgggccagcgcagcagcgatctgctggatgtcatccacagtgtggaccctcagggacaccagagtctccgtgatgttcttgcgtatctgggctcggcgctgccgctcgtgcttgggctctgccgccacgtccagggcccgctcgtactggggcaggcagggggcacagcaagctgtcagcagggcaggaggccggcaggaggccagcagatgcccacgactcccggggtgcagttacgtgctagatgctgtgtgatgtgggcactgacccgcaacactgagctgtttcttcatgggcaaaacagggtaagcacatgggccctcctgggcgggggctgcattgtggaaagcagacgccggagagggcccggtgggtgtggctgctgggagcggaacgtcggggtgctgcttcagggtcactgggatttatctctggggcccgggatgagccctccgcaaagctccaggcaggggaacaggtcttggtccccagcacgcatgcagcagatgtgaggtcccctcccaggctgcactcacctcgttcagcacagtgaccagggccagcgagtactcgatgacgtgctggggatcggcctgccgcagcagccccgggagcacactagcggtgagccggtgcagccagactgtgagccccattgcgctgccgttgggctctgggagggtgatggccagagacctacgagcagaggggggtggtgagcaggtggcagtctcgggggcgccctcccacggcctggctcacctgttgagggcgaccacagcggctcccagctggtcctgcaccaccacggccaggcccacc

SEQ ID NO: 28142 - DNA, 1085 bp, Artificial sequence
  DNA replication origin
tagttgagctgcagatgcagcacggccacagggttgctgctgtccagggtgaccacagcaccgacggaggcctggggctggaccacaacggagttggcggagctgcagtggccccgggcagcccagtccgagttgttgggcaccttcacggtgatggcgcgctctgaggccagccgctcgatggggatctgggcgccggcctgtgtctggaacgccatcgaggccaccttggtggagacggtgtagttgctgatatagccaaagagaaagggattggagtccaccagaaagacgagctgcaccacgtcactgaggttggccggggccctgctgaaagcctaggggatggagaggtggcagccaggccctggggcgccgccatagcacagcaggctccgcgggtccgagcgcttgccctgggccatgatctcctcgcccgccagcgtcacgggctcctcgttgagcacgcgggagcgcgtgaggatgcgcatgagggcagaggtcaggttgtaggcctgggacgccaccatccgcaatggtgactcggctcccagctctgagcgctgcggtgcccgcacgtctgagctggccaggtggatgaggtctcctgcagacaggcgtgaggtcagtgcagagacagggaggcagagggagggtgggggcaggcaaaaagggggagctggagggtgggggctgggagaaagggggaacctgagggggcagagagcgaggtgcaggcagaaggaagggggaagctggagagagagtggtggagggggagggggaaggggatggggatgaggacgaagatgagggggatgatggggagagggaggaaaaaggaaggaaaagggtagagaaaagagaaaggggagaagaggaggagcagggggaaagggaggggaagggggataagggggataagggaggggaaggaggataagggaggggaaggaggataagggggataagaaagatgaggggaatggacaaaaggacggggaggatcgggggggaaatggagaaaaggggagagagatggagaaaggggagggaagggggaggggaggggagagtggagggca

SEQ ID NO: 28143 - DNA, 1470 bp, Artificial sequence
  DNA replication origin
acgcgctcccgcgtgctcaacgaggagcccgtgacgctggcgggcgaggagatcatggcccagggcaagcgctcggacccgcggagcctgctgtgctatggcggcgccccagggcctggctgccacctctccatcccctaggctttcagcagggccccggccaacctcagtgacgtggtgcagctcgtctttctggtggactccaatccctttctctttggctatatcagcaactacaccgtctccaccaaggtggcctcgatggcgttccagacacaggccggcgcccagatccccatcgagcggctggcctcagagcgcgccatcaccgtgaaggtgcccaacaactcggactgggctgcccggggccactgcagctccgccaactccgttgtggtccagccccaggcctccgtcggtgctgtggtcaccctggacagcagcaaccctgtggccgtgctgcatctgcagctcaactatacgctgctggacggtgtgtgcagcgggtggggcacacgcggccccctggccttgttcttggggggaaggcgtttctcgtagggcttccatgggtgtctctggtgaaatttgctgtttcatgggctgttgggggcctggccggagaggagctgggggccacggagaagcaggtgccagctctggtgcagaggctcctatggcctttcaggcccgtggcagagggtgggctcaggagggccatcgtgggtgtcccccgggtggttgagcttcccggcaggcgtgtgacctgcgcgttctgccccaggccgctacctgtctgaggaacccgagccctacctggcagtctacctgcactcggagccccggcccaatgagcgcaactgctcggctagcaggaggatccgcccagagtccctccagggtgccgaccaccggccctacaccttcttcatttccccggggtgagctctgtgggccggcctggcagggcagggcagggcatcatgggtcagcattgcccgggttacgggccccgtggggacggcaggcagcgaggggactggaccgggtatgggctctgggactccgacatccaacctggcggagcctgggctcacgtccactgccccttcccttcccaggaccagagacccagtggggagttaccgtctgaacctctccagccacttccgctggtcggcgctggaggtgtccgtgggcttgtacacgtccctgtgccagtacttcagcgaggaggatgtggtgtggcggacagaggggctgctgcccctggaggagacctcgccccgccaggccgtctgcctcacccgccacctcaccgccttcggcaccagcctcttcatgcccccaagccatgtacgctttgtgtttcctgtgagtgaccctgtgctcctgggagcctctgcagagtcgaggagggcctgggtgggctcggctctatcctgagaaggcacagcttgcacgtgacct

SEQ ID NO: 28144 - DNA, 990 bp, Artificial sequence
  DNA replication origin
agaatacagcattttagctggtgatgagaaagagctgcggaagatctaagaagcagctcctaggccaggtgcggtggctcatgcctgtaatcccagcactttgggaggccgaggtgggcagatcacttgagcccaggagtttgagaccagactgtgcaacgtggcaaaacctccatctctgcaaaaaatacaaaaaattagctgggcacagtggcatgcactcactgcacacagtggtatccagctcctcaggaggctagggtgggaggatcacttgagcccaggaggttgaggctgcagtgagccacgatcacactactgcactccagcctgggtgacagaatgagaccctgtctcaaaaagaaagagagagagaggggaaagaaggaggaggaggaggaagggaggcaggggaggggagggagggagggagagagagagagggagaggagagagaaagaaagaggatggatggaaggaaggaaggaagaaagggagggagggaggggaagaaagcatcccatgcacaggaaataataaggtcaaaatcctagagtgcaaaatgagggcagcagccccatggcattcttaggtcactggtccttccttttgcctggagaaaatggtgaacagtgaggctgagaagtgggcaggggccagatggttgtgggatctcttgagccatgttaaggattttggtcttcatcctcaagggaatgggaccgctgcagtgtgttatgcagggaactgtcaccattacatgtatgctcccgggtagaggcaaagggaagggaataagagacagagcagaagctaagcagcgtctgtggtcaccaggtgaaagcagggggtggcagtgggagtggagagaagtggacagagctgacagatgctttagaggcaaaactgacacacttggtgacaggttcaaagtgaggagtaagtaacgagtccaagaagatacccctcaactaggcacttctggccccc

SEQ ID NO: 28145 - DNA, 915 bp, Artificial sequence
  DNA replication origin
tgaggagcccctctgcccggccgcccagtctgggaagtgaggagcgcctcttcccggccgccgtcctgtctaggaagtgaggagcgtctctgcccggccacccatcatctgagatggggggagtgcctctgccccgctgccccatctgggatgtgaggagcgcttctgcccagccgcgaccccgtctgggatctgaggagtgtctctgcctgactgccaccccgtctgggaggtgaggagtgtctctgcccggccgccccgtctgggaagtgaggagcgtctccgcctggcagccgccccgtccaggaggtggggggcagcccccgctcggccagccgccctgtccgggagggaggtgggggcagcccccgcccggccagctgccccatccgggaggtggggggcgcctctgccccccgccccgtctgggaagtgaggagcccctctgcccggccgccaccccatctgggaggtgtacccagcagctcattgggaacgggccatggtgacgacggcggttttgtcaagtagaaaagggagaaatgtggggaaaagaaagagagatcagattgttgctgtgtctgtgtagaaagaagtagacataggagactccacttcgttctgtactaagaaaaattcttctgccttgggacgctgttaatctgtaaccttatccccaaccccgtgctctctgaaacatgtgctgtgtccactcagggttaaatggattaagggcggtgcaagatgtgctttgttaaacagatgcttgaaggcagcatgctccttaagagtcatcaccactccctaatctcaagtacccagggacacaaacactgcagaaagccacagggccctctgcctaggaaaaccagagacccttgttcacatgtttatctgctgaccttccctccacta

SEQ ID NO: 28146 - DNA, 1216 bp, Artificial sequence
  DNA replication origin
gcacatcttgcaccgcccttaatccatttaaccctgagtggacacagcacatgtttcagagagcacggggttggggataaggttacagattaacagcgtcccaaggcagaagaatttttcttagtacagaacgaagtggagtctcctatgtctacttctttctacacagacacagcaacaatctgatctctctttcttttccccacatttctcccttttctacttgacaaaaccgccgtcgtcaccatggcccgttcccaatgagctgctgggtacacctcccagatggggtggcggccgggcagaggggctcctcacttcccagacggggcggggggcagaggcgccccccacctcccggatggggcagctggccgggcgggggctgcccccacctccctcccggacagggcggctggccgagcgggggctgccccccacctcctggacggggcggctgccaggcggagacgctcctcacttcccagacggggcggccgggcagagacactcctcacctcccagacggggtggcagtcaggcagagacactcctcagatcccagacggggtcgcggctgggcagaagcgctcctcacatcccagatggggcagcggggcagaggcactccccccatctcagatgatgggtggccgggcagagacgctcctcacttcctagacaggacggcggccgggaagaggcgctcctcacttcccagactgggcggccgggcagaggggctcctcacatcccagacgatgggtggccaggcagagacactcttcactttccagacggggtggcggctgggcagaggctgcaatctcggcactttgggaggccaaggcaggcggctgggaggtggaggttgtagtgagccgagatcacgccactgcactccagcctgggcaacactgagcactgagtgagcgagactccatctgcagtgccagcaccttgggaggcccaggcgggcagatcactcgcggtcaggagctggagaccagcctggccaacatggcgaaaccccgtctccaccaaaaaatacaaaaaccagtcaggtgtggcagtgtgcgcctgcaatcccaggcactcagcaggctgaggcaggagaatcaggcagggaggttgcagtgagccgagatggtggcagtacagtccagccttggcttggcatcagagggagaccgtggaaagtgggagacggagacgg

SEQ ID NO: 28147 - DNA, 923 bp, Artificial sequence
  DNA replication origin
tggcggctgggcagaggctgcaatctcggcactttgggaggccaaggcaggcggctgggaggtggaggttgtagtgagccgagatcacgccactgcactccagcctgggcaacactgagcactgagtgagcgagactccatctgcagtgccagcaccttgggaggcccaggcgggcagatcactcgcggtcaggagctggagaccagcctggccaacatggcgaaaccccgtctccaccaaaaaatacaaaaaccagtcaggtgtggcagtgtgcgcctgcaatcccaggcactcagcaggctgaggcaggagaatcaggcagggaggttgcagtgagccgagatggtggcagtacagtccagccttggcttggcatcagagggagaccgtggaaagtgggagacggagacgggagagggagacgggagggggagggggagggggagggcagggggagggggagggagaggggccctgttttatagctagtcttcaatttggtctggtgtctgagccccacctctggagttgagtcctgcctcctacctctaaggcatgttggtggatgcagggtagtgggcagaatagaatcatgtagaccccttagaaggttgttgtaatctagggcagtggttctcaattttaaccatgcatgagcatttcatgcaggggttgttaaaactcagcctcctgcccctggagtctacgtctggagtctgcatctctgactagctcccaggtgatgccagtgctgctggtcctggaccacattttgagtagctaaaagctaggagagagataatggggacttgcagtaaggtggtacccctgctgaggttaggaagagctctggtctgggatgcattttgaagtgaaactatcaatctcatttcagttcccttttaatctgcttacaccaagg

SEQ ID NO: 28148 - DNA, 932 bp, Artificial sequence
  DNA replication origin
aggatgacagggaaaagcaaagaaaggcagagtgaaagaaacaggaacagtaagagagggaggggtgttggcggggtgctgtggctcacacctgtaatcccagcactttgggaggatgagacgggtggatcacgaggtcaggagttcgagatcagcctggccaacatagggaaaccccatctctattaaaaatacaaaaattagctgggcatggtggcagatgcctgtagtctcagctactcgggaggctgaggcaggagaatcgcttgaacccaggaggcggaggttgtggtgagccgagatcacgccactgcactccagcctgggcaacagagtgagactctgtctcaaaaaaaaaaaaaaaaaagatggaggggtggagggagagaaagagaggaagagagagaggaggaggggagagagggggtagagggggagaaagagagggaggaagagaagcagagagagggggagagaggggtagagagacggagagggagaggaggaggatagaggaagagaaggagagaaagaagagagagagatgaagagagaagcaagagaagataaagggagagggaggaggtagagaagaggggagaggaagaggggagagagaaagaggaaaggagagacagaatgactgatacaggggtataggggtacaggagaggctggcaggtgatgtagccagtgatatggggagtagaaccgcaaagggcttgtgaagaagaaagaaaaattaggagaaaggccattggggcaggtggaagggaggaggactaggacacagagaagacttttcgtggcattcgtggctctgtttgttatgacaggggcagaaatacagactcagacacccacggcggcccattagtccccactgccccgccgctctgccagacggccgccccttctaggtctgttgcctc

SEQ ID NO: 28149 - DNA, 1297 bp, Artificial sequence
  DNA replication origin
ccgagcgggagcccgagcggcagccggcggccgcgggagctgcggggagcgcgggggcggcccggagcgtgccggggtccccgcgcctcgctcgccggccgcgctccgaagatggtggcggcgccgtgcgcccggaggctggcccggcgctcgcactcggcgctgctcgcggcgctcacggtgctgctgctgcagacgctggtcgtgtggaatttcagcagcctcgactccggggccggggagcgccgcgggggcgcagcggtcggcggcggggagcagccgcccccggccccggccccgcgccgggagcgccgggacctgcccgccgagccggctgcagcccgaggaggaggaggaggcggcggcggaggaggaggaggacgggggccccaggcgcgggcgcggggaggcggccccggagaaccgcggggacagcagccggccagccggggggcactgcccgcccgggctctggtaagatgccctttcggctcgcgccccgcggcgagggagggaggaaggcagcccgaccccacgcccccctagcccttgaactcggtcatcagactgggactctgcaagcctaccgactccacatcgcctcttgccccgggaagccgggtggggtccctgccaaggctcaggggtcgtgggctgcccctttcagagtctgagcacggaccccttggggtctgggggaagttttctccagcgggggcgctttgggggttaccggagcctggctgggttcctgttccccatcactcttgctggggaccccaggtgacttgctccgtgcgtgtaggtcttggtgactcgctccctgcctgagtgagtggatctccccggatcctcagccgctgttcctgggcggttgtcgcagcagcatctctctggtttttgccgagctgggtgcagacagttgagccctctgttcgtcctggcctgcgatgagggctgagctgggcgtcccaagtccccgaccatgcccctgaatcaatactcagtccggggtgtctggtcttactttgggtcttctgtttctcttctctggatgtttgagccttccgtcttcaccttctctgtctctaaccttgccgtctcccatgccctctgtgactttatctcctccccatctccagtttcagggcatggctccttctcctagctggttgtctctgtctttctgtcttgttgcggccggttcaggtcaccagctgtgtgtccgaccacaccgtcagggcttccactcctatgggattactttgcccttcgtgggtgtgaacagtcagggctc

SEQ ID NO: 28150 - DNA, 1961 bp, Artificial sequence
  DNA replication origin
ccccgcggttctccggggccgcctccccgcgcccgcgcctggggcccccgtcctcctcctcctccgccgccgcctcctcctcctcctcgggctgcagccggctcggcgggcaggtcccggcgctcccggcgcggggccggggccgggggcggctgctccccgccgccgaccgctgcgcccccgcggcgctccccggccccggagtcgaggctgctgaaattccacacgaccagcgtctgcagcagcagcaccgtgagcgccgcgagcagcgccgagtgcgagcgccgggccagcctccgggcgcacggcgccgccaccatcttcggagcgcggccggcgagcgaggcgcggggaccccggcacgctccgggccgcccccgcgctccccgcagctcccgcggccgccggctgccgctcgggctcccgctcgggccgccgccgccgcccccctccccacacccctgtccccgctggaggggagggtgatggggaaggcgccggggggacgcgggccgaggcggagagggcggggcctgggggaggagccgagggaggaaaaggaggagggaaaggaagggggtgggggcgatcagagaagacagacacccctcaggacgtagtgggagtaggatggggggcgagggggacaattcccaaggcggaaaaagagaggcaggggccgcgaaacaggggacctttggttgagggtgggcccgctcagaatccaggggaggtcaggaagagagggggtcccgaggtcctgttttccctgtgggccgctggaaggaggcagtgcgtggaggaagctcctagccccggagttcgcggtccagggatcttctgtcggtaccagaccggttggcaggtggacacgtgagaaacatttcaggagtgtcagagccacagtctgatcccttcatcctgggcttgaaggggtggggaggaggctttgggtgagtttctggagttaatcagcacaagctctgtgagtgactcctgaatcacacacaatccccggtgccaacgatgtactaagtgttcactgagtcacttctctggtccctgaggactcacaagccaagagactccaaacccagttggcaagtggtatagcggcaaaagggagacccgtggagttactcaaccttcgcaggatgcaagccccaaaggctggccccgcagcctcccagcgtgtccttttccccatccatcctgaagtcccccttcctgtctgcacagggcccaggtcctggggaaacaggtcttgctcttgaaagtggagttctttcccatcctgactggtctgtcccggtgaccttgagccaggaggaggaggactcctccctgagcccaagctttctcctctgtcgtttaggcagaatgatcccaatggactcaaatttcatcccgagccttctctgactcagtctttctggtttttccctcccttgtcctcttgcccagggctttatacacagcagcgcagaacagtgagcatatgggatggcgttggtgtcccatacgggacctagcactctgggaatacaacagcagatcaaatcagtttgtgaattgaggacttggcgtgaatgcttcgcatcttgtctgctgtgctttttcacctcatcctaatttacaaagagaagaaagtggagtgtaatgaaggctcatcagacaatgaggcagggagtgggaagagattgtttcatccactccacaagcatccgtgaatacaaagcttgtgtcagacactgggccaggtgcacgcatccaaaggtgaatgaggtttaatctcatcttcagcaagcctgaggtctagagaagcctgatgtggatgttaatcattaaaatatagtgagataggcctgggcgcggtggctcatgcctgtaatcgcagcactttgggaggccaagacaggaggatcacctgaggtcagaagttcgagatcagccttgccaac

SEQ ID NO: 28151 - DNA, 874 bp, Artificial sequence
  DNA replication origin
ggaagtgaggagcgtctccgcccggaagccaccccgtctgggagggaggtgggggtcagtcccctgcccggccagccgccccgtccgggaggtgaggggcgcctctgcccagccgcccctactgggaagtgaggagcccctctgcccggccagccaccccgtcagggaaggaggtggggggggtcaaccccccgcccggccagccgcccagtccgggagggaggtgggggggtcagccccccgcccggccagccgccccgtccgggaggtgaggggcgcctctgcccagccgcccctactgggaagtgaggagcccccccacccggccagccgccccgaccgggaggcaggtgggggggtcagccccccacccggccagccgccccatccgggaggtgaggggcgcctctgcccggccgcccctactgggaagtgaggagcccctctgcccagccgccaccccgtctgggaggtgtacccaacagctcattgagaacgggccacgatgacaatggcggttttgtggaatagaaaggggggaaaggtgaggaaaagattgagaaatcggatggttgccgtgtctgtgtagaaagaagtagacatgggaaactttacattttgttctgtactaagaaaaattcttcggccttgggatcctgttgatctgtgaccttacccccaaccctgtgctctctgaatcatgtgctgtgtccactcagggttaaatggattaagggcggtgcaagatgtgctttgttaaacagatgcttgaaggcagcatgctccttaagagtcatcaccactccctaatctcaagtacccagggacacaaacactgcggaaggccgtaggttcctctgcctaggaaaaccag

SEQ ID NO: 28152 - DNA, 1273 bp, Artificial sequence
  DNA replication origin
acggggtggcggctgggcagaggggctcctcacttcccagtaggggcggccgggcagaggcgcccctcacctcccggatggggcggctggccgggtggggggctgacccccccacctgcctcccggtcggggcggctggccgggtgggggggctcctcacttcccagtaggggcggctgggcagaggcgcccctcacctcccggacggggcggctggccgggcggggggctgacccccccacctccctcccggactgggcggctggccgggcggggggttgaccccccccacctccttccctgacggggtggctggccgggcagaggggctcctcacttcccagtaggggcggctgggcagaggcgcccctcacctcccggacggggcggctggccgggcaggggactgacccccacctccctcccagacggggtggcttccgggcggagacgctcctcacttcccagacggggcggctgccaggcggaggggctcctcacttctcagatggggcggttgccaggcggagggtctcctcacctcccagacggggtcttggctgggcagaggcactcctcacatcccagacggggcggcggggcagaggcgctccccacatctcagacgatgggcggccaggcagagacgctcctcacttcctagatgggatggcggctgggcagagacgctcctcacttcctagatgggatggcggccgggcagagacgctcctcacttcctagatgggatggcggctgggcagagacgctcctcactttccagactgggcagccaggcagaggggctcctcacgtcccagacgatgggtggccaggcagagacgctcctcacttcccagacggggtggcggccgggcagaggctgcactctcggcactttgggaggccaaggcaggtggctgggaggtggaggttgtagcaagccgagatcacgccactgcactccagcctgggcaccattgagcactgagtgaaccagactccgtctgcaatcccggcacctcgggaggccgaggctggcggatcactcgcggttaggagctggagaccagcccagccaacacagcgaagccccgtctccaccaaaaaaatacgaaaaccagtcaggcgtggcggcgcgcgcctgcaatcgcaggcactcggcaggctgaggcaggagaatcaggcagggaggttgcagtgagccgagatggcagcagtacagtccagctttggctcggcatcagagggagaccgtggaaagagagggaga

SEQ ID NO: 28153 - DNA, 1608 bp, Artificial sequence
  DNA replication origin
aattctgcctctatcatttgctagctgtgtgaccttgggcaggtttcttaacctctctgaccctctctctcatcctcacctgaaaaatggggatgatgatatcagtgttgcaggattttggtggaaatgagttgcatgcacagaatacacagcaggccatgtgcaagtagtaaatcttagctgtagttattaattcataagtatgtctgtggcttcacaattgacttgggatttctcagttgtggacacgaactcttgctaacaatgacggggcaaagtggaggtaaggaatgaggggtcttctgtgttggaggcaatggggatcctgcagggctcaaccagcaggatgagctcagactcagggccccccaacaggcagaaggtggacttgaggcattgttgggcgagcaggaccagccagctgcccttccccgcccccaccagccgggcctccctgattaccgccaaggtgagaggaggcccctctcctaagagggcaaggatgaggagaagcagacagggagggagggagaggagagcaaagatgtgagttcattgcaaactcaggaaagactgaggacagagagacagggaccaagaaggaaacagatggaagcagggacaacagaaagcaaaggagcagacaggaggccatgcacagagccaggggcagggaaccgcaagggtgaggcgggcagagacacacaggaagccagggacacagacacagagaccaagacacagagacagagacacagagaagacacagagacagagatatggacatggagacatagagactgagacatggagacagagacatagatagacggagacacagaaacacagactgagataaagggacagagacacaaagatatagagatggagacacagagacagagacacagacatggagatatagagacaggaagctagagacacagagagacagagacacagagacagaaacagagggagagagacacgggaacatagacacatgaaaatagagatacagagagacagaggcagagacatggagacagacacagaaatacagaggcaggaagacagagacacagagagatagagacacagacagagacacaggaacacagagacatgaagacagagacaaagagacagaaagacacagagataaacacggagagatggaaacacagagacagaagacagagatagaaatgcaggaacatgaagacagagacagagagatacagagaaagagacagagacacagagacagaaatggaaagagacaccgagatgcagagatagagagactgatacagagagagagatgcagagagtcagagacagagagacaagcaaaaagaataagtgggatgggggacagggcaagacagagcaagaaacataagtcacacacacgcacgcacgcacacacacggacagagatgggaagacaggctgagagagacaaagcaaaacatagacagggaaataaaaagatgagagaagagtgagttaggaggaggcagggaggaaaagctggagaaggcatggatggagtggcacagggggaccgcagagacccacagcaagacggaaatacatttcaaa

SEQ ID NO: 28154 - DNA, 1065 bp, Artificial sequence
  DNA replication origin
gtttcctctcctgtaaatggaggtgaggaacctccctcagaggatgtggtgaggactgactgagacgaggcatgaaaagcatggagcaccctgcccgcctgagtaaacaaaatactcaccattgctgacactgacaaccatctcctgggtgggaaggatgaggagaaaaatagaacagctggaaatgattatgattgggatgtggcacaacaaaggaaggaaggaagagaggaaggaaggaggggagggaggggggaggaaaggaagaaaggaaaggaaggacggatggtgggaggcaggaaggatgaaaggagggagggagggaggaagggagggaggatggaagtgagggaggaaggagagggaaagggagggaggcagggacggagggaggaaagaaaaaaaggaaagaaaggaaggagggggaaagggagggagggaaggaaggaaggaaaaaggaaggaaggaaggaaggatggaaggaaggaaggctggctgagaggttttcacagatgaatgattttcagtggtaaaaccagggaagtcctaggcaaatagagatgagttagttgctctaaggaaaggtctaaagcagtacactttaattcttcaagcgcaaagtaagtcaaaagaaaagcaaggaaattgagtcaagctacagcacaaccaattgaggttagatctcatacaggacttcctggctactgaacaacaggcacgggtgggcgcgccctttagcaactgggaagaaagctcagagttcaggaggcaactaggagaaacggcgaagcgcctctctggggatggaaggtccgtgttggctgctggttgccctctgtgaccgggtcagctctcctgtgacccatcgtcctcggcagagccagcagtacatttccaaatgccagacatcagaggctcaggaaagatgctcagcccgattccgacagagcaggttaggggcaggcatatgcttggtggcacgcagcctaatctcagagaaagtgttctgatagaaagattcatgatagccatccgggctgcagacaccaggccttaacttccaat

SEQ ID NO: 28155 - DNA, 1138 bp, Artificial sequence
  DNA replication origin
ccacagtgcctggcctaaatcactagatcttgtgtgaactcagagtaagagacggctcacttatcaccaaggggatgacccaagccattcttgagggatccatgcccatgacccaatcacctcccaccaggccccacctccaacagtggggactacaattcaatttgagatttgagcagagacaagtccaaactatctcaggattcaaatgggataattgtcaggaacaaagaagtgcaagaagctgagggtgcttacagggacaggaaccaaccccactggaactggtcaagatgtcccatgtaaggagagtagagtaactgaaacctgcaggggaaggagggtttgtccagtaaaaggaagagggcattttaaggatcaggaattaagagagagctttgcatgttaaatgaacttttaaaagtccagtgtggggtgtgtgtgtgtgtgtgtatgtgcgtgtgtgtgtgagagagagagagtgttatagctgtgtgtgctgtgagtgtgtgcaggctgtaggtttatgtgtctgttaataggttgcatgtgtgtttgagggtatgtgggaggggttgtgagttgtgtgtgttgcggttgtgtttgtatgttgtgggttgtgtgtggtgtgggttatgtgcattgtaggtcacatgcatgtgggtgtgtggcttcatattctgggttatgtggtgggttttaggttgtggggagttgtgtatggagtgcggttatatgggggaggtgtgttatgcttatgctgcaggttgtatgtgtgtatgctgtaggttgcatgtatgtgagtatgagttttaggttatgtgggaggggttctgtgtgtgtatgggctgtgggttgtatggatgtgtgtgttgtgggttgcatgtatgtaattgtgtggcagattgtatgttgttagtggcattcattgggtgtgtattttgggttatgtggtggggctatagggtgtgagcagttgtgtgtatttgttgtgcatcagtgtggattatggagtttgcaagttgtgtatgtgggttgtggggtgtgagaggtgtatgtgtgtgtatgtgtgggtgataaggctaaaggggtaggctgagtcagactccacatgatatagaagacactgttggttgcc

SEQ ID NO: 28156 - DNA, 1347 bp, Artificial sequence
  DNA replication origin
cgggcgaggagatcatggcccagggcaagcgctcggacccgcggagcctgctgtgctatggcggcgccccagggcctggctgccacctctccatcccctaggctttcagcagggcccccgccaacctcagtgacgtggtgcagctcgtctttctggtggactccaatccctttctctttggctatatcagcaactacaccgtctccaccaaggtggcctcgatggcgttccagacacaggccggcgcccagatccccatcgagcggctggcctcagagcgcgccatcaccgtgaaggtgcccaacaactcggactgggctgcccggggccaccgcagctccgccaactccgttgtggtccagccccaggcctccgtcggtgctgtggtcaccctggacagcagcagccctgtggccgtgctgcatctgcagctcaactatacgctgctggacggtgtgtgcagcgggtggggcacacgcggccccctggccttgttcttggggggaaggcgtttctcgtagggcttccatgggtgtctctggtgaaatttgctgtttcatgggctgttgggggcctggccggagaggagctgggggccacggagaagcaggtgccagctctggtgcagaggctcctatggcctttcaggcccgtggcagagggtgggctcaggagggccatcgtgggtgtcccccgggtggttgagcttcccggcaggcgtgtgacctgcgcgttctgccccaggccgctacctgtctgaggaacccgagccctacctggcagtctacctgcactcggagccccggcccaatgagcgcaactgctcggctagcaggaggatccgcccagagtccctccagggtgccgaccaccggccctacaccttcttcatttccccggggtgagctctgcgggccggcctggcagggcagggcagggcatcatgggtcagcattgcccgggttacgggccccgtggggacggcaggcagcgaggggactggaccgggtatgggctctgggactccgacatccaacctggcggagcctgggctcacgtccactgccccttcccttcccaggaccagagacccagtggggagttaccgtctgaacctctccagccacttccgctggtcggcgctggaggtgtccgtgggcttgtacacgtccctgtgccagtacttcagcgaggaggatgtggtgtggcggacagaggggctgctgcccctggaggagacctcgccccgccaggccgtctgcctcacccgccacctcaccgccttcggcgccagcctcttcatgcccccaagccatgtacgctttgtgtttcctgtgagtgaccctg

SEQ ID NO: 28157 - DNA, 1806 bp, Artificial sequence
  DNA replication origin
gcagcgtatagttgagctgcagatgcagcacggccacagggctgctgctgtccagggtgaccacagcaccgacggaggcctggggctggaccacaacggagttggcggagctgcggtggccccgggcagcccagtccgagttgttgggcaccttcacggtgatggcgcgctctgaggccagccgctcgatggggatctgggcgccggcctgtgtctggaacgccatcgaggccaccttggtggagacggtgtagttgctgatatagccaaagagaaagggattggagtccaccagaaagacgagctgcaccacgtcactgaggttggcgggggccctgctgaaagcctaggggatggagaggtggcagccaggccctggggcgccgccatagcacagcaggctccgcgggtccgagcgcttgccctgggccatgatctcctcgcccgccagcgtcacgggctcctcgttgagcacgcgggagcgcgtgaggatgcgcatgagggcagaggtcaggttgtaggcctgggacgccaccatccgcaatggtgactcggctcccagctctgagcgctgcggtgcccgcacgtctgagctggccaggtggatgaggtctcctgcagacaggcgtgaggtcagtgcagagacagggaggcagagggagggtgggggcaggcaaaaagggggagccggagggtgggggctgggagaaagggggaacctgagggggcagagagcgaggtgcaggcagaaggaagagggaagctggagagagagtggtggagggggagggggaaggggatggggatgaggacgaagatgagggggatgatggggagagggaggaaaaaggaaggaaaagggtagagaaaagagaaaggggagaagaagaggagcagggtgaaagggaggggaaggggataagggggataagggaggggaagggggataagggaggggaaggaggataagggggataagaaagatgaggggaatggacaaaaggacggggaggatcgggggggaaatggagaaaaggggagagagatggagaaaagggatggtaatagggaagggggagggggaggagaatgggaattgggggagggggataaggatgggaattgggggagggggatgaggatgggaattgggggagcgggatgaggatgggaattgggggagcgggatgaggatgggaattgggggagggggatgaggatgggaattggggggaggggagggggacgaagatgggatggggcaaaggcgaggcggttgtggggaggagggaggcagaggaaagggcggcatggggcggacgggccacgtggggcgggcgggtggcgtggggcacgggccgcggcacctgtgatgttgaggatgctgtctccgatggcggtgggcgtcacggtgcccgcggtggtctctgcctgcaggatgcgcatcatggcctccagcttgtgcagcgtctgcttcaggcacgagcggcatacgagctccctgctgggcccctgtgtggagccagcagtgtccagccccgctcctggccccactccttgcacacgccctcctctctacacgggtcctcacctggctcccacccccagccctgcagctggagagcccacttgactggacccccacagcctcctcactaagcattttttgtggctctgcatgacccagggcctccacctggggaacacgtgatgcagcccaccgaccacacaaggcacctcttcacatgagagaaggaggagggcagaagggagagaggagagggaagtggagaaaaggggggagag

SEQ ID NO: 28158 - DNA, 1099 bp, Artificial sequence
  DNA replication origin
ggaggggttaggggagggaaggggaggggaggggctaggggagggaagggggaggggaggggagagtggagggcacagagcagcatcttcttagtccctccccacatctgggcccctctttacaccctgggtcccccgagaggcaccctgcgttcacacaggacagcagaatggctgaggctactgaagcaggtcagagaccgaggaacgccatggcaggaaggagcccaggctggaggctcagctcctcggccaagctgcccgtctgccctggggggctgaacccagtaccctggcaggcatgcggggcggggagagcatgtggggccatcctaccatgcactgggccagcgcagcagcgatctgctggatgtcatccacagtgtggaccctcagggacaccagagtctccgtgatgttcttgcgtatctgggctcggcgctgccgctcgtgcttgggctctgccgccacgtccagggcccgctcgtactggggcaggcagggggcacagcaagctgtcagcagggcaggaggccggcaggaggccagcagatgcccacgactcccggggtgcagttacgtgctagatgctgtgtgatgtgggcactgacccgcaacactgagctgtttcttcatgggcaaaacagggtaagcacatgggccctcctgggcgggggctgcattgtggaaagcagacgccggagagggcccggtgggtgtggctgctgggagcggaacgtcggggtgctgcttcagggtcactgggatttatctctggggcccgggatgagccctccgcaaagctccaggcaggggaacaggtcttggtccccagcacgcatgcagcagatgtgaggtcccctcccaggctgcactcacctcgttcagcacagtgaccagggccagcgagtactcgatgacgtgctggggatcggcctgccgcagcagccccgggagcacactagcggtgagcccgtgcagccagactgtgagccccattgcgctgccgttgggctctgggagggtgatggccagagacctacgagcagaggggggtggtgagtaggtggcagtctcgggggcgccctcccacggcctg

SEQ ID NO: 28159 - DNA, 1512 bp, Artificial sequence
  DNA replication origin
tccagacccctcggtggcccaggtgctggtggagcacaatgtcacccacacctacgctgccccaggtgagggatgagggggtgagggggccactgcctttcaggctctgagcacggggcccccccagtcccccagtcaagctgccccgcttcctccccaacagccctcactgtgacctcacctgggctgatggcttaggcccctactggggtgagggaggggccaggcgtgggaggagtggacagggaagctgggccccctgaactgccccccaccgcggcctggctcttgctgctctgctgccccgagtgcagctgcacttggaggcggtgccgtcctcaccaggcagccctcagtgctgctgcacctgtgctccgtcccgcacgtggcttgggagcctgggacccttaaggctgggccgcaggtgcagccgttcaccccgggctcctcaggcggggggcttctgccgagcgggtggggagcaggtgggggtgccgcggctgccccacttgggcctgtccccacaggtgagtacgtcctgaccttgctggcatctaatgccttcgagaaccggacgcagcaggtgcctgtgagcgtgtgcgcctccctgccctctgtgagcgtgtgcgcctccctgactggggcctgctggtaccccagagtgggtgtctgttccccagtccctgctttcctcagctggcctgattgggggtctgcccagaggggtcgtctgaggggagggtgtgggagcaggttccatcccggctcagcctcctgacccaggccctggctaagggctgcaggagtctgtgagtcaggcctacgtggcaactgcggtcctcacacccacacatacgtctgttcccacacgcatccccccaggggccctcagtgagcattgcctgcctcctgccagggtccagctggctccagtacaccagaacgcacaccccagtgtcctctgccctgtgtatgcccttccgccgcccaggttggaaggtggcaaaccggatgagtatcctgggagggggtgagctcaccggcagtggccaggcccctgggaaacctggagtttgggagcagcatcctccacgggtcccccagaccttccagcaggccaaatagacctgtgttggaggtaaccccactcccacgccaggtgctgatccgcagtggccgggtgcccattgtgtccttggagtgtgtgtcctgcaaggcacaggccgtgtacgaagtgagccgcagctcctacgtgtacctggagggccgctgcctcaattgcagcagcggctccaagcgaggggtgagtgttgagcggggtgtgggcgggttggggatgggtcccatggccgaggggacggggcctgcaggcagaagtggggctgacagggcagagggttgcgccccctcaccatcccttctgcctgcagcggtgggctgcacgtacgttcagcaacaagacgctggtgctggatgagaccaccacatccacgggcagcgcaggcatgtgac

SEQ ID NO: 28160 - DNA, 2052 bp, Artificial sequence
  DNA replication origin
accagcaggccccagtcagggaggcgcacacgctcacagagggcagggaggcgcacacgctcacaggcacctgctgcgtccggttctcgaaggcattagatgccagcaaggtcaggacgtactcacctgtggggacaggcccaagtggggcagccgcggcacccccacctgctccccacccgctcggcagaagccccccgcctgaggagcccggggtgaacggctgcacctgcggcccagccttaagggtcccaggctcccaagccacgtgcgggacggagcacaggtgcagcagcactgagggctgcctggtgaggacggcaccgcctccaagtgcagctgcactcggggcagcagagcagcaagagccaggccgcggtggggggcagttcagggggcccagcttccctgtccactcctcccacgcctggcccctccctcaccccagtaggggcctaagccatcagcccaggtgaggtcacagtgagggctgttggggaggaagcggggcagcttgactgggggactgggggggccccgtgctcagagcctgaaaggcagtggccccctcaccccctcatccctcacctggggcagcgtaggtgtgggtgacattgtgctccaccagcacctgggccaccgaggggtctggaaccgggaaggactcgttgtacggaggctggaactggtggagggcctgctccccatccccaaaggtccacctgccggggcggtgggaggcagtgagtgaaccgggacaggggtgcgcagtggcggggcacaggtgcgcggtggcggggcagggggtgcttgggacccagccgaggctccactctgcagtcacgccccgggcctccattcagggcccacccggctgtgctgaggcctctcccggctcccgtgcagcctcagggctcctgtgcacccagtacctcccaacagacagggaaaccgaggctcagaaaagcaaccccctgatgtggggtccctcggctgaggctggagccgggacaagagcctggtgcccggacaagagcctggtgcccaccccaaaccggcccctgagtcactcacaggaaggccacctccacggccgagtccaccagcacgcccgccgtcagtgccagcgtggcattgggggacagcacggctggcactgtagagacccgcaggccctgcatcctgttcatccgctccacggtgatgttgtagttcacggtgacgttgctcacgtggttggaggccgtcagctgcagggacaggcatcagtgggcccaggtggcaggtgagaggcctgccctgcttggcgtccctccctccactcaccacagccatggcagcgtcctcgggcagcatgaagcagagcagaaggcagaggtgaaggtggagcccgcccccgccccgccccatcccctcccctccccactcccgcccacctactgagagcttgaagaccgccgcgctctgataaatgacattgaagaccacgttctggaaggtcagggactgcttgtcgttgatggtccaccggaagaccatgtccgagccggcctccaccacggggctgtacctctgcggggggactggtgtcagcctgggctctgtggaggactctgcccttagcctgtcgcctcctggacacacctcccgtcgggctggagagtcccacgcggggcacagaggagaggaggtgcccggggctctgcatgccatgagagccaagcccgggctgggacactgactgtccggctctccagccagccatgtagtactactaatgcctcaacctctctgtgcctcagtttccccatctgtaaagcaaacctagtaccagctacaaagagtccacctctctctgagtcttctcagaccctcccggggctcctgccccagctcctcagccagagagctcggagcagtgaggggaggcacacgggcctcacagggacagcacctacactggcttacagaacccaggacaggctgcacaggtcacgccatttctgatggcccctcccaaggcccctggtgaaggggcaggtacccgcaaga

SEQ ID NO: 28161 - DNA, 2495 bp, Artificial sequence
  DNA replication origin
ggcagtgctaccactgagaacagggtatcattggtctcccaggggcagccgggcacgaaggtggccaccagggcagggcaggcattctcaaagcgggcgctgacactgcccccaggccagcgagccgtggccgtggcgctggcaccagagtccacctggagcaccgaggctgagccgttggtgggcacgtagaggcggccgtcgcggggggcagggtagatgacccgcagcccagccactggggagaccacgtcaaagctgcaggacaggttgtgcctggacacgccattgcccacctctgcccggacctcatagcgcccaggcagccgcagcccagggttgggcctcaggcccagcagcacggtgagctgttccgtggctgcaagcagccgcagggcacaggcagggcaggcccaagtgccctccagctgggctggcaagtggggcagccatgacgaggcgttggcggagaggtacggggcctggggaccagggtggccgggagccggcgagcagtgcaggagggcgccagggccagcgtcgtgctgcaagccaacgaggtcaccagggagcatgaggacatcctggctgtggagggtgacctgtggagagggaggcagggctgcatcacgtcctcacggtcatggcccgtggacccctgcacgacggatgagggtggacacgcagggctccccgcttcgtcagccacacctcagggagcctccccacagtgctcgtgacaaggacaggcaggacagttgcagacagggggacacacggggagaggacacaggccaagacctggcagacaggaaggagcggctgtgctgggagagaggaagaggaggcacagctcgtgccaagggcccaggcgagagcttctcccactgggagaggggcaagggcactgcagaggtcggaggttggaggtcggaggtcggaggtcagaggtggcaaggacgtgggaggggcctgcaggctgggtgtgcctgctgcgcagacccagaccctgggcagcagacaggaaggtggcctgaggagatgcagggaacagacccaggtcagggccacacaccgagtactgcgcggggggccccgcgggaacggagaagaggaactctctccatagcgcatagggggccccgagtagccctggccctgacgtgcagccattggcgcaggcctgggggtggcaggaggcgtccagcggcaagcagatgttggctccagggcaccagcgtccccctggcatgcacgcggggaccagctgggtcctgttgtccggggacctgctctcaggctcgctgccgttctccggggtccctgcgaggaggggagggtgttggggccctcattcgcccacgggccaccgtcagagatgcccaactgcctgcaccagcgagcctggccttgctgtgaggacaggtctccccgcccgggcagcactcccagcccagtgctgcgtccctgtctccggccagctgactgacccaggccggtccccaggcaggccccacccgatccacccccaggacacctggaatgagctggtgtctctggaacccctgctctgtccacctaagactgggaaccactctgatggccacaggaccagcagacgtgagagctcagagaggccaccccgagtcctgcggcgcccaccaccccagagtcccacctgctgtgctgaggagccggtacacctgcagccgcagctgggcgggccgccggagctcctgggtcccaaattcggccgtggtgaggaaggcttcacggctcagacgcaggcccgggaataccatgacctggtgggcagggggccgcctcagctccacagaccccatcccagcctgaagcccagactccccccacccgaacttcgcaggaagaggggagggaaggagagcgagccatcggacccccacaggcctggctcctgtcgctcgagaggaagactccgatggaaactgtccatggggggcaggacccctgacctgcctttcaggaataactcacccacactcagagaaaaggcctgggggtaatgtgagtaaacgctttcctctctgcactctggattttcccaaccatcttcactgggcacaagcaacattaaggcccccaagttttttggcgagacccacagtgggcagggcaggcgaggcctccaggggcaggcaggagggcaggttatagaacgtggggggccgactacctccacgggctcgtgcggggctgagaggccgtcctgccgtgccagaggcatcaggggtccctacaggtccccactgggcgctcccacgaggaggttctcggcatcctgcactgggcctggggtggcaagtgcacagtgaggcgccgggccagggcccaggacaccaggacgaacagactggggaccgagccgcccgagaacccccccaccagcccctcctcctcagcccaggctccaccgcgggcgctcggcaggcccctaaccacagccagcgtctcag

SEQ ID NO: 28162 - DNA, 875 bp, Artificial sequence
  DNA replication origin
ggatataagcaacaacaagatttctacgttagaagaaggaatatttgctaatttatttaatttaagtgaaatgtaagttgtggttctttgggtggggtcctggctggaccccaggcccccagtatcccttctgccctcccagttggtccgtgtccccttccaggcttgagaccagatcctgggggcagttcactacctgcttggagccccccagtgccggcttggttggggcaggggaggcggtgctgtcagggtggctccagggcctggttgccagtggggggctggcatagacccttcccaccagacctggtccccaacacctgcccctgccccgcagaaacctgagtgggaacccgtttgagtgtgactgtggcctggcgtggctgccgcgatgggcggaggagcagcaggtgcgggtggtgcagcccgaggcagccacgtgtgctgggcctggctccctggctggccagcctctgcttggcatccccttgctggacagtggctgtggtgagtgccggtgggtggggcagctctgtccttcccagccaggtgggacctgggccctgcagacactgggcagggctcaggaaggcctctctggggggggcctccgggccaagggaacagcatgggagcctgtgagtgcggcgggcggatgggggggtgtggggtggagccaggaggagcagaacccggggtccagtggctgcctcttctaggtgaggagtatgtcgcctgcctccctgacaacagctcaggcaccgtggcagcagtgtccttttcagctgcccacgaaggcctgcttcagccagaggcctgcagcgccttctgcttctccaccggccagggcctcgcagccctctccgagcagg

SEQ ID NO: 28163 - DNA, 906 bp, Artificial sequence
  DNA replication origin
attaattatgtatgtatttatttatttttgaggtagagtctcgccgtttcaccccagctggagtacagtgatgcgatctcagctccctgtagccttgacctctctgggctcaagtgatttttctctcctctacctcccgagtacttgggaccccaggcgcatgccgccatgcctggctaatgtgtatttttttgtagatacggggtctcactgtgttgcccagggtggtttcaaaatcctgggctcaggcgatccttccgtctcagctcccacggtgctgtgttaccggcgtgtgccccagtgcctggccgtcttggaggtcttgtttctctgggtttatgcctcaaggtggcgcctgctccgctgtgctccctggtagcctggtagtgagcctgcttctcacacagtcatacctggttgtggtcccacagtgggaccaccctgttgggttcagaacaggagatgggggcccctcgagtctgtgtgggggctgtagacagggttgggagaccttggctctgtgggggactgtggacaggggatggggggccttggccctgcgtgggatgggttgggggtccgtgcccttcctggccctgggtggacaggtccaggtggcactcggcatagggctgagatgggtgcagagggctgaggcccccaggcctctcccggcttggtttccccagatgagtgttcatttgggtcttccatcagaaaggcccctcctgacctctgggagtggggagctcaagggtgggaggccatagcttggggatgctggcaatgtgtgggatgggcccagggatggcctctggcctactaagggctctggccctgacccacggccactcactcctcagagacgtctcccacaacctgctccgggcgctggacgttgggctc

SEQ ID NO: 28164 - DNA, 1117 bp, Artificial sequence
  DNA replication origin
ctatgatgccctggctagtcttcaactcctggactcaagtgatctgcccacctcagccccctaaagtgctgggattacaggcctgagctgtgtaatttcatgccgcgtgacacagcccagtaaaaaggaagaaaccccgcgggtccagcgtctactcacacaggtggactgatggctgataaatcccagcaggagccaaaagagcagccacagcacccatctactcacacaggtggactgatggctgataaatcccagcaggagccaaaagaggagccaaaagagcagccaccgcacccgcatgtcctggtcctttcagggcgccctgaggcagccaggacagaggtggaggtggcttagggcaggggggagggaaggggacggggaccgggcccgatctgagttggggagggggaggggagggggaggggagggggaggggaaggggaggggaaggggggaagtaagggaagggaaaggaggagaagggggctgttggggaggaggaggaggagaagaagaaaggggtctgggaaaggatccggttcaaattaagttctcaagcgctggtggaaggtttagctacaggtcacggagaagatcagggaagcaacaggacaggcggggcaagggagcgtgaggcttaggagcaattaggagacaaaggttctgctttccaccaaaccttcttcggtctgggccctcccttagcaaccctggggctttagactctctctccaccaatccctgatgaccccggtggtgcctcacaatggacattccaagtagcgcccgcatcatcccaatgacccctcccccttctcagtcccccacgctcctcccaaggccaggtcctctctggaaccttcacaaacctgatttctggtcctccccaaccagctccctgtccctgcttctgggtgctccttccttcctgagctcccagggttcctcaaggtcacttttggcgacaaaacataaaaaacaaatgatggcaggatggcaggaagaacctcatacccaagcagagtgccaggttttacagcctccgctcagccattcatatcctaagcaacaaaacatcagcaggatgcggaaggtcccgatagtaaaccat

SEQ ID NO: 28165 - DNA, 1357 bp, Artificial sequence
  DNA replication origin
cgcgctcccgcgtgctcaacgaggagcccctgacgctggcgggtgaggagatcgtggcccagggcaagcgctcggacccgcggagcctgctgtgctatggcggcgccccagggcctggctgccacttctccatcccctaggctttcagcagggccccggccaacctcagtgacgtggtgcagctcatctttctggtggactccaatccctttccctttggctatatcagcaactacaccgtctccaccaaggtggcctcgatggcgttccagacacaggccggcgcccagatccccatcgagcggctggcctcagagcgcgcctcaccgtgaaggtgcccaacaactcggactgggctgcccggggccaccgcagctccgccaactccgttgtggtccagccccaggcctccgtcggtgctgtggtcaccctggacagcagcaaccctgcggccgtgctgcatctgcagctcaactatacgctgctggacggtgcatgcagcggttggggcacacgcggccccctggccttgttcttggggggaaggcgtttctcgtagggcttccatgggtgtctctggtgaaatttgctttctgtttcatgggctgctgggggcctggccggagaggagctgggggccacggagaagcaggtgccagctctggtgcagaggctcctatggcctttcaggcccatggcagagggtgggctcaggagggccatcgtgggtgtcccccgggtggttgagcttcccggcaggcgtgtgacctgcgcgttctgccccaggccgctacctgtctgaggaacccgagccctacctggcagtctacctgcactcggagccccggcccaatgagcgcaactgctcggctagcaggaggatccgcccagagtccctccagggtgccgaccaccggccctacaccttcttcatttccccggggtgagctctgcgggccggcctggcagggcagggcagggcatcatgggtcagcattgcccgggttacgggccccgtggggacggcaggcagcgaggggactggaccgggtatgggctctgggactccgacatccaacctggcggagcctgggctcacgtccactgccccttcccttcccaggaccagagacccagtggggagttaccgtctgaacctctccagccacttccgctggtcggcgctggaggtgtccgtgggcttgtacacgtccctgtgccagtacttcagcgaggaggacgtggtgtggcggacagaggggctgctgcccctggaggagacctcgccccgccaggccgtctgcctcacccgccacctcaccgccttcggcaccagcctcttcgtgcccccaagcca

SEQ ID NO: 28166 - DNA, 1119 bp, Artificial sequence
  DNA replication origin
gggccgcgtgtgccccaaccgctgcatgcaccgtccagcagcgtatagttgagctgcagatgcagcacggccgcagggttgctgctgtccagggtgaccacagcaccgacggaggcctggggctggaccacaacggagttggcggagctgcggtggccccgggcagcccagtccgagttgttgggcaccttcacggtgaggcgcgctctgaggccagccgctcgatggggatctgggcgccggcctgtgtctggaacgccatcgaggccaccttggtggagacggtgtagttgctgatatagccaaagggaaagggattggagtccaccagaaagatgagctgcaccacgtcactgaggttggccggggccctgctgaaagcctaggggatggagaagtggcagccaggccctggggcgccgccatagcacagcaggctccgcgggtccgagcgcttgccctgggccacgatctcctcacccgccagcgtcaggggctcctcgttgagcacgcgggagcgcgtgacgatgggcgtgagggcagaggtcaggttgtaggcctgggacgccaccatccgcgatggtgactcggctcccagctctgagcgctgtggtgcccgcacgtctgagctggccaggtggatgaggtctcctgcagacaggcgtgaggtcagtgcagagacagggaggcagagggagggtgggggcaggcaaaaagggggagccggagggtggggactgggagaaagggggaacctgagggggcagagagcgaggtgcaggcagaaggaagagggaagctggagagagagtggtggagggggagggggaaggggatggggatgaggacgaagatgagggggatgatggggagagggaggaaaaaggaaggaaaagggtagagaaaagagaaaggggagaagaagaggagcagggggaaagggaggggaaggggataagggggataagggaggggaagggggataagggaggggaaggaggataagggggataagaaagatgaggggaatggacaaaaggacggggaggatcgggggggaaatggagaaaaggggagagagatggagaaaagggagggatgaggtgaggggaagctcta

SEQ ID NO: 28167 - DNA, 1096 bp, Artificial sequence
  DNA replication origin
ggaggggttaggggagggaaaggggaggggaggggctaggggagggaagggggaggggaggggagagtggagggcacagagcagcatcttcttagtccctccccacatctgggcccctctttacaccctgggtcccccgagaggcaccctgcgttcacacaggacagcagaaaggctgaggctactgaagcaggtcagagaccgaggaacgccacggcaggaaggagcccaggctggaggctcagctcctcggccaagctgcccgtctgccctggggggctgaacccagtaccctggcaggcatgcggggcggggtgagcatgtggggccatcctaccatgcactgggccagcgcagcagcgatctgctggatgtcatccacagtgtggaccctcagggacaccagagtctccgtgatgttcttgcgtatctgggctcggcgctgccgctcgtgcttgggctctgccgccacgtccagggcccgctcgtactggggcaggcagggggcacagcaagctgtcagcagggcaggaggccggcaggaggccagcagatgcccacgactcccggggtgcagttacgtgctagatgctgtgtgatgtgggcactgacccgcaacactgagctgtttcttcatgggcaaaacagggtaagcacatgggccctcctgggcgggggctgcattgtggaaagcagacaccggagagggcccggtgggtgtggctgctgggagcggaacgtcggggtgctgcttcagggtcactgggatttatctctggggcccgggatgagccctccgcaaagctccaggcaggggaacaggtcttggtccccagcacgcatgcagcagatgtgaggtcccctcccaggctgcactcacctcgttcagcacagtgaccagggccagcgagtactcgatgacgtgctggggatcggcctgccgcagcagccccgggagcacactagcggtgagcccgtgcagccagactgtgagccccattgcgctgccgttgggctctgggagggtgatggccagagacctatgagcagagggggttggtgagcaggtggcagtctcgggggcgccctcccacgg

SEQ ID NO: 28168 - DNA, 2399 bp, Artificial sequence
  DNA replication origin
gttgagggcgaccacagcggctcccagctggtcctgcaccaccacggccaggcccacctcgaagtgtggcctgaaacccgggggcagcacggctccgtagccggagaggctgctcttgtagacacagaactctttgcagtggccctggcaacagcgctgcagcagcagggcgtacaccagcggggcgccagcatcctccgcgtcatgccagcctgagggatggtccccacagcatcacgggagggctccgtgacgtcacagagtcgggggatcccgctgctccccctacgcaggcctgcactcacccgtgcattcgaagtgcaccttggtggtgagggcgtgcacagcgcccagtgggaagaggcggcaagagccctccagcggcgggcggttgggggacagggggatggaggcacagccctcctcctcgccagagcggcccagcaccgtcagcgtgaaggtgtatccctcgccgtcccgcagcacgccccgccgcagcaccagtcacatgcctgcgctgcccgtggatgtggtggtctcatccagcaccagtgtcttgttgctgaacgtacgtgcagcccaccgctgcaggcagaagggatggtgaggggtcgcaaccctctgccctgtcagccccacttctgcctgcaggccccgtcccctcggccatgggacccatccccaacccgcccacaccccgctcaacactcacccctcgcttggagccgctgctgcaattgaggcagcggccctccaggtacacgtaggagctgcggctcacttcgtacacggcctgtgccttgcaggacacacactccaaggacacaatgggcacccggccactccggatcagcacctggcgtgggagtggggttacctccaacacaggtctatttggcctgctggaaggtctgggggacccgtggaggatgctgctcccaaactccaggtttcccaggggcctggccactgccggtgagctcaccccctcccaggatactcatccggtttgccaccttccaacctgggcggcggaagggcatacacagggcagaggacactggggtgtgtgttctggtgtactggacccagctggaccctggcaggaggcaggcaatgctcactgagggcccctggggggatgcgtgtgggaacagacgtatgtgtgggtgtgaggaccgcagttgccacgtaggcctgactcacagactcctgcagcccttagccagggcctgggtcaggaggctgagccgggatggaacctgctcccacaccctcccctcagacgacccctctgggcagacccccaatcaggcccgttgaggaaagcagggactggggaacagacacccactctggggcaccagcaggccccgcctgacagcagcaggagcagccaccatgggctcagggtcaccaagcctcctggccggtccagagtggggagcatgagggtgagaaccggcccaccacatccagcaacagggacatgggctggggacagtggctgcctctggggtgggaaggggctcttcctcactgttggtattgctgggggactgtgtagcttttgtcactagagcatatgtggcttgaagactgtatgtggaactgtggcaggtttggaaggaagcaaagctgaagcaggctgtcgtgttacatagaatttgcatcagaaacagagaggggagagcgcgcggcctccaccagcactaaaacacggaaaacagtagatgagcagggaggctgggctgtccaaggcaagtggccgaggggcgggcggcacccaccgtctggttggtggcctcctccttgcggccggccttccacacggtgaggctgaaggtgtactccacgccagctgccagccgttcccgtggaatggtgaccgtgctgctcccgcggggcccaaagttcagcgcacacccgccagcctccctctgcaggccgagaacaaggggcgacgtggcccgagaaccccatccagttttaaagcagagcccggcccaggagacagtgcgggagaccccctccccatgctgggacggggcccaccaggcactgaggacgggccagccctggtggcaagctgggtgttctctgggctcatgggtgtggacgggtgaggggcagggaggacggccctgccacgcactgacctgtgtcgaagccacacaggcccactggaaactgagcggcgtctggtcgccgtcctccaggttggggtcgtaggactcgctcccatccagcaccaggtcctgtgtgtctgaccacacgcggtaggagccaccctcagtgatgggcaccaggcgctcgggggccaccgtcacattggcctggatgctccgtgccagtggcgtgtccccaaatgacacgacaaacacaaagcagtagtgccc

SEQ ID NO: 28169 - DNA, 1223 bp, Artificial sequence
  DNA replication origin
tgtgtcctgccctggggacccatccccaaagtcccagtggtaggccacgcgccgggggctggggctggtggcggcctcaaactgcgccgagcggttggtgaagcaggggccgctgcgcagggccacatactggacggcgtcctgaacctccagcaccagcgtgcggttctcactgcccagggcgttgaaggcacgcacctggatctccaacagccccgcggccacggcgtgtaggtgacgtcgcggcccgacaggatgaacagagagtcgccccggaccttctgcagcgagaagtaccaggcgtaggcgacccgagagccgcgctgcacgcgggctgtgaagttcctctcagtgcccatggcgatgccaggctcacagcagttgggcacctgcagcccgctcacggcctccagcaccacgatgcgcacctgcgcctgggcccagctcacgtggtttttgccctgcacgctcaccacgtggtctccgatgcgggggaagctgtgggagaaacggggcccagggagcacttcggggctggccccgccgacctgcaggcggaaggtgacagctgagccggcagccagcaggatctgaaaatggacaagctgcccgggcgccaccaccttgctgctggcccacagcaccaggcccacgatgggctcctccaccgtgaggttgtacgtggctgagacccagctgactgcgttggaggcattgagccagatgttgaaggtgccagcatccgggaagaccatggtgacatgagggccacgcttgctgctgccgccgggcacagcccagcaccagctcacattggtgcccgtggccagctgcccccaaaagggcacagaggacccggccgccacgaagctgcctcccggctcgctggccctgatgctgaggccactcacaggcacctgcacatccacttccacggtggcgttggctgagcccagcgggttccctgccgtcatggtgaccaagtgcaggccgggtgtggggaagctgtgggtggtaaatggctcgggggtctcccagctcagcccctcctccaaggaccaagtgtatacgacaccactgccaccagccagctcggcactgagggtgacgcttgtgttgacggcagctgggttcggggaggcggccaccatcagccaccccacaggctccacgaagtccacggtgcagtcagcccaggcgctgcccagcatgttggtggcccg

SEQ ID NO: 28170 - DNA, 1562 bp, Artificial sequence
  DNA replication origin
gccggcccgtcaccttctacccgcatctgctgccctcgcctgggggtgttctttacacgtgggacttcggggacggctcccctgtcctgacccagagccagccggctgccaaccacacctatccctcgaggggcatctaccacgtgcgcctggaggtcaacaacacggtgagcggtgcggcggcccaggcggatgtgcgcgtctttgaggagctccgcgggctcagcgtggacatgagcctggccgtggagcagggcgcccccgtggtggtcagtgccgcggtgcagacgggcgacaacatcacgtggaccttcgacatgggggacggcaccgtgctgtcgggcccagaggccacagtggagcatgtgtacctgcgggcacagaactgcacagtgaccgtgggtgcggccagccccgccggccacctggcccggagcctgcacgtgctggtcttcgtcctggaggtgctgcgcgtcgagcccgccgcctgcatccccactcagcctgacgcgcggctcacggcctacgtcaccgggaacccggcccgctacctcttcgactggacctttggggatggctcctccaacacgaccatgcgggggtgcccgacggtgacacacaacttcacgcgtagcggcacgttccccctggcgctggtgctgtccagccgcgtgaacagggcgcgttacttcaccagcatctgcgtggagccagaggtgggcaacgtcaccctgcagccagagaggcagtttgtgcagctcggggacgaggcccggctggtggcatgtgcctggcccccgttcccctaccgctacacctgggactttggcaccgaagaagccgtccccgcccgtgtcgggggccctgaggtgacgttcatctaccgagacccaggctcctatcttgtgacagtcaccgcgtccaacaacatctccgctgccaatgactcagccctggtggaggtgcaggagcccgtgctggtcaccagcatcaaggtcaatggctcccttgggctggagctgcagcagccgtacctgttctctgctgtgggccgtgggcgccccgccagctacctgtgggatctgggggacggtgggcggctcgagggtccggaggtcacccacgcttacaacagcacaggtgacttcaccgttagggtggccggctgcaatgaggtgagccgcagcgaggcctggctcaatgtgacggtgaagcggcgcgtgcgggggctcatcgtcaatgccagctgcacggtggtgcccctgaatgggagcatgagcttcagcacctcgctggaggccggcagtgatgtgcgctattcctgggtgctctgtgaccgctgcacgcccatctctgggggtcctgccatctctttacaccttccgctccgtgggcaccttcaatatcatcgtcacagctgagaacgaggtgggctccgcccaggacagcatcttcgtctatgtcctgcagctcatagaggggctgcaggtggtgggcggtggccgctacttccccaccaaccacatggtacagctgcaggccgtggtcagggacggcaccat

SEQ ID NO: 28171 - DNA, 2107 bp, Artificial sequence
  DNA replication origin
ccacgtgtaaagaacacccccaggcgagggcagcagatgcgggtagaaggtgacgggccggccggccaccaggacgccgtcactcacacccacagcctcggagggcagggaggcgcgcacgctcacaggcacctgctgcatccggttctcgaaggcattagatgccagcacggtcaggacgtactcacctgtggggacaggcccaagtggggcagccgcggcacccccacctgctccccacccgctcggcagaagccccccgcctgaggagcccggggtgaacggctgcacctgcggcccagccttaagggtcccaggctcccaagccacgtgcgggacggagcacaggtgcagcagcactgagggctgcctggtgaggacggcaccgcctccaagtgcagctgcactcggggcagcagagcagcaagagccaggccgcggcggggggcagttcagggggcccagcttccctgtccactccccccacgcctggcccctccctcaccccagtagggacctaagccatcagcccaggtgaggtcacagtgagggctgttggggaggaaggggggcagcttgactgggggactgggggtgccccgtgctcagagcctgaaaggcagtggccccctcaccccctcatccctcacctggggcagcgtaggtgtgcgtgacattgtgctccaccagcacctgggccaccgaggggtctggaactgggaaggactcgttgtacggaggctggaactggtggagggcctgctccccatccccaaaggtccacctgccggggcggtgggaggcagtgagtgaaccgggacaggggtgcgcagtggcggggcacaggtgcgcggtgggggggcagggggtgcttgggacccagctgaggctccactctgcagtcacgccccgggcctccattcagggcccacccggctgtgctgaggcctctcccggctcccgtgcagcctcagggctcctgtgcacccagtacctcccaacagatagggaaaccgaggctcagaaaagcaaccccctgatgtggggtccctcggctgaggctggggccgggacaagagcctggtgcccaccccaaaccggcccccgagtcactcacaggaaggccacctccacagccgagtccaccagcacgcccgccgtcagtgccagcgtggcattgggggacagcacggccggcactgtggagacccgcaggccctgcatcctgttcatccgctccacggtgatgttgtagttcacggtgacgttgctcacgtggttggaggccgtcagctgcagggataggcatcagtgggcccaggtggcaggtgagaggcctggccctgcttagcgtccctccctccactcacccacagccatggcagcgtcctcgggcagcatgaagcagaggtgaaggtggagcccgccccgccccaccccatcccctcccctccccacccccgcccacctactgagagcttgaagaccgccgcgctctgataaatgacattgaagaccacgttctggaaggtcagggactgcttgtcgttgatggtccaccggaagaccatgtccgagccggcctccaccacggggctgtacctctgcggggggactggtgtcagcctgggctctgtggaggactctgcccttagcctgtcgcctcctggacacacctcccgtcaggctggagagtcccacgcggggcacagaggagaggaggtggccggggctctgcatgccatgggagccaagcccgggctgggacactgactgtccggctctccagccagccatgtagtactactaatgcctcaacctctctgtgcctcagtttccccatctgtaaagcaaacctagtaccagctacaaagagtccacctctctctgagtcttctcagaccctcccggggctcctgccccagctcctcagccagagagctcggagcagtgaggggaggcacacgggcctcacagggacagcacctacactggcttacagaacccaggacaggctgcacaggtcacgccatttctgatggcccctcccaaggcccctggtgaaggggcaggtacccgcaagacggagacagccctgtcccccatg

SEQ ID NO: 28172 - DNA, 2497 bp, Artificial sequence
  DNA replication origin
acggcagtgctaccactgagaacagggtatcattggtctcccaggggcagccgggcacgaaggtggccaccagggcagggcaggcattctcaaagcgagcgctgacactgcccccaggccagcgagccgtggccgtggcgctggcaccagagtccacctggagcaccgaggctgagccgttggtgggcacgtagaggcggccgtcgcggggggcagggtagatgacccgcagcccagccactggggagaccacgtcaaagctgcaggacaggttgtgcctggacacgccattgcccacctctgcccggacctcatagcgcccaggcagccgcagcccagggttgggcctcaggcccagcagcacggtgagctgttccgtggctgcaagcagccgcagggcacaggcagggcaggcccaagtgccctccagctgggctggcaagtggggcagccatgacgaggcgttggcggagaggtacggggcctggggaccagggtggccgggagccggcgagcagtgcgggagggcgccagggccagcgtcgtgctgcaagccaacgaggtcaccagggagcatgaggacatcctggccgtggagggtgacctgtggagagggaggcagggctgcatcacgtcctcacggtcatggcccgtggacccctgcacgacggatgagggtggacacgcagggctccccgcttcgtcagccacacctcagggagcctccccacagtgctcgtgacaaggacaggcaggacagttgcagacagggggacacacggggagaggacacaggccaagacctggcagacaggaaggagcggctgtgctgggagagaggaagaggaggcacagctcgtgccaagggcccaggcgagagcttctcccactgggagaggggcaagggcactgcagaggtcggaggttggaggtcggaggtcggaggtcagaggtggcaaggacgtgggaggggcctgcaggctgggtgtgtctgctgcgcagacccagaccctgggcagcagacaggaaggtggcctgaggagatgcagggaacagacccaggtcagggccacacaccgagtactgcgcggggggccccgcgggaacggagaagaggaactctctccatagcgcatagggggccccgagtagccctggcccctgacgtgcagccattggcgcaggcctggggtggcaggaggcgtccagcggcaagcagatgttggctccagggcaccagcgtccccctggcatgcacgcgggggccagctgggtcctgttgtccggggacctgctctcaggctcgctgccgttctccggggtccctgcgaggaggggagggtgttggggccctcattcgcccacgggccaccgtcagagatgcccaactgcctgcaccagcgagcctggccttgctgtgaggacaggtctccccgcccgggcagcactcccagcccagtgctgcgtccctgtctccggccagctgactgacccaggccggtccccaggcaggccccacccgatccacccccaggacacctggaatgagctggtgtctctggaacccctgctctgtccacctaagactgggaaccactctgatggccacaggaccagcagacgtgagagctcagagaggccaccccgagtcctgcggcgcccaccaccccagagtcccacctgctgtgctgaggagccggtacacctgcagccgcagctgggcgggccgccggagctcctgggtcccaaattcggccgtggtgaggaaggcttcacggctcagacgcaggcccgggaataccatgacctggtgggcagggggccgcctcagctccacagaccccatcccagcctgaagcccagactccccccacccgaacttcccaggaagaggggagggaaggagagcgagccatcggacccccacaggcctggctcctgtcgctcgagaggaagactccgatggaaactgtccatggggggcaggacccctgacctgcctttcaggaataactcacccacactcagagaaaagggggtaatgtgagtaaacgctttcctctctgcactctggattttcccaaccatcttcactgggcacaagcaacattaaggcccccaagttttttggggagacccacagtgggcagggcaggcgaggcctccaggggcaggcaggagggcaggttttagaacgtggggggccgactacctccacgggctcatgcggggctgagaggccgtcctgccgtgccagaggcatcaggggtccctgcaggtccccactgggcgctcccacgaggaggttctcggcatcctgcactgggcctggggtggcaagtgcacagtgaggcgccgggccagggcccaggacaccaggacgaacagactggggaccgagccgcccgagaacccccccaccagcccctcctcctcagcccaggctccaccgcgggcgctcggcaggcccctaaccacagccagcgtctcaggcccc

SEQ ID NO: 28173 - DNA, 997 bp, Artificial sequence
  DNA replication origin
gcggcaccgcctcttgctgctcagctgtgggggcttccgtcagctttgccgaatcccccctctcttccagggatataagcaacaacaagatttctacgttagaagaaggaatatttgctaatttatttaatttaagtgaaatgtaagttgtggttctttgggtggggtcctggctggaccccaggcccccagtatcccttctgccctcccagttggtccgtgtccccttccaggcttgagaccagatcctgggggcagttcactacctgcttggagccccccagtgccggcttggttggggcaggggaggcggtgctgtcagggtggctccagggcctggttgccagtggggggctggcatagacccttcccaccagacctggtccccaacacctgcccctgccccgcagaaacctgagtgggaacccgtttgagtgtgactgtggcctggcgtggctgccgcgatgggcggaggagcagcaggtgcgggtggtgcagcccgaggcagccacgtgtgctgggcctggctccctggctggccagcctctgcttggcatccccttgctggacagtggctgtggtgagtgccggtgggtggggcagctctgtccttcccagccaggtgggacctgggccctgcagacactgggcagggctcaggaaggcctctctggggggggcctccgggccaagggaacagcatgggagcctgtgagtgcggcgggcggatgggggggtgtggggtggagccaggaggagcagaacccggggtccagtggctgcctcttctaggtgaggagtatgtcgcctgcctccctgacaacagctcaggcaccgtggcagcagtgtccttttcagctgcccacgaaggcctgcttcagccagaggcctgcagcgccttctgcttctccaccggccagggcctcgcagccctctccgagcagggctggtgcctgtgtgggtcagcccagccctccagtgcctccttcgcctgcct

SEQ ID NO: 28174 - DNA, 1868 bp, Artificial sequence
  DNA replication origin
cgcgcgctgccctaacgatgccgcccgccgcgcccgcccgcctggcgctggccctgggcctgggcctgtggctcggggcgctggcggggggccccgggcgcggctgcgggccttgcgagcccccctgcctctgcggcctagcgcccggcgccgcctgccgcgtcaactgctcgggccgcgggccgcgggctgcggacgctcggtcccgcgctgcgcatccccgcggacgccacagcgctgtgagtagcgggcccagcggcacccgggagaggccgcgggacgggcgggcgtgggcgcgttccctggcccgggacgggaagcaggacgcgggccaggacgctcccagggcgaggctccggcgcggcacagcggccctgctaaataaggaacgcctggagccgcggttggcacggccccggggagccgaaaaaccccgggtctggagacagacgtcccacccgggggctctgcggacgccagcgggggcggggcgcggaggccgcgctcagctgggaggacaaacagtcgctaattggagaggaattgggattcggcctggggctgcggggtacccggagagatggggatggctgtagggggctgcagggaagagttccaggaggtgtctggacaaggatttgatggatgtgcaagaattgggctgatgcttaggaaggggcgatgaggtgggtccagaagaaggggggtgaacggtgtgagcaaagaccgtgaggctggaggctggccacgggaggtgtgaggggtaggggcagggtgggaggtgggctcgcgggtgggctggggtcatgaagggcctcaggcgctctgctattgggttccaaggctatcctgagaacaggggtgagggcggattgccgtggggggttaaagccttgtcatgttcgctttcgggagataaaaacaacaggtggcctttatggagacgctgcccagagccaggtctgtgccaggctcctgttgggggtcgtcatgcggaatcctgactctgaccatccgaggcatagggaccgtggagatttgcatttcacagatgaggaaacaggtttggagaggtgacacgacctgtcccaggcatcacagccaggacaggacctgtcccaggcatcacagccgggatgtgcatagcaggggtttggaactatgaggtgcccaggacccagggttggattgaaaagggcgcaggggactaagataagcagacagttgtccccagcgctggggagagtcttggtaccagtctgatgccttgtatttcccaggctccaggctcctcgccgggacagtgtctctttgggtgcgtgctggatccctgggggacgtggcacatccccaggctttctaaacattggatgggttctggcatttggttttgtaacgtttctgggtcactcccgcctgtggccacccttccttaggggagccgtgtgtccttggggctttgctgggtggtctcgagggtgggagaagaatgggttctcctggaccaatggagcccgtgcccctcggggccacattgctcctgcgctccctgactgcggacgcgtgtgtctcgcggctgtctctgtggagatggcctcctcctgcctggcaacagcacccacagaattgcatcagacctaccccacccgttgtttgtgatgctgtagctgagggctcctctgtctgccaggccggtcactggggactctgtccaggtcctggtggttcctgcttcccagcacctgatggtgtccatgagagcagcccctcgggagctgtccgggagagaagggcgctggtggctgctgagcggagagcaaggcccgtgttctccaggcccttggcacagcagtggaacccccgcccct

SEQ ID NO: 28175 - DNA, 1405 bp, Artificial sequence
  DNA replication origin
gccgcgcccggggccccccgccagcgccccgagccacaggcccaggcccagggccagcgccaggcgggcgggcgcggcgggcggcatcgttagggcagcgcgcgcatggccccgccgtccccaggcccgcccgcgcgcggaggccgcggctcaggcggggccggcggacggcatggcgggcgcggggctggatggggctgcggccgcgacctgctgctgagcgacgcccgctcggggctcggggccaggccgctccgggagctcggccgcccgctcggacgttggcgctgcagtgcgggccccgccgcggctcctcctcctcctccccgcgcggcgcagggcggacggggcgagggggggcggggcgggtgcaggctccgcccccttcgccacagcgcgaccgggccagcgatgagggactggcatccggaggcttcaccctccgctccacagggtcggcagcagggcggggcctccggaagctccgccccacgctttcccggggcgcatgcgacgtggggcggagcgtctggaagctccgcccgtcgcactgtagagtcggccgaggcgcacgaggtatttttcacgctccgcccctctgcaggctaaagtgcgtgggcgggaagcggtgggcagggtgccatctggctccgcccttctcctgtggtgtgggccaggcggcggcttcctcctcctgcagcagccacaggctccactctgatccttctcccgcggcatggatccttctcccgcggcgtggatccttctcccgcaatctccgtgcgcgtccccagtcagtacccgcagcctcccgacgcacccgctggctccaagcctccctaccccaggtttcctggctaagagagagacagagggagagagggggaagagagagaacaggcaatgggaggttgatggtgagagcttattgaaagacaagagggaggaaacccacatccttcattccccatccattcatttattgccttatttattccattgaatcttcacagctctagaaaaagtgtgctacaattattccctttattaaatgaggtcactgaggcacagtttaagaaatttgccagcagggcacagtgggtcactccggtaatcccagaactttgagagggggaggaaggtggatcccttgagcccaggagttggagaccagcctggccaacatggcgagaccccgtttctacaaaaattagccaaaattagccaaactggctcacacttgtagtcccaggtactcgagaggctgaggccggaggagcgtgtgagcccaggaggcagtggctgcgctgagccgtgattgtgccactgcactccagcctgggcaacagagtaagaccctgtctcgaaaaaaaaaaaatggaaaaaagaaaaaaagaactggctg

SEQ ID NO: 28176 - DNA, 1743 bp, Artificial sequence
  DNA replication origin
gagtggacacagcacatgtttcagagagcacagggttgggggtaaggttacagattaacagcatcccaaggcagaagaatttttcttagtacagaacaaaatggagtctcctatgtctacttctttctacacagacacagcaacaatctgatctctctttcttttccccacatttctcccttttctacttgacaaaaccgccgtcgtcaccatggcccgttcccaatgagctgctgggtacacctcccagatggggtggcggccgggcagaggggctcctcacttcccagacggggcggcggggcagaggcgccccccacctcccggatggggcggctggccgggtgggggctgcccccacctccctcccggacagggcggctggccgagcgggggctgccccccacctcctggacggggcggctgccaggcggaggggctcctcacttcccagacagggcagctgccgggcggaggggctcctcacttctcagacggggtggccgggcagagacactcctcacctcccagacggggtggcggtcgggcagagacactcctcagatcccagacggggtcgcggccgggcagaggcgctcctcacatcccagatggggcagcggggcagaggcactccccacatctcagatgatgggtggccgggcatagacgctcctcacttcctagacaggatggtggccgggaagaggcgctcctcacttcccagactgggcggctgggcagaggggctcctcacatcccagacgatgggtggccaggcagagacactcctcactttccagacggggtggcggctgggcagaggctgcaatctcggcactttgggaggccaaggcaggcggctgggaggtggaggttgtagtgagccgagatcacgccactgcactccagcctgggcaacactgagcactgagtgagcaagactccatctgcaatcccggcacctcgggaggcccaggcgggcagatcactcgcggtcaggagctggagaccagcctggccaacatggcgaaaccccgtctccaccaaaaaatacaaaaaccagtcaggcgtggcggtgtgcgcctgcaatcccaggcactcagcagcctgaggcaggagaatcaggcagggaggttgcagtgagccgagatggcggcagtacagtccagcctcagcttggcatcagagggagaccatggaaagtgggagacggagacgggagagggagacgggagggggagggggagggggagggagaggggagggggagggggagggagaggggccctgttttatagctagtcttcaatttggtctggtgtctgagccccacctctggagttgagtcctgcctcctacctctaagacatgttggtggatgcagggtagtgggcagaatagaatcatgtagaccccttagaaggttgttgtaatctagggcagtggttctcaattttaaccatgcatgagaatttcatgcaggggttgttaaaactcagcctcctgcccctggagtctgcgtctggagtctgcatctctgactagctcccaggtgatgccagtgctgctggtcctggaccacattttgagtagctaaaagctaggagagagataatggggacttgcagtaaggtggtacccctgctgaggttaggaagagctctggtctgggatgcattttgaagtgaaactatcaatctcatttcagttcccttttaatctgcttacaccaaggacaat

SEQ ID NO: 28177 - DNA, 952 bp, Artificial sequence
  DNA replication origin
ggccaggtgcggtggctcatgcctgtaatcccagcactttgggaggctgaggtgggcagatcacttgagcccaggagtttgagaccagactgtgcaacgtggcaaaacctccatctctgcaaaaaatacaaaaaattagctgggcacagtggcatgcactcactgcacacagtggcatccagctcctcaggaggctagggtgggaggatcactttagcccaggaggttgaggctgcagtgagccatgatcacactactgcactccagcctgggtgacagaatgagaccctgtctcaaaaagaaagagagagagaggggaaagaaggaggaggaggaggaggaagggaggcaggggaggggagggagggagggaaagacagagagggagaggagagagaaagaaagaggatggaaggaaggaaggaaggaaggaaggaaagaaagaaggaaggaaggaaggaagaaagggagggagggaggggaagaaagcatcccatgcacaggaaataataaggtcaaaatcgtagagtgcaaaatgagggcagcagccccatggcattcttaggtcactggtccttccttttgcctggagaaaatggtgaacagtgaggctgagaagtgggcaggggccggatggttgtgggatctcttgagccatgttaaggattttggtcttcatcctcaagggaatgggaccactgaagtgtgttatgcggggaactgtcaccattacatgtatgctcccaggtagaggcaaagggaagggaataagagacagagcagaagctaagcagtgtctgtggtcaccaggtgaaagcagggggtggcagtgggagtggagagaagtggacagagctgacagatgctttagaggcaaaactgacacacttggtgacaggttcaaagtgaggagtaagtaacgagtccaagaagatacccctcaactaggcac

SEQ ID NO: 28178 - DNA, 1121 bp, Artificial sequence
  DNA replication origin
ggtctgtccaatgaggagcgagcgtcgcgggggccgtcgggaagggcggccgacccatataagcagcctgcggggcgttccctcgggttgtggttggtgtgcgggtttcggttggaggactcgttggggaggtggcctgcgcttgtagagactgcatccccgagacgatggcggagggagataatcgcagcaccaacctgctggtgagtcctggctgcctgtcccccgggagccgagcgaggcctccagacgtccgtgggctcaaacaccgcggcctcgtccctgtcacccgccgcgggcccggcccttctctccctgggcaggcgacgatgcctggccctcgggcttcttgggtgactcctgggtgtcgaacccttacctttcctggggacggtgcgcgacggggcgaggagggcgcgtgattcatcaccgcgagtaggagtcgaggaggaagtgggaggcagaggggctgcgacactagcctggggtgcgggtgggggcagaaggcctcctggggcctgtccagcgctttcgcggctcaggccccagccgtattcggctttccccgtctttgatcttaacctggatgtgcctgccttcttttccccctaaaacttggacaagggtggagggtcaaagggctactgcccagaatttatcttagagctggtacaacttaaaacgacagggaggctgcgagctcaccgtggggaaccgggagcggggtccagctgaacagacaatgggatgtcttggcgtttgtctggaatttggaagtctggcgggggtggggtcacaggactactggaaacagctttagagtaataagcagggatccgaaggaactgcagtgagatggtatcataggcggacacatttttatttgttatgaatttaagcgcaccttgtgggcaaaaaacaagagaaatatccttgcatattctcagttgcccttccctggtgactgtaggtcacataccagcaatgaaaaacggaaccaaagaatttacttaggggcttttgaacttccaagaccccagacgctggccaatgacgtgacttcagggcagttttgattgtgcgtgattttatatttgcttttagaaatgcatggtttgttc

SEQ ID NO: 28179 - DNA, 1028 bp, Artificial sequence
  DNA replication origin
cctccttctcctcctcctcctcctcctcctccttctcggcttcctcctcagccccgggccggagcggggtgtcggcggcggccggttcgggcggcgactcgcgcttctttgggcggcggcgcttggccatgtcgtgtcggggaaggtaatgagccgcagagccccggggtctcggctgagcagcggcggcggcggcggcggcaccaagtatccgcggagctggaatgactggcaacccaggtgggtgaccggcccgggaccccgccccgacctcccgggctccgcctcgggcgggccgaggcctagggccgcggggctgggaggcgcggcctaggccctccacccctcggagccgggcgcggcttcctgggtctcctccgccccggctgggggaggaaggccgcggggaggcgaggcctaagtgcctcccctccctgcttgttcagcccggggctggagccgagacccggggctcccggcggtggcactggcctggggtcgggaccaggaggtgagaaagaggcgggggtgggggtggggggcattccagttacagcctccccctgaccccgagttgggagatgctgagagtccaggaccctccctgttactcattcactttctcggttccccactctttcagccgccacgtgagagctcttctaacctctgttcctttctgtgacccccacgtgttaatattgaaaaaaacaaaacaaaactccagctaaggcattgctctgactctaggcagaacattcattagtggagcatgagatgagattgtgtgactgttgatgggatcgacccacgctggtcttgggcgatggaagttttccctaagtgcaaggccggttactctggtgaatcgtaattcatacctggacacttgagtgaactctttgggcacccacttagaagtctagagaatttcctcatttatggaggatttgatctcagaccgttttggggcttagtgagatttgaatatattaggaacattaactttttaaataaatgtagtttcc

SEQ ID NO: 28180 - DNA, 1479 bp, Artificial sequence
  DNA replication origin
ttaccttccccgacacgacatggccaagcgccgccgcccaaagaagcgcgagtcgccgcccgaaccggccgccgccgacaccccgctccggcccggggctgaggaggaagccgagaaggaggaggaggaggaggaggaggagaaggaggaggcggcggagggcgggggaagaggacggccgttccgggttccgcctgagcccgcagcgcaggacgaggaggcgggagcggcgcggtgagagagaggcggatgaaggggaggcgacgtcttttccagggccgtgcgcggcccacgtcgccggggccccggaggacgaggacgacgaggagcaggcggtggcggcagctcctcacgctcacacggccactgcttccccgcctcccggctccgcccgccgcgccgccgctgtcgcacggcatgctgggagcgaggggcggggttggcgcccgccgggcctggggagagaggcgggtcctgtcggcggggcggagccgagagaggcggggtcgatagcaggccgccccgccccccacgtccccaggcccttgggcggcgaagaggtctgggcgtagcggtgacgaatcctaagacaggggatctccactactgcggccacacacttttctcccaaacgcttcccggaaagcaccggagggccgggcagtcaggtgtaaacaggcgtccaatcaaggacctgcggtgtgggtgggggctggtgccctgcggtgcgcgcgcacacaggcgtgcccttggattcacgtgcgccagttttcccactttctacggggtggggtggaaagtgaaaatagtaagatcgagaggtggatatccaccttcccaacctccacctgaaatgtgcccatcgagtcctggcaccttttaccatttcttcacaatgaaaaaaactaaacgatggaagggaagggagtacccacgatcaccaaaccctgtcctctgcaatgtgaaatgtgctttgaagtcctttcaccctgaggcttgcccgccttctgctggtgaaagaagctgggggctaggcgcggtggatcacgcctgtaatcccagcactttcggaggccgaggtgggcggatcgtctgaggtgaggagttcccgaccagcctagccaacatggagaaaccccgcctctactaaaaatacaaaaattagccgggcatggtggagggcgcctgtaatcccagctacttgggaggctgaggcaggggaatcgcttgaacccagcaggccgaggttgcagtgagccgagatcagaccattgcagtccagcctggacaacaagagtgaaactctgtctcaaaaaaataaaagagagagagaaaggagggagggaagaaaaaggaaggaaggaagggaggaaggaaggaaaggaaaggaaaggaaaggaaaaaagaaaagaaagagagaaggccgggcgtggtggatcacgtctgtaatcccagcactttgggaggccgaggcgggcg

SEQ ID NO: 28181 - DNA, 1154 bp, Artificial sequence
  DNA replication origin
attgaaagactgtctcggtcaacagctggaagacaaacccaccacggtccagactgcagttctcgtgtccttttggcccggctgggttccactggattggatgaggacgcgtttgtggagggagcaggaataaggaagatctccttcccacctgctgttccccagagccgggagcacccggcgtcgggggtgggagggaacagcggccaggccgagcctccagcacccggctccctccgtgcgccctcggaccccaggggcaccgtccccgcgcgcgctccctgccgccctacctggatggaccgccggctgccggctgggcctgccgggctggagcgcactgccgctggactcgctcatggccgcgccccgcgctcctcagaggctgccgaggaccctctccagccgccgccgccgccgccgcctccccggccttccctcgcggagccgggattccaggttccggcgctgacatcacagaagccggagtggggcgcccccgcgaggagccgagcatcagggaccgcagaggggctgcagagcccgggagatccggcaaggctccatccagcggtggcgacaagcagcgacctccctgatgtctcactgagcttaaaaaataacaatagattgggcgcactgggagcccagtctccaccaggacccggtacacccatgtaacaaacatgcacatggaccccctgcatctaaaatcaaacctgatctaataaagaaataaataacaaaaataactggttgggagtggtggctcacgtctgtaatcctcgcattttgggagtccgaggctggaggaccgcacgaactcacaagtttgagaccaacctggccaacacagtgagacccccatctttaaaattaaaaaataaaaagtccacacgcaaaaaaccccaagactccaaatcagtgcatctagtaagttaccatttgggaacaaaaaggaaaccaaaaaatatatttgtacatgcttgtaaatgcctaagctatctccctagagggtgcaaaaaactggctacctgtggtagctctgggtggggagctagagggccgagtgaagagaaaaccacgtgcagtgtttgtcttttacgttttgcactatatcctcgtttcatctctacctctgttcgtgtgcaggt

SEQ ID NO: 28182 - DNA, 1545 bp, Artificial sequence
  DNA replication origin
atggcgtacatccaggtagggctgaggctgggggcaaggtccggggtgcgggtagggggtgccgcgccccctccggctgggagcgcgcggaagggagggcccacggctaggctcccacaaacttgcttcgagaaaaagggtgcccgtgcgcgggcaacctgtgcagcaacaggggtgcgccccgggaggagagactggggacccccaaaccccgggatggagggtcctatgtgtactctgcaacgcgcgcccttgcctcttggggagggaatggggggtggggcggacttttcttctcccctgccccctccctctccttggcaccccaccccaggggaggggccgtggggagggcggcccggggcgcgccagccacccggcccgccagctgccgttgccgtggtgacggctccggctaattggccggcggagcgagcctgaggcagctgttccgaccaggagggacaaggacgtcgtctctcctgggcactgggtgctgaggggtgggggacacccagaggccagaggcgcgctggtgaagagaagggagcctgttactttactccgctgcattggggtctgggagatgtggaccctcttcaccttgaagaaacgtcccccaagaatccttgggctgaaataattctgaaataatttctaagcagccttttttggggggagggggcggaggggtgggccgggcttcttggtgaaaagacctttctcctctgcaagaagggaagtgaccgcaggtcagcgccaaggtcaagcaggcagacccgcagtgagacccgttgagctgcttgcttctggcgctggcgcctctgagctgggcagagaagcttacagactcccacgtccagggtgcatcttggctcacatcttgtcccctcagccacagctgggggtgctgctggtcctcccattcccctctgggtcacatatcccctcatcgtgtcctcagacgcttcagcctgccgggaactctgtgctgtgtcacctggcggagcctcttccattcatctcctgccttagattccctgaattggcttccctttcgtggaatcgccagtttctcttcaagttcaatgaaggtcacattactgtccacccactgtgtgctgaatgttgtccaggggctattgagtagtcgcccaacaaacacttgggcgaccgcctactaagtgctggcactggggatacagtgatgaaaacagcacagttcctgcccctctgggtgcgcaatttagtgagaaatgaacatgattaccggctcctggagttcttaatggccgccttcagcacagagaaattaagtgacttgcccaaggccacatagctgcttaggggtcaaggtgggatctcaagaggggactgtggtagatatgttaagcatctcatatggcgatgacccagtgatgttggttttccttctagaacaaggtgttaaactttgttgtcctgtaaagtgccagatactattttttttctcttggaggctcacatggtctctgtcacaactattccactctgactatagcacca

SEQ ID NO: 28183 - DNA, 1250 bp, Artificial sequence
  DNA replication origin
tacaggcacaagccactgcaccaggctaagtaacttcaaaaaaactatcaatgcaagcttgggcaaggtggctaacacctgtaatcccaacactttgagaagctgaggcaggaggataatttgaggccaggagtttgagaccagcctgggcaacacagggagaccccatttctccaaaaaatttaaaaattagccaagtgtagtggtgcacacctgcaagcccagctacttgggggctgaggtgggaggatggcttgagcctgaaaggttgaggttgcagcaagccatgaccatgccgctacagtctagcctgagtgagagatcatgaccctgtctcaaccaaaaaagaaagagagaagtaaggaaggaaggaaggaaggagaaggggaagggaagggaagggaggggaaggggaaaggaagggaagggaggggaagggagaaagaaggggaagggaagggaggggaagggagaaagaaggaaggaaggaaggaagaaaaaatgaagaggaaaggaacggaactgaaaggaaagggaagggagaaagggagaaagagagggagggaggggaagggaagagaagagaaaagaaaaaaaggaagggaaggaaggaaggaaggaaggaaggaaggaaggaaggaaggaaggaaggaaagaaaactacctatgcaagggtagagtcacccagaacactgagctatgctatagccatttgctttccaaccaaacatccctactgctgtttccctcgagagctcctggctttccctgctagattccccgggtaccacactcacagcacaatgagggtgaggatgaaaaagaagtgcacacttccaatgaggttccgatagatccaaacaacccacaggtagccaggccgtgtacttagggtgtcgatccagctgtagatggagtgaatgaagagaggcagacctcgaaaagggccacagtcagctgaaggcttcaatctggtaaaacaaagatggaagaacatctctagcacaagactcagggatggttattctagaatcagggtgtcccttctgggctctgggcctgaaaacatcaagtcttgcctgatccaatcacacccacttcccaaagaaaccctcttgctctcagccttgctggggtgacctgtactctaaggacctgctctcagatcagagctgacccaacagcagccaatccaaaggccaagcagtgacttctgcagtaacttggctcaatgatatgaatgggggcag

SEQ ID NO: 28184 - DNA, 973 bp, Artificial sequence
  DNA replication origin
cccgggaatcaaccaccggaagtgccggccctgagaggtggagtcggggtggcagcggcggcggttgccaggagcccgcgttgcagcctgagatccgtaatatggcggggaggaggaggagaaggcggcggcggaccgagctgcgctctgtcagtaccatttgagccattcgcttcctgacaaggcccgtggcgaggggagaggagctgaaggggccgtgggggatcaggtgtgtgcatgaggagggggcttgagccttgacgggtccgggctgagaggtggtctggcgaggcgaaattggcgccctgagaagctgagggcgggctctgtgctgggctcccgggcctcgagccccctggaaaggcgccggctgttgggaggcgggaccccgggggcagccagcaccgggcgctgaggtgatgctccgatgctggccccgcctggagggccctcggtttggagtcttaaatcggaggagctggaggaggtgggcatggggcgctggggagagggcagggggccgtccctggtgaataaaactcgggccagagccggagaaccccatcgtggtgatcaaattgtttgggccgtttttcttctccctcccacggtgctggagagggaggcttccccggggtgtgcattggccatttatgagcccctgtttccacaaccaaggccctaggagcgctgcttacttcgcctttgccactctggggcataaacttgaggataataaagtaatcgattgcccctggagctgctagatggttcccaccctttgattctattctggttacgatccaagctccctacccccagtttaggcaaatggcagccatctcgagattgatttgacggggagaggtctagggacagggaaatgaggaagccgttgtccccttttctatatttttcagtttcatttgaaacctacggggaaccaagcactgtcgctgccctccaggaattc

SEQ ID NO: 28185 - DNA, 814 bp, Artificial sequence
  DNA replication origin
ataatcctaccacttttggaggctgaggtggttggatcacttcaggtcaggagtgcgagaccagactggctaacatggtgaaaccccatctctactaaaaatataaaaattagccaggcttggtggcaggcacctgtaattccagctacttgggaggatgaagcaggagaatcgcttgaacccgggaggtggaagttgcagcgagctgagatcgcgctgctgcactccagcctgtgccacagagctgagatttcgtctcaaaaaaaaaaaaaaaaaaaaaaaaaaagaagagaaaaaaaatcctcgcctttgtggtgcttatgtttccaaaaaagagaatttacaaaacaattaagtcaacccaattgtatgttagacaatgatccatgctatggagaaaaccagagtggggtgagggggtgaagaggaatggagggaattaggtgagggggtaggggtgcaagtttaagtaaggtgctcagaggaagcctcgttgagaggttacctgagcaggtgcttgaaggcggtgagaggggagaggtgagccctctgggtctgtggggtggaggccaggggcagaagaggccaaggaacagcttgtgcggagatcctggggtgggagcattgggagcatgccaggctggcctgagaaccaaggaggccaagagagaggcgatgagatgagcccgggagaggggcagaaactgacatggtcagagatcatggtggccttgggggccactgggaggacttgggctttgactctgactctgaggacaggaggggccaccagagggtgttgagcagaggaggg

SEQ ID NO: 28186 - DNA, 844 bp, Artificial sequence
  DNA replication origin
ccaattgtatgttagacaatgatccatgctatggagaaaaccagagtggggtgagggggtgaagaggaatggagggaattaggtgagggggtaggggtgcaagtttaagtaaggtgctcagaggaagcctcgttgagaggttacctgagcaggtgcttgaaggcggtgagaggggagaggtgagccctctgggtctgtggggtggaggccaggggcagaagaggccaaggaacagcttgtgcggagatcctggggtgggagcattgggagcatgccaggctggcctgagaaccaaggaggccaagagagaggcgatgagatgagcccgggagaggggcagaaactgacatggtcagagatcatggtggccttgggggccactgggaggacttgggctttgactctgactctgaggacaggaggggccaccagagggtgttgagcagaggagggaggtgatcccacgtgggatttaacaggctccgtgttgagactagactgtagggcgggggtagagcccggagcctgtggcagcacttgcggtgagaggcaggggtggcttggccccgggaggcggtggagatggtgaggagagacccaggatggatgagggctttaggttctcaggttagatgtcaaatcatacactgctggtccttgacgtgtccatgcacacagcttaccttcggcgagtgtgaggccctcattggtggggagaggctggtggctgtgtctggctcccctggcagtctcattcctcccgtgaattaacctcttggccgtctggttccctcgcccgcctctcctaagtttcttttgtatgagtcagctttcctgagcaaga

SEQ ID NO: 28187 - DNA, 1517 bp, Artificial sequence
  DNA replication origin
tgggcttttggtgtcaaatctgacgtatgtctcactgaagccctgtgagggggatgttatcaccccaccttagagatgagggcaccaaggcttagagaggttaggggacttgagcagggtcacccaggggaggcttcctcccggggctgcctgacttccgagtcacagtcttcttgggaggtgagtttctttcctctcccaccgacctgggagaagggggtctggagggctctcctgcattttcttgcacatgggtggtagcgcactctggctggaatggggacccccgagttcttgggcttggctcagtctgacttggctgtgtgaccttttacccctgtgggcccgcacccgttcccgccataaaacagtgcttctgagaagcacacttcagattcccactcgccctctcccaccctccaattcacccaaacgttaggctgctgggtgagtgcgcccggctgctgggctgtggggtgccctgtgttgcaggggaggtgcgccctgtggggaggtgggggaggtgtgctgtcttgtgagatgcatggtggggtgaggtgcgctgtgtagggaggtggggggaggtgcgctgtatagggagtgggggaagtgctatgtagggaggtgggggagtgtgctgtgtagggaggtggggggagtgcgatgtgtagggtggtggggggagtgcactgtgtagcgtggttaggggaggtgcgctttgtaggatggtagggggagagtgtgctgtgtagcgtggtgggaggaggtgcgccatgtgcgccgtgtagggaggtggggggagtgctctgtgtagggtcgtggggggagtgtgctctgtagagtggtgggggagtgtgctgtgtagggaggtgggggaggggaggtgcactgtgtagggaggtggggggaaatgcttagtgtagggtggtggggggagtgcgctgttgtgaagtgaggcacactgtgccgtgtgccatgagttaggaaaggaggaggaaggcagaaaggcagctctgtgcagaggtgggcagtggtgttggctggacctgggctggaattctgggggtcactagttaggtttctgtctccagctaagctgcagacctctattttctcctctgtgcaatgggaataacaacagtgtttctcatagggctgtctttaggattaacggaataatccgttgttgagcttattagcactgtgcctggtacacagcagccatctaatctgctgggccctccctgatgagggtgggggtcaagggaaggaaagggctttgaactcaaggaaaatagccacctttttcctctcctcacagggaacccagtttggccagtgggatactgctggttttgagaacgaggaccaaaaactgaaatttctcagacttatgggtggcttcaaaaacctgtccccttcgttcagccgccccgccagcacgattgcaaggcccaacatggccctcggcaagaaggcggctgacagcctgcagcagaatctgcagcgggactacg

SEQ ID NO: 28188 - DNA, 1352 bp, Artificial sequence
  DNA replication origin
ttcccccagccccgtctctgtcctgggttttaagcttgaaagaagatctctgtctgacggccctcttctgtcatccttcttgctcaggtgaggcgaaaggccttgcaagaagagatcgatcgcgagtcaggcaaaacggaagcttctgaaaccaggaagtggacggtaagtttggggctagggctctgcgaggaggtggcacgctcggcctcccgacgcttcccctcgcctccagcatgaggagtggagcaggagaaccaagtatgtccaggccccagaggcagccctagcctgcagcaggctccctccacagcagaatttgtcctgagctaatttccttccttctgaaaagggcgcttgcctccctcctagagagctggcccggtgagataagctgcctgaacctttgtctcagccctggactggtggggtgtcctaaggattaatcactgaggacacattccagcgagctcttgccagtggtggacgatgcctttggagggctgctaggaacagggacaagaggcagaggggagggagtggtcgcggcccctctcaggcctggttttcagatccagtctgactgggaaatgtccaagccgggcctgagaagatctctcaggagggaggagggtgcgaggatcatgaggctggagagtgtgaggttgtcaggctggggccctggcggagttcagtgggggctctgtgctgggtgctggacatggagcagatgaagcccatgtgatccccatcatcgcgctcacggtctagaggccagagcggggtgagcatggcagggaaatggttagcaaacaaggaaaggaagatcagttgaggtggcagtagcggtcaggagaaagaaacagaacagtgagctggagaggggctgcaacagatgggcgagggctgggaggtggcagcgcttgtccagagatgttcagggtgcagaggccccagccctcaggagacagggggaagagcgtttcagtgaggccagtggccggtgcagacccctaaggtaggaaagggcctggagtgatctgtagggaaggccagtgaggcggcactgcggctggaatgagggacgagagggctacaggccacaggcctcggcctcagcggccatgatagagagctggcctgggatctggctaagtgggattggctggagggcattgactcggcaagcgggaagacctggtagaaggctcagcctgcaggccgcagcctgaggatggtggcagaggatagagagagaaaacagctttgtgatttactttggaggcacagctggcaggacttgttcatagattggattttggggagacgagaagaaaggtctgggtgaccag

SEQ ID NO: 28189 - DNA, 1323 bp, Artificial sequence
  DNA replication origin
gcggccccgcccgtcagccgacaggcgcacagtgggcgctccccaaacgcggcccccgtccggccgcccgggtcccgcccctctcggccagcccaggtttcctacccttgcagatctgctcccacagattcttgcttgacggctcggtgacctgccacgacgagacaggcagctcgcgggacgcgagagacacggtgggcaccggcgtccgggtgaacgacgagtctgtagagcagctgggcttgaggcgcactatgtggctggggatttgccgcggtgccgccatggccgcggtttccacggtaaccgcgttcgccggaaggccgcgacccggaagaagccggaacccgagagggtgggccggcgactcgaagtggacttccgggtcacggcggagctggctctcacgtggaggcggggaaatttcgcccaccggtgagtgccagggcgcgttgcaggcgggccggcgcggggtgtggagattgcaccagaggaagtgcgcggcggggaagatggggaaatgcggtccacccacatccctgaatccgacccctccagtcggtgtgcgcccgctccggcctgaggccgccgcctccagaaagttttcccgcctcagagccggccctgggaccccacgtaatccctcccagtctgttgatgcggaggcttgggcccatgggagccttggaggtacggatcttacttcctggctcccgcgcgtcctgctggtgatcctgccgggggagtggggtgttgctgcacaggctttggagtcctgtgggcggaattccagtctccgttttccacttgctggctttggaacctagggcaagtgaattattgtagtctctggagcttgcgaggtcgggtattcacaaagatcttcacaaggctgtccctggaatttaaaagcggttttggagaaagcgtttgcgtttgcaggagatgcactgtaacgttcttttcctttctccttgaaagagtgaatgcatttggtcgcagggctaaagaggaggatgctatacttttctaaatggcaagagatggggagagaaggggattaagagttgacccgcaacctcccggtggattctttgttcttaccagatctcttggccactcccctattctgaagtcgtcttggctctcttgactgctcccctattctgaagtcgtcttggctctcttgactgctcccctattctgaagtcgtcttggctctcctgactacactatttcaaggtttgcaccttcttctttgcaagctcctttatctctgcccacttatttaaatgccaatacaatagtccccctcccccatta

SEQ ID NO: 28190 - DNA, 1415 bp, Artificial sequence
  DNA replication origin
acaatggcggggggggcagtggcgtttcccttccagacagggggcacttggacctctggaagaggcggctaggctggagataaggactagacctgttctcggtcccctctccttgggggacacaggcttccagccccacaaggaccccacacatcccggggtccctagcgcttaggccgaaaagggagcgcgcgggaggagcccgcacccgccttggccccgggcagccggttgaacagcctgggaaggggccaacgaccttgccccagaaatctcccccgtgcagcgggttcactcctccgtccttgctctgtcacacccaggcctagccagtcctccctttccgtcccccgttcgctaagggggcggctccttggagcgcggacaaaggcccctggagtgtggcgggcagcggcgtccccgcctggggccccagcccacgcgccacattggccgcccaactgcaccaggccggggggcacctgaacagagcccagaaagccctgggggaccccgcaaagacaagagaagtgggggagggatctggcacaaaaaccccggcacttcagccaaggaaccttcttaattcagaagtttcttcggtggggactcgggcttgcggaggatccaggctttgagttaaactgcatgcaaatgacatgtaaatagaatgcaaattggcatctgtcgtttggaagccctcccggccagtttggtatctaagactgtggagtgaacagtttgctatctgctccctgctctaagcctggaaaggggtcagctgagttgggaagggaaggagattccaggaggaaggagccgccatttgggggcacaggcagcaagacaggcagttttgttagaaagataaactcagaatctttactggattaatatgttatttcaagaaacgtgccagggacagaactgggtgccttgtataaaacggacaaaacccctgctctcccggggctggggaagtgagtggacaaacattaaacaaacccatagcaaatggctatgaaatccgattggggtgaggacggccaggaaaataagatggggtgatgtaaaagaaggtgacaggggtgtatgtacctgagatgactgttccgggagtgacatttgagtggagcccagctagaagaggggccctccgctgggaggtcttggaggaagactgaaccaggaggaaggcactgtgcctgcaaaagcttggaggtgggaatgagcttagaggaactgaacaaaggccattgtggctggagctgtaggcagatttgggggtggggataggggaatggtagggaccagccagatcatgatcttttgggtcatggaaaggagtttagggtttattctgtttggaccagtgaacccttggagggttttgagtgggaggccatgggatctga

SEQ ID NO: 28191 - DNA, 1539 bp, Artificial sequence
  DNA replication origin
ggcttccgcgctgggacccctgggtcgcgatacctccctcggtaagtgtattggctaggggagtgttcccgcaaatggatctaccctggggagttgcccggctcgtctggactgcttacgggcgcactgacgttgtggggggaatgtccccgaattgggggcacgaggtcgggggaatcgtctctgagatccgggctagaagctacgagcttgggctccgggggtgcatgcagacggcgcctagccccgcgcggaaccgccggcgggaccgggggtggggctcggaggcccgggggcggggccggccgggggcgggggcgggggcggggccgcggccgctgcagcagcgcgggccgggccagggggcgcctcgcgcggcagcgactctggcaggcgctgcagtgaagctggacccgcaggcgggcgtgcgtggagcgggggccgcggccgcgccgcagagatgtgactcgggccgaaggccagctggagcgtcggcgctgcggggccgcgggggtcggtaagtgcgagctgcgccgatgcagtggaggacgctgtggggaccccagaaacttttcccgccgtggatttgggagaattggggggtccgcttcttgtgtttttctaagcgcccccccaacccaagccagggagtttattgctgggggagatgtggaatctgggcgaggggaaccacggtgcgacgagagcagagccgtagaggggtgggcgggggaggggaggatctggggacctttacggggggagggagactgtgcccggaccaggtagagatccaagtctcccaggagggtgtgggggcgaccacaggtgaagggcagctgggagggtaaaggagcccagccgtgtcctagtgactcgtcatgtgtgaggagctgcgggctggtcctggggccgcgttgggggctgactgtggacagggcagacgcagccgggggcacaagggctggactttgggggtgaacagccgcacctgtcgcgggggctgggggtcaagcccgcagccggcttgagtgcgcattactcagcaaggggagggggggacacggcggtgggagatggcagagctgagacctgggctggggacgaatgacggggaggggtggggaggagggggcggctgcatacaatggcggggggggcagtggcgtttcccttccagacagggggcacttggacctctggaagaggcggctaggctggagataaggactagacctgttctcggtcccctctccttgggggacacaggcttccagccccacaaggaccccacacatcccggggtccctagcgcttaggccgaaaagggagcgcgcgggaggagcccgcacccgccttggccccgggcagccggttgaacagcctgggaaggggccaacgaccttgccccagaaatctcccccgtgcagcgggttcactcctccgtccttgctctgtcacacccaggcctagccagtcctccctttccgtcccccgttcgctaagggggcggctccttggagcgcggacaaaggcccc

SEQ ID NO: 28192 - DNA, 1115 bp, Artificial sequence
  DNA replication origin
agaaggaggtgttctgcatctccccttcctgcagcccccgggagaggggagcaggggtccgtcctatcccttttggtcttatgtggctgggatggttgcggcgacgggggtagagattggggggcgcaccgcggagggagaaaggaaatctcaccctgagaatctggagtgcagggaagggatgctgctcaaaggtctgtttctggctttggcggggggccacctgagactgccagggtttgatggtctgaaggtcacccagggaaccagccccatatggggtgccggagcgcagctcccaggcctggtcgaagcaatgcgacctcggagaggcctgaggactaggacggggtgagggggactcagagacggctgccccggacccctccttcaagcaggtcccacggccgcccagcggacacgcgtccgggctgtgccctgaccgtctgcggagcgcacggccagtggcccgggccgctgagtgtgtgagccctgaagggcagtggacatgtgcgtacgtgggtgatgtgtgcggtaggggtggtggcgatcctgcgtagggacccacgtgaggggtgcaccgactggacgtgtgtgtttcgaggggccaaggaagcgggtgttggtcccagtgtgcgtaaacggacaacgacatctgggagttgggcagtgaggagagagaagagtgtgtccaggaggaacctgcctggaggaggcctagcggtgtgtgtgcgcctaggtgtataccggggcgttggtgacttcgagaggcaccgggcgggatcgatcctctctgcgtcctggacctggtgctggtgtgtttcggggaagttactgcttatgaaccccccttggagcgtggcctgggggcaggaaggcttccgcgctgggacccctgggtcgcgatacctccctcggtaagtgtattggctaggggagtgttcccgcaaatggatctaccctggggagttgcccggctcgtctggactgcttacgggcgcactgacgttgtggggggaatgtccccgaattgggggcacgaggtcgggggaatcgtctctgagatccgggctagaagctacgagcttgggctccgggggtgcatgcagacggcg

SEQ ID NO: 28193 - DNA, 917 bp, Artificial sequence
  DNA replication origin
atggggtgggggcgtagagggctttgtgtgtgtttggcttgactgcatgttctggacagaaggcttcgtggaggcttcccttctcccgtggcccctgcacgtccaccccacttggggcacctctgcccctctgcgtgtccccgcctgacacgagatgaagctggagaccctgacattgagcactctcttgctcggggggcactggaatggagaaagaatgcctagcaagaaaagggtctcccagctggctaaggagaatcaggggttggctctgggaccatgccctggccagggcaagggtgcagagacacacagggcagcctgcggtggctgccacctcagggggtcacagtctccttgaggacatgcctggccccctggcttggcctccaggtctacccaccctgggcagctcacggctgctgtggatgtctggctggtcccacatcttaatgtcctttccaaagtgtggctgagacttgtcctgaattcctgaagagagctgagctgccgagaaggagggagtgcttgcctgggccgtgtgcgagagagagcgagagagagagaaagcttttttcctggggctccagctttgggtggaccctccttgcaggcagtcttggtgacaaatagatccctaaagattacttgcatgcagagaggagagagggactgaaagaagcagagagaaagagagaaaaaaaatccagtgtacagcctgaaatcttagcatcatctccctagtcatctcttagtctgcgaaccttagcatcttgcgatcctgggaacttgggagctggatttctgagagcctggctgagatttcctttcccaaacattcaacttggcagtcagggcccctgatgagattgtttcaataaatcccccctcccaaatttggcaggcatgagaaagcg

SEQ ID NO: 28194 - DNA, 1010 bp, Artificial sequence
  DNA replication origin
acacacactccgcttccaggcagccgctgattggctgcggggagcggcgtcccagccccccggctttgaggcgggagtggagcgggtccgaggtgggaggcgcacagacgggctccgggagcccctcccgaggccccgcgcagcgcgccccgcaccctgcgccccgcgccctgcgggagggctgagccaagactccaggcgggcaggtgcggagcgagcagaggggatcacggccaagggtaggagccagtcctgcggggagagaggcgctgctgctccagctgccgctgcctccgccgccgccaccaccgagccggcgaccagagtcgggctggcaggccgggcgcgaagcggcaaggggagcgaggggcgcgctcatggagcacacgcacgcccacctcgcagccaacagctcgctgtcttggtggtcccccggctcggcctgcggcttgggtttcgtgcccgtggtctactacagcctcttgctgtgcctcggtttaccaggtgaggggcgtgggggagagggagggaagccaggaaccccaagtgccgggcaaccctacccagaatcccccgtcctcccccgtgcgttccctggcgccccctcggaaaaagtttaagctttaagggcaactatggatatttccacacggggggaaaggaagttgctgtgccctagctggggaccgtgtgtgtgtgtgtgcgcgcgcgagcgtgtgtgtgtgtgtgtgtgtgtgtgtgatgactgtgacggcgggcgatgggctgggcatgtgagcatggattcgaaggtgcatttgtgcgcgcatctggagggggcggctttcatggggtgggggcgtagagggctttgtgtgtgtttggcttgactgcatgttctggacagaaggcttcgtggaggcttcccttctcccgtggcccctgcacgtccaccccacttggggcacctctgcccctctgcgtgtccccgcctgacacgagatgaagctggagaccctgacattgagcac

SEQ ID NO: 28195 - DNA, 1371 bp, Artificial sequence
  DNA replication origin
gcacagcaagaggctgtagtagaccacgggcacgaaacccaagccgcaggccgagccgggggaccaccaagacagcgagctgttggctgcgaggtgggcgtgcgtgtgctccatgagcgcgcccctcgctccccttgccgcttcgcgcccggcctgccagcccgactctggtcgccggctcggtggtggcggcggcggaggcagcggcagctggagcagcagcgcctctctccccgcaggactggctcctacccttggccgtgatcccctctgctcgctccgcacctgcccgcctggagtcttggctcagccctcccgcagggcgcggggcgcagggtgcggggcgcgctgcgcggggcctcgggaggggctcccggagcccgtctgtgcgcctcccacctcggacccgctccactcccgcctcaaagccggggggctgggacgccgctccccgcagccaatcagcggctgcctggaagcggagtgtgtgtggggtgggagggatgcggaagaggagggggtcccagccgcctcgcttggctccactttcaggggagaagatgcagttagacctgggagccccgaaggaagaccggagtggaaaacaggctatccccaatctccaaccccgagggaggggcgtggtgtgggtaggatctgcctctcccgcagcggctcctcactcctccagcgtgtcctcagtttgcctttctccactctcctcgcagccacctctcttgcccctctccaatgcttccagtccatctccggatagaggattctatacctagggcaaagaacgggggaaggggtggggctgttggagcagcgaggatgctaaagcgttgtcggttttcctcgacaagggaagctgagcttgctggctctggaaagaggggtgcgtgcctccctgtgcgtgtgtgtggcgactctgggggtggccgccggtgaactgtcccctaactggagtgcgtttgaagaggatacagactggctaagagaagcccctcctgcatgccgcccttcagtcaggaataaggatgttgcagacactcaaacacgcactcgcccacgctcacacaaagacacacaatacccaggcatgcggtgtactcacacgctcactcaggcacgcggatgctctcccatcccacacccagacccttgaaaacacgcaggcatcctcatcaccatgcacaagaccacactcacagggcgctccaaacatacgaaaacgcacgcgggagtcatgggggcttgtcgagagtgcttgaaggttgtgtgaagggtagcatttgtaaggcaggtgggatccaagcaatgtgtgggtgggtggtcctttctcctcagggcaggcaggtggagggttcc

SEQ ID NO: 28196 - DNA, 887 bp, Artificial sequence
  DNA replication origin
agaacgtgggtcaggctacagtataaaaccagtctgtttcactccagagactgtgccctcaaataatttaagccatgtgcgcttatggataacatcttggaggaaacagaggaacagaaaaagtccacgttatcatgatggagggaacccgagggactctttaattttctccactgctgtttttagaagttacacctttgcccctgtcaccctcccagctgctcaaatcaacgtgattccaccatccacgtggaggagaatgggcagtcctcggaaagccggttctcagttcagatgttcatgtttgctggacattatgacctagttttcctgcattgtgagattcatctctgtgattctcttaatgaacagtgccagcctgtgagtgtctctttgaactgaactcttcagagcctggcatggagcctggtacctgataggctttccatatatatttattggaattataaacgcagggagggtgggagggaggggaaagggagggacaggaagagaagggaaaggggaaggggaaagagaacgggaagggaagggaaggatggacagaagggaagggaatgggaaggtgaaggggaagaggaaagggaaagggaagattagggaaggggacgaggaaggagaaggagggagggaagggaagggaggggaaagggaagagagagggagaaaggaatacaggagggatggagaaaggaatacaggagtgatggaggaggaaaggagggacagggaaggagagaaggaaggaagcaggatgaagagacggaacgagataggtaggtgtatggatgggagggagggaaaaacgaacaataaatagatagactctagatctcctaaaggcccatatctaagcaatttttgtg

SEQ ID NO: 28197 - DNA, 1280 bp, Artificial sequence
  DNA replication origin
agcagctgcgtaaacacgccaggctccttctcctgcgtctgccccgaaggcttccgcctgtcgcccggtctcggctgcacagacgtggatgagtgcgctgagcctgggcttagccactgccacgccctggccacatgtgtcaatgtggtgggcagctacttgtgcgtatgccccgcgggctaccggggggatggatggcactgtgagtgctccccgggctcctgcgggccggggttggactgcgtgcccgagggcgacgcgctcgtgtgcgcggatccgtgccaggcgcaccgcaccctggacgagtactggcgcagcaccgagtacggggagggctacgcctgcgacacggacctgcgcggctggtaccgcttcgtgggccagggcggtgcgcgcatggccgagacctgcgtgccagtcctgcgctgcaacacggccgcccccatgtggctcaatggcacgcatccgtccagcgacgagggcatcgtgagccgcaaggcctgcgcgcactggagcggccactgctgcctgtgggatgcgtccgtccaggtgaaggcctgtgccggcggctactacgtctacaacctgacagcgccccccgagtgtcacctggcgtactgcacaggtcagccggagtctccccacagtcctcatcccaggcctggaaaggcactgcagaggacgggggtgcgtccttattgattgtctgtctgtccctgtgaccctgcagaccccagctccgtggaggggacgtgtgaggagtgcagtatagacgaggactgcaaatcgaataatggcagatggcactgccagtgcaaacaggacttcaacatcactggtgaggccagtggggaggaagcgggttgttgagaaacctgtcactgcctgggggagggacacattcctcccctgtgagattggggccatatgggtatgacgcaggggatatatatccaacctgagtgaaaacagaagatccactaatacccattaaagccggcaagaggctctctgaggctccctgagtctccctttagttgacttcaaagctgccaaagatttggggacctcctcgcacccagccttctttctgaggcccacaccacagtgggcacccacgttgctgccatctgggagccaaagaccatctgagccctattcctgcagcaccagaacacaagcccggcccggtgagcagtccaccaatcagctcaggcctgatgaccagtccaccaatcagctcagtactccgggccaggcacaagcctcagatttctcat

SEQ ID NO: 28198 - DNA, 2168 bp, Artificial sequence
  DNA replication origin
agagaatggctggctgagaatctgcctggctgagagaggctggctgcctgagaggcttgttcagaggatgcctggtggagaggctggcttagagattgactgagaggctggccgagaggctggctgggaggctgtttgagaggctgggtgagaagatgactgtttcaaaggctgtctgactgactggctgagctaattagaggcttactgagaggctggatggctgagaggctggctaggaggttgtttgagacgctgggtgagaaaatgactgtttcaaaggccatctgactgactggctgagttagagtcttactgagaggctggctggctgagaggcttgctgagaggcaggatggcagacagcctggctgagagctggctgcctaaaaggtcggctgagaggctgcctgagaagcttgcttgctgagaggccagctggcaggttggctggctgagaggctggcaaaaagggcagctgtgagtctggccaagaggctggcagtctggctggcagtctggctggctgagaggttgactggagggctaaatgaaagactggctgcatggccaaatggctggctgggaggcaggcagagtggcaagttgagtgaatggcttgctgagagcctggctgtgaggttgccaggctgagaggcttgctgagagtatggctggcttagtacctgggagaaagtctggatgggagggtggctggctggggaactggccaaggggccacctgggaggctggccaatgagaggccagctgggagggtagcagagaggctggatgaagggtggctgcctgagaggcttgctcgctgagagtctggctgactagctgtattaaaggttggctgtgtggtttgctgggggcctggtagaggggctggttgtgaggctgcatgacaggccttctggctgataggctggcaggctggcagtctggccaagagacttgctgggtggcttgccgagtggatggctaagaggctggttgagaggctggctggggaggccagcagagaggtggctggttggctggctgagaatctgcctggctgacaggctgggttagaatcttgttgagaggctggctggctgagaggcttgctgagaggttggctggttggttggctggctgagagatcggccaatgccgggctgggatgctggccaaaggacgcctgggaggttggccgacagtccagctgggaggcttgctgagaggctggttggaaagttggctaagaggctgcctggaagcctgggtgagaggacagatggggggctggctctgaatctgcatggctgagagactggcttagaagatttatgaaaagctggcttagaggctgtttgagaggctggctgtctgagaggctgactctgagacctccttgctgagagactggcttagtggcttgctgaggggcttgctagctgagaggctttttgagggcctgattagcaggctagctggctgaggcaagtcaagggggtgacttggaggatggtcgaagggccatctagctcactggtcaagaggctcgctgggaggctggttgagaggctggctcccttgatggttgggaggctggctgataggctggtccagaggatggctgcatgggagactggagaaaaggcaggctggggggctggatatcaggctgtttagaggctgttttagaggctgtctggggagtctggccaagtgcaggctgtgtagctagctgagagggtggaggtgagaatggctgactgagaatctgcatggttgagaggctgggttagaggcttgctgagatgctggctggctgagaggcttgttgggaggttgagaggttggctgcctgagaggctagctcagagaccacgttgttgagaggctggcttagtggcttgctgagaggctggcttgctgagagacttgccaagaggctgggaagcaggctagctggctgagacgctggtcaatggggcgtcttggaggctggccgagaggatgtctgagaggatggctggctgtgtttctgcctggctgagaggctggcttagaggtttgctgagaggttggctggctgagaggctttccgagagcctggtggtatgttacagaggatggctgcttgacaggctggctcataggctgcctggtggag

SEQ ID NO: 28199 - DNA, 916 bp, Artificial sequence
  DNA replication origin
gtgaatttggcctgtgatccaatcagaagctgcgattctaaacaggaagccacactggatgcgagaattggggtggggcgcgccaagaggagcaagcattatagaacgtggggagcatgagaaatacacggaggtggaaacgccggagtggctggcgggtaaaggcagcgggcgcagatgaagcgggctgggcgtcccacgcgcagaaccgtcccggacagaagccgcagggctgcgctggctggaaaaaggaacgcgagtacagcgcgcgtggcgcggggtctgctccaggacggaatcttttgggtggcccgcatgaggggtttgcaggaccccgggcctttgggaagttatctgctaaactccagtagaccctgaggagcagcggctcatgaatcttcttaaacttctgtcatcagcggctgggccagctgaaggtgaccatggcacacgagggagagagaagcccgcgagaggcggagaaatgtggggtcgtccaggagggtcgacaaggcaaagaacctgaagacgacccaaaagggtacctaggtggggccctttcagggacttggggcatagggtagggcgcatgggacgaggtgggtgagcgcaagggacgagatgggtgtgcgcatgggacgaggtgggtgggagcatgagacgaggtgggtggggcggtgggtgaggtctccgcccccagacgggctggcgaggaagcagggaagaagtaacgttgggctggtgaggcaacaggtggggcgcactggagctgcgggataataggtggaacaaactggggactacactcgtgggcgcacgtgcggaagagggactgaggaggttcttgcgtgctcccctcgagcaccgccgacagcttcacccgcacctcctgccttccgcaccgctgactcctacc

SEQ ID NO: 28200 - DNA, 1182 bp, Artificial sequence
  DNA replication origin
aaattcacaatctccggtatctagtccagagtaccaggaagcaggagattgtgacctatgatcagaaaatcagtaaataggaagggaccctgtctggaattaactgaccaggacattgaaatctattaaaattacattcaggaatttaaaggaaaaaaggaacatagcaaggagagaaatagaagacataaaaaagaaccgtatggaactcctagactcgaagagcgaggagagttgctgccaggcttgccttccatgtgtttcgggtacgtgcatttggtaaggttagcggtctgcttcatccaatggggaatcaaaacccaagttaaatgacttgccaggaccttagtgagcaagaagctgctgttatataacctgacgactgccagatatgttggcctgcgtcattaggataccagaatcttgaaagggtaaatttaatgagctgaaatttcatagctggaaatgtagactcagaacatttgcacagtagtagacggtggtgtaacattgtgtgaagccgagtgttttgctggctgcgctggtgtgcaggagcttcctcggagcccttgtggttggaaggtgcactctgtagcacacccattcttagcttgtctaccctgtggccccagtggagcgttttggagctgctgggaggagctgtccagggacagactgtcatggtggcagtgggctggaaactgttgtctttggggaaacggttagaaattgagatttcacaaggtttgataatggttagatgcctggagaagcagcacataagtgaagaattaggctggttttgtaggtgctaagagggtcagtggaggaacagcagctccgcggaggtgggcttcagcccagctgggattttgtcattttcttcctggggtgcacaaggcttgctcgaggacctgtggtggtgagtgctctgtaactgctcaggcggacaggaaaccgccgtggagcacgcagcactgcctggcggtggttgctttgggacatgacccatcactggaggtgctcaggtggagtcagggtctttggctggagccaagctctccacatgcagcatgcaggtgggcatgttgaatctcctttgaatctcatgaatttgagattctgatttagtgtagctaggcaatttctagcatattgcaagtatcaacattctgttatgtg

SEQ ID NO: 28201 - DNA, 977 bp, Artificial sequence
  DNA replication origin
cagccccgggccggagcggggtgttggcggcggccggttcgggtggcgactcgcgcttctctgggcggcggcgcttggccatatcgtgtcggggaaggtaatgagccgcagagccccggggtctcggctgagcggcggcggcggcggcggcggcggcggcggcaccaacggcaccaactattcgcggagctggaatgactggcaacccaggtgggtgaccggcccgggaccccgccccgacctcccgggctccgcctcgggcgggcggaggcctagggccgcggggctgggaggcgcggcctaggccctccacccccgggagccgggcgcggcttcctgggtctcctccgccccggctgggggaggaaggccgcggggaggcgaggcctaagtgcctctcccctccctgcttgttcagcccggggctgaagccgagacccggggctcccggcggtggcactggcctagggtcgggaccaggaggtgagaaagaggcgggggtgggggggcggggggcattccacttaccgcttccccctgaccccgagttgggagattctgagagtacaggaccctccctgttactcattcactttctcggttccccagtctttcagccgccacgtgagagctcttctaacctctgttcctttctgtgacccccacgtggtaatattgaaaaaaccaaaacaaaactccagctaaggcattgctctgactttaggcagaacattcattagtggagcgtgagatgagattgtgtgactgttgatgggatcgacctactctggtcttgggcgatggaagttttccctaagtgcaaggccggttactctggtgaatcgtaattcatacctggacacttgagtgaactctgggcacccacttagaagtctagagaatttcctcttttatggaggatttgatgtcagaccgttttggggcttagttagatttgaatatattaggaacattaa

SEQ ID NO: 28202 - DNA, 1485 bp, Artificial sequence
  DNA replication origin
gggctctgcggctcattaccttccccgacacgatatggccaagcgccgccgcccagagaagcgcgagtcgccacccgaaccggccgccgccaacaccccgctccggcccggggctgagaaggaagccgagaaggaggaggaggaggaggcggcggcgggcgggggaagaggacgaccgtttcgggttccgcctgagcccgcagcacaggacgaggaggcgggagcggcgcggtgagagagaggcggatgaaggggaggcgacgtctcttccagggccctgcgcggcccacgtcgccggggcccccgaggaggaggacgacgaggaacaggcggtggcggcagctcctcacgctcacacggccactgcttccccgcctcccggctccgctcgccgcgccgccgctgtcgcacggcatgctgggagcgagaggcggggtcggccccgccgtgcctgcggagagaggcgggtcctgtcggcggggcggggccgatagcaggccgccccgccccccacggccccaggctcttggacggcgaagaggtctgggcgtagcggtgacgaatcctaagacgggatctccactactgcggccacacacttttctcccaaatgcttcccggaaagcaccggagggccaggcagtcaggtgtaaacaggcgtccaatcaaggacctgcggtggggggggggggggggggcgggctgttgccctggggtgcgcgcgcacacaggcgcgcccttggattcacgtgtgccagttttcccactttctacggggcggggtggaaagtgaaaatagtcagatcgacaggtggatatccaccttcccaacctccacctgaaatgtgcccatcgagtcctagcaccttttaccatttcttcccaatgaaaaaaactaaacgatggaagggaagggagtacccacgaccaccaaaccctgtcctctgcaatgtgaaatgtgctttgaagtcctctcaccctgaggcttgcccgccttctgctggtgaaagaagctgggggctaggcgcggtgggtcacgcctgtaatcccagcactttgggaggccgaggtgggcggatcatctgaggtgaggagttccagaccagcctggccaacatggagaaaccccgcctctactaaaaatacaaaaattagccgggcatggtggagggcgcctgtaatcccagctacttgggaggctgaggcaggggaatcgcttgaacccaataggccgaggttgcagtgagccaagatcagaccattgcagtccagcctggagaacaagagtgaaactctgtctcaaaaaaatataagagagagagagagagaaagcagggagggaagaaaaaggaaggaaggaaggaaacgagggagggagggaaggagggagggaggaaggaaggaaaggagggaggaaaggaaagaaaaggagaaaagaaagagagaaggccgggcgcggtggatcacacctgtaatcccagcact

SEQ ID NO: 28203 - DNA, 1284 bp, Artificial sequence
  DNA replication origin
catggagaaaccccgcctctactaaaaatacaaaaattagccgggcatggtggagggcgcctgtaatcccagctacttgggaggctgaggcaggggaatcgcttgaacccaataggccgaggttgcagtgagccaagatcagaccattgcagtccagcctggagaacaagagtgaaactctgtctcaaaaaaatataagagagagagagagagaaagcagggagggaagaaaaaggaaggaaggaaggaaacgagggagggagggaaggagggagggaggaaggaaggaaaggagggaggaaaggaaagaaaaggagaaaagaaagagagaaggccgggcgcggtggatcacacctgtaatcccagcactttgggaggccgaggcgggcagatctcgaggtcaggagatcgagaccatcctggctaacacagtgaaaccccgtctctactaaaaatacaaaaaattagccgggcgtggtggcgggcgcctgtagtcccagctactccggaggctgaggcaggagaatagcgtaaacccgggaggcggagctcccagtgagcagagatcgctccactgcactccagcctgggcgacagagcaagactccatctccaaaaaaaaagagaatcagctgggtagaggagacgtacctgactgtctaccccatgacatgccccatgccccagggaaaaaaattccctaaagcatctgatgcataacgtgaatgcatacacattttttaaaaggtgggccaggatgctccttaaacaagtgcctaaaccttatctgcataaggagtcttaacctatcattttatgttgcaaagaaaacgtctttatatatcgcttgtgcaattaaaaattgttaccaaaagtacttgaagattacgaggagttgacacctccacacacatgcatatcccctccaccttgggctccttgcttatggccaccaatccctcactaagggaggatcttgccagttctaaatgatggggactacaaaaattacaaaaattacccggcgtggtagcgcgtgcctgtggtcccaggaactcaggagggtgaggcaggaggatgacttgagtccagcgggtggaggctgcagtgacctatgatcctgccactgcactccaggctgggctgcggagggtagggagggagggagaagaagaaagagaaaacgcggggcaccatggatggctgactcctgtaatcccagcactttgggaggccgaggtgggtggatcacttgaggtcaagagaccagcctgacaaatatgg

SEQ ID NO: 28204 - DNA, 870 bp, Artificial sequence
  DNA replication origin
aggtggaggttgcagtgagccaagatcgcaccattgcactccagcctgggcgacaagagggagacttcgtctcaaaaaaaaaaggaaacactgcctttgcttccctgccctggaactgcttcattttccttggggtttccggaccattttgacctctctctgtggccagcaatggtggggaggcgggtggatctggagccggcatgggcaggctcagcattccagcccattctggggtgaggttggccttgggtgaggacaggggtcactgggtcagacattcattttctggagcccagggcggtgacgtgtccatcagggaagcacgcgcctgtgctggggggtgctccctggaccagcagcgccggcctccctgggaccttgttctgtgcagatgtgttgtctccctctcccccgacctgcctgatcagaagctctgggtttccatcccactcccccaccactgcttttacaagtccccccaggggatgacacgggagatggtggaggctgtctatcagtggataaggtgggggctgtctatcagtggagaaggtgggggctgtctatcagtggagaaggtgggggctgtctgtcagtggagatggtgggggctatctgtcagtggagatggtgggggctgtctgtcggtggagatggtgggggctgtctgtcggtggagatggtgggggctgtctgtcggtggagatggtgggggctgtctgtcggtggagaaggtggaagcttgtactcagagcaggggatatttagacttgaaggggccagggaggaaggtactggttctactaagccccatgttcactgggcagccactaagttagggaccgtgtgtgtaccgagtggattccg

SEQ ID NO: 28205 - DNA, 1200 bp, Artificial sequence
  DNA replication origin
gggctgggatgacgcgggcgccgggggggtaggtcgcgaggccggggtctccatggcgcaggagtacgggggccttcgaggaccacgcgggcctgggaatcgcctgccaggctaggccggacgacgcacgtgctccgagctgggtcgagggggcggggctgagggccgcggccgggccacgggtcggggaggagccgcggacggtgggcggggccagtgggccggggcctaaaaggcggcgcgggcggggttcctgacgcagctgcgggcggcgggcggcgagcggcgcgcacaatcctcgctcggctgcggctcccgggtgtcccaggcccggccggtaagcagagcatggcgggtgcgggcccgaagcggcgcgcgctagcggccccggtggccgaggagaaggaagaggcgcgggagaagatgatggccgccaagcgcgcggacggcgcggcgccggcaggcgagggcgagggcgtgaccctgcaggggaacatcacgctactcaagggcgtggccgtcatcgtggtcgccatcatgagctcgggcatcttcgtgacgcccacgggcgtgctcaaggaggcaggctcgccggggctggcgctggtggtgtgggccgcgtgcggcgtcttctccatcgtgggcgcgctctgctacgcggagctgggcaccaccatctccaaatcgggcggcgactacgcctacatgctggacgtctacggctcgctgcccgccttcctcaagctctggatcgagctgctcatcatccggccttcatcgcagtacatcgtggccctggtcttcgccacctacctgctcaagccgctcttccccacctgcccggtgcccgaggaggcagccaagctcgtagcctgccactccgtgcgtgagtacggggcgcgggccgggggttgggaggtcgtagtccctgggtccctgcatccttgcatcactacgcccctggctcccacatctctacatttttgcgttcctggaccgtcccggcagttctaggctaaggtcattggtcccagaaaccaagtgcgtttctttcattcattcttttacacttctccccacaggctgggaatatcttcagtgacgggacagcagggtccctgccctgcccttcggtgggcatttcattcccccacttaagcggttcaggcaagtgccagcctcccgttggccccgctgagc

SEQ ID NO: 28206 - DNA, 1472 bp, Artificial sequence
  DNA replication origin
gccgcttcgggcccgcacccgccatgctctgcttaccggccgggcctgggacacccgggagccgcagccgagcgaggattgtgcgcgccgctcgccgcccgccgcccgcagctgcgtcaggaaccccgcccgcgccgccttttaggccccggcccactggccccgcccaccgtccgcggctcctccccgacccgtggcccggccgcggccctcagccccgccccctcgacccagctcggagcacgtgcgtcgtccggcctagcctggcaggcgattcccaggcccgcgtggtcctcgaaggcccccgtactcctgcgccatggagaccccggcctcgcgacctacccccccggcgcccgcgtcatcccagcccgtcctcccgggtgcgcctgggcggggcctggcagtcagggcgagccccttcacccactggcccgcagcctctcgtcaagcctgggagcgggcagtgcaccagggctggcctgaggccaaggatggggtttggggtaccccccgaagggaacctaggctcctgtcccggatgggccgaggggatggaaccgcccccacaaccagctcctggggcacgggggagggatgagaagatgacctgaggggaagctcctgcagcctccttccagcctgggggctgcatcaatgtggctggtgagccgcgaactgagacgagggaagaaccgaaccgaggccacccagtaattcccattgtatcccaaaagaatcttgccaaagatggcgatccggtgcccgtagctttgagaagcagtaataacacaggctttgggaagccagcactctgcctgagctcaatttaatcaacagaaccgggggttcaccgggagccataagacccccacccccaaatctagctgggaaattcaaaggcaggcttcagtgtgaaggggctttaaagcttgttattcctggggaatgcgagaggcatcttagctaaaaagggttgagaggtaatttcagttagaggcgagagcaggatgccaaggctcctaggcctggaaacgggaaggaatataaatactgccccgagattgaccagactggtgagcagccaaagacctgttcaaagggtgtgtgtgggtcagggaggaagctcctcggtatccccccaacccggggttccttggcgtgtgtcctaacgagtacttggaagctcacagcaggcatgtggggaggcctttgttctgggtgagcgttcagcctcccagggcaaacacgcaaacaccggttgcagagctgggtgttcacagcaagacagtctgctgggcagatgcctctggaatccacagaattctgaacaatagccgtggtggagggggggtcagaatccctgtcgtgctgggacctctagctgcagccaggaatgtccaggccccaccccggggaggaggcggctgaggaatgccacggcttgtcattctggaccttgctcgcccccc

SEQ ID NO: 28207 - DNA, 1551 bp, Artificial sequence
  DNA replication origin
acagggagaccgtggttgggacaagtgtctgaaagctggttgaggatggaaaggagtgactgtgaagcagccgtggggacagcaaccccagccagaggcccacacacacaaggtgacgtggaagagggccaggctgcgaatcttgctgggagaagctcgtgctcgatcccaagcctagtggaaagcctcagttttgaacagggcagcagaatggccaagtgtcggtttctcaaaaaaacccactgttaaaagaaaaagggatttgagggaagaggggaagaggctggaaaggaagtggctaaactggaagcccagcttgtcactcaggctgcagcagaagggacagagaaaagtggacggacttggaataggcagcagtttgagggtcctccagcagagcgtgctgctgccctgggtgcaaggagtgaggggagaggagggcccaagggggctcccgagattgcctgtggcgtcgggtggatggaggaaccatttatcaagacggggttggtgggcacagagttggggatgcagcagtgcatggacagcccacctttcagcaggagggacaagtgtcaaaaaatgacagctccgttactgctgggcaccgctgtgtgccaggtgccatctgggggctcagctcaggctgagggaacaggaggagcaggtgttgagcaggtggtgtggggcgggcggggaagggtgccctcaggtccatcagaacagccacaagagccctggggtgggagggggccgatattctggtcggcacagagtgggctgccaggagagggtgggggcggaggggcaggaatgtggattctgtctcaggggggcaaggctgaggggatgtagctgggcacatggcctgctctgaattgagcttggttctctggagggtcgatgggaaggatgtgctggggatggggaggaagcggaggaggaggaggcggtggcagctgtgaacaggcaatgcttctcacacaggtgtatctttattaaacaagaaaataacataaaagcaaagggaggaagccttgaaccttaaaagctgggccagaaattctacaatacaatcagaagccacaatctggtcacagtgagagcccttcccgcagagccgcagacattggccgctgcccctggggcgggagggaagcctcctgtttgttttttgtcccgttgctttgagggctggaatcaatgtcattttctctcggagtgtttctggtttcatctcagtgtgtccaggctcggatgtcttcctgggagtatctccgtgtctcaggattaacaccagtttttaaaaataactgacaaaggccatttttcaggagacaaagatgttggtgcgtgcagagggccccctgtgttgatatggaaaatgaaggtcagccactccctgcttctcttggtatcttgttggacacgatgtcaatgtggggctggtagaactggagcccagggcccctctggccgcttgggcctttctctgtctccaggtccccatggaaatgggcagcccatggagaatggctgaatagctgctgt

SEQ ID NO: 28208 - DNA, 1211 bp, Artificial sequence
  DNA replication origin
tccttcctgccgcccgcggccgccgccggcccacccgggccgctagtcatgttcacgtacagggagcgggtgagcgggctccgcagcgtccacatcctccgcgccagccacacggacgccaggctcaggcacagccagcccgccagcagtctcatcgggggccgcggccgctcgctcggatcaccgccggcgccggggcgaggaggaggaggcaccgccgcctccggccaccgccgccaccgcccgagctcgagccatcgcggccgccttgcccatccagcccccttcagggcaaaggctgggggtggggaggagcagccggcgcgcagcctcggcacctcccccttcccttccggccgcggaacgccgctgccccctgcaccagtttccatccggagcacttacgagcggccgcgtcgctttctcccccggcgccctccctccgtccaatgagcgggccgctgggaggcgggacaaagggagcgcgcatccgcccggagcgcgttctcgtgtcccggccctgccttggcctctagtaaatggcggaggtggttttaatttttttgagggctgaggagatcacttccgaaggcggtaactgcagcctccctgcccctccaaggtggtgctggaaggacctccagtctttcctcgcctcatcccactccacggcgggactttgacagggttacctctcgaccctcatcccactccacggcgggactttgacagggtcgtgcagttaaccccgggggcgcaaagaggggagtcattcctttcgtgcatcctgacacacacaggttcttcccggagacgaatggtgccagtgatggttgcccgctcggatgcgtagtttccagtttacatttagaaccgacctgccagactccctcctctactctccccaccaccacgacccgcctgccccgttccccaagcctgagaagttgctggctacgtgtttctataaagaatgagtgaaaattctgccttttggggaagctaccgcagctggggtacccacaagtaatgttttagatgtattgatggccctgcccaagaatgaagacctcaagttagactccttggctgccttgtttccttgaattagcacagggaagttggacccaacactcttaagagtgaactcagctctgggagcagtgtttaacccggatatttatttgatcatttataacacgaggagacct

SEQ ID NO: 28209 - DNA, 1245 bp, Artificial sequence
  DNA replication origin
actgggataacaggtacgcaccaccaggcccgactaatctttattggaattttttgtagagatggggtttcgctatgatgccctggctagtcttcaactcctggactcaagtgatctgcccacctcggccccctaaagtgctgggattacaggcctgagctgtgtaatttcatgccacgtgatacagcccagtaaaaaggaagaaaccccacgggtccagcgtctactcacagagatgcactgatggctgataaattccagtaggagcccaaagaggagccaaaagagcatccaccgcacccgcatgtcctggtcctttcagggcgccctgaggcggccaggacagaggtggaggtggcttagggcaggggggagggaaggggacggggaccggggccggatctgagttggggaggggagggggaggggagggggaggggagggggaggggaaggggaggggaaggggggaagtaagggaagggaaaggaggagaagggggctgttgggcacctggaggaggtggaggaggaggaggagaagaagaaaggggtctgggaaaggatccggttcaaattaagttctcaagcgctggtggaaggtttagctacaggtcacggagaagatcagggaagcaacaggacacgcggggcaagggagcgtgaggcttaggagcaatcagagggagacaaaaaggttctgctatccaccaaaccttcttcggtctgggccctcccttaccaaccctggggctttatactccctctccaccaatccctgatgaccccggtggtgcctcacaatggacagtgcctcacaatggacaatgccaagtagcgcccgcatcattccaatgacccctcccccatctcagtctcccacactcctcccaaagacaggtcctctctggaaccttcacaaacctgatttctggtcctccccaaccagctccctgtccctgcttctgggcgctccttccttcctgagctcccagggttcctcaaggtcacttatggcgacaaaacataaaaaacaaatgatggcaggatggcaggaagaacctcatacccaagcagagtgccaggttttacagcctccgctcagccattcatatcctaagcaacaaaacatcagcagggtgcggaaggtcccgatagtaaaccatctccatcacatccatgtagccatccgtccatcaacctgtatctcgggaacaaatgtagatacattcattttaagcatgcct

SEQ ID NO: 28210 - DNA, 1448 bp, Artificial sequence
  DNA replication origin
actctcattccagttttgcttctgaggggctcaggaggggccgcagcctgtgcccagtcatcaacatcaacaatcttattagtgggcagaaagccaagaggtggcgtggcctgccagaagagaccgggacccgggcagggaccggagccgggccggtcgggtccgggtccagaacgtagaggcgggcggtgcggggaggggcccagggcggccggccgagccgggaggacggagctggggcgcggcggctggggagccgggaccggcctcgccaacgccgcggcttcgcttccgggtgaggggcgggcgggccgagcagttccggggcgggcggcggttccgtctgtgcgggccgcgccgcggctgctggtcccgggcgcgcggagggcgcgagcggcgcgcgggggccgagggggcgcgaggcagcggcgcggggactccgggccccggcggcggcccatggggcgggaggcgtgaggccgctgcctgtccggggctcggggggtggggggagcggggcggggagatggataaactgaccatcatctcaggatgtctctttctggccgccgatatcttcgccatcgccagcatcgccaacccggactggatcaacaccggggagtctgcgggtgagccgctggcgcgccgggccgggcgggggattggctgagggcgacgcgagagaggggagacccggactgaggagaggacggggtggagggtcccggccggaggctagcctgaggagaccgggggcggaggggagacccgggccgcggaggaaagggatggaggagaggaagccgccgggcgccagcgggacccccgggctgaggggagaggcgccccaggccgggtgaaaagtggccgaggagacctgggctgggctggcaagtcccggaccggggaggaggggagcagccctccgatgtgagggatcgcagaggaatgagcttcgttctggattaaaaaaaaaaaaaaaaaagtcaaggtgggagacgggaggaaactgaggctcctgcaagggaattagaaaccaggcggagaggctagggctgagagtgaggcagcctgcggggcagtgcgggagccactagagagctggtgggcgaggggaggccgagagggatcaggtccgaccccagaccctccaccaccagaggaagctgcggccgggggcgagcccgggctgcgggcgctgaccccaccaggcagggtgaatggtgggtgctgggagagctggtggggttggtgggagtggggggcgccggattggagcccctctgcaccgccgcccccgcccatcccctgcccgcttggcaatgtttgagaagcttgtggcttcggattttccctttgaagtgtgtatgtggttataattctgctttattttaggcccgggagctataatactactaataataaacctcattttatggagcgtc

SEQ ID NO: 28211 - DNA, 1884 bp, Artificial sequence
  DNA replication origin
gctggagtgcagtggcacaatcatagctcactgcagcttcaaacttctgtgctcaagcgatccttccatcttagccccacaagcagctgggaatacaggtgcatgctaccatgcctggtgaatttttgcatttttagtagagatggggtttcaccatgttggccaggctggtcttgaactcctgacctcaagtgatcctcccacctcagcctcccaaagtgctgggattacaggtgtgagccaccgcatccagctccctagatctttttttaatttttgagacagagtctcactctgttgcccaggctagtagtgaactcctggaactcaagcaattctcctgccttggcctcccaaagtgttgagattacaggcgttagccactgtgcccagccctcagtctagactcagggcaagccaggctgtcagtcactgtcaccatcgtccatccccccacccccctcccgacctccctctccacctgaggatgaggctggatgaccagggctaggtgatcattaaccgtaacaacagcaaccatgtgctagggacctctgtgcgccaggccctacatatacagataggtgcatctctgccctgcatggcatatactggctgcatgaaagaacgggtatttgttgagtgactggactgatgagccccatgtttttttgctggtggtggtcacagggcagggactctggcagctagaggggctgtatttttaatttcctctgttactgccctgctcaccaaatgtctgggtgaggaatacagtcctgccccgtataagcacgaacactcatggctttatttatttatttagagaaggagtctcactctgttgctcaggctggagtgcagtggtgtgatcttggctcactgcaacctccgcctgccttgttcaagcaattctcctccctcagcctcccgagtagctgggactacaggcacgcgccaccacacctggttaatttttgtatttttagtagagacgggggtttcaccattttggccaggctggtctcaaactcctggtctcaagtgatctgccaccctcagcctcccaaagtgctgggattacaggcgtgagccactgcgcccagcccactcatggatttaatgagagagactgcaaaccatcatgagcaggggcctaaatccccgagagggagaggagaggatgcagccccacagcgagccctcctcctgtactcaggcccagaggactctgttctggggaagggtctatgggaccagagctgactttctaccctaagaggatgccttttgtggcaaaggctggactcagccttggatactcacttattggggtgtgcccttgggtaagggccttaaaacctcactgtaccttagtacccacaaccgcgaatggacccaaatatttctggctgctctggctcctcacagggtggtcatgagaaaacagacgccagaatgccttgcgaggctagattgcaaagctccaggaggatttcattccctggagtgtcccagcacctagaacagtgcctggcgcaaagcaggcggccagcaaatgctgctgggtgaacaaaatctctggggcgtgttcgggatctggctgtgctatggtcgcgcgccagacccaccctggacatggcttcactcattcttttggaagttcagtgaagtacaggctatggttcccattacccagaggtggaaactgaggcccagagaacatgaggaaactttgatggagtcacagacagtgtctccgccggaatccaggtcgatggggaccccaaaagcgggtttggtggaaggaactggcaaaagggtggggagcatcagggactgaccctgagagcgctgggctcgcgggcagctccagggtggggg

SEQ ID NO: 28212 - DNA, 1390 bp, Artificial sequence
  DNA replication origin
acacatcaaccagccctccagtttgactttatagccttttatgcatttaacataaatgttaccaggcactgtgctgagcaacggaggcaagaagacatagtccttgcccttagggagctcctagttcaaaggggaagacagcccactaaccaggcaactcaacactgtaattagagccattcttgggaaaatcgcgagaaactccagtgcacacagaaggggcgcctcagccaactctgaggaagtcagagaaagcttcccagaggtgacatctagagacatctaggtgtattagggaccctgcttatctagcgtaactcaactcctgtgctccccaaagccctgcacttactgactaggaaaaaaagggacaaatactggcctctctcctcaccccccattaagcatccaagaccacaggtttgaccccaggggctgtttcaatgccatgggagaatccagcagctggtggattcttccccagggtccggctgaggaaaaagagaggaagaaatgagtcaggtgggagaacatctccaggtgccagcacagcagagaagaaattaggctagaacctggctcccctgtgcgaccccaggcaagtcactcaacctctctgacctttttccaagtatgcacagaacagatagtgctagtaccacctgagaggattaaatgaggtagggcatagaaaggatttagtccaggccaaatgcagggtgtgtgttccttaactgctgatagctatcattactacccttcaaaccagtgggccccaagccatctggcagcaggggaaacacagcttagaccctggagagcaatcagttctgcataatcgaattcctctcttagggaagcttagttaataagcgagggcatgaaggctgcgactggggccctcctggtcacagttggtctggggttgggggcaggaagccaaggtcgtttcctgcagatgtttctggcaggcgttcaccttctcctagcggatgcctaagaatgtatcaagggcctcctgagtcccagcaccgtgctaggccgggaagatgagtgtaggggtgagacctttgcttcttagggaccaaggagttaaatagggtgcgaattcagcggggctggagggggcgacgcaaaggcggcaccctccaataaaaatgaacatgtaaggaagaaaggaagacctctctaatgagggcatcgcaggagcaagacgctgcactcgggtccttttaaatcactatgtaatggaggggaaatccctgccctctcttttccctttccgtaaacaacgaagtagaggatgtcctcctcccacgaggcccgccctcggatgccccgcctgtccccgcaggtgcgcagcgtggccgtgacgcacaccttccagata

SEQ ID NO: 28213 - DNA, 1348 bp, Artificial sequence
  DNA replication origin
ggtgattaccactacctctaattaataaatagaaacagtactaaatcataaaatataaccaactaaactctatttttcccattatagctttattggtacttcatcgagacatccaattattttaagagtttttttttttaaatttttcatgctctttctggtactaaaacctgtgcttactatgctgtcatcctcagacaggaacccaaaaaggccaagtcgggctcggcagaagcttgagtctcggtttttccccaaaccctggctgtcaacacacagatctgtgtgaatgagaagcccagaacattgggtcggggtggatcgaatgcaatgttaccagacagagcagcagccgacggcgcaaactcataccaacgtcacccgagcctgcgttagcccatagcgacgcggcagcctggttccggggagaacctacccgggaggcggagctggaaaggggtgaagccagagagggagggggcggggccaggactcaattacacgcgagaagggcgggaccgggtccagaggcaggagcaaggacagacccaaaaggagaagccaaagggtgggctcaagcgcgcggggaggaccagaaagggggcgaaaccagaatgagggagaatctgggggtgggccgggactgggcagggactaggagaaggtccagaaggcggaggaagctgtgagccttggcccatatcagaaaccggacaggccggagggaggaaaaaaggggcagggccagggcctggagggagggtcatggacgtaggaaagattcagggggcgggacagaggcgtgaccaggactcagaaggcgtgcccaaacatggaagggcgggaaggggcgtggctatgacatgaaggcggggttaggcctggagagcggctcaggactaggctctgaagtcagggggcggggaagaggcgtgcccaagccgtgaagcaggggcggggttataaaacgggggcggggctaggtctggaggtctgctcaggggctaggccaggaaatcagtgagcggggaagaaggcgtgcccaatttgaagggcgggtcaagggcgtggtcaaaacatggaaagagactcggggctacgcgtctgggccgaccagggacgtggccaggattcagggggcggagcaggagcgtgcccacttcggagggcggggcgggacaggacaggggcggggccaaaacacaggaagggcgcaaggcaaggtctgggagtagataggggcgtggccagaagtcggcggtccgggctaggtctggagagcggctcgggggcgtgaccaggattcaaggggcggagcggaggcgcgctcaaacccagaaggcggggc

SEQ ID NO: 28214 - DNA, 1162 bp, Artificial sequence
  DNA replication origin
agttgtgcggattaaaggcgatgtggatatggaaagcaattggcaagcaatgggcggtgatctggctgcaagtgacagagagtttgggggcctcccccctcggggcccctagagtgtgggcgcatcgctgccttcctgtcccctgcagggctcagagccgcatcccccacctttcccctgaactagaggcctgcgtcagcccgaattcccggaacctccaggactgtatagacgcgcccttgctgcattgttggctgcgggagtttgttggcaggcgctgctgacatgtgtgccaaggggctgggcattaataagccggtggccgcgcgggggtgggggcctcccgggtaagccccggcctagatccttttgcgcgcgcctgggggatttcggggaaccagcccagctgcgccctgagtgtgacagatgggccgcatggggaagtgagatctgcccagggggacggtcccagggagcccgacctctgggacctcggtggtgggtgcttcttcagccaggaaagcaggaaacactagggctggagtcctgggttggaattctagctcatttatgctctctggccctcggttttctcatcggtaaaatgggtacagtattagtatctaccacttagtatccttggaaagagtagatgagtatgtatatgtcaggtgcttggaacagtgcctggcacacagtgtcatagtctatggccccgggagacatctgatggccaagagccctgtggttgagggccctggacaggctgtgaagtcacagcgaattgagtcacgtagtctatcctaatgtttttagcgaggaggaaaccgagggtcagagtgatccccaggcccacagaagctccctaagaggaagccagtcacataaacagattctaaaaagcgagatggagtaaatgggaatacagagcaagcaggtgggagctgagaatgcccactgtgtgtgtaaaggggagagggttatgggggaaggcttcctgtagcaagtgctgtttaagctgagctggggaagaggcaggtggaaggaggtagagttcagagatggcgtatgcaggtgtcttccttctgtgtggcctccacagcacccgatgttcattcctttgttcagctattaattcaacaactacagtaaaacctctcaa

SEQ ID NO: 28215 - DNA, 1692 bp, Artificial sequence
  DNA replication origin
gcccgagtcctcatcgtatcctcggagctgggcagggcatccccagggagcgctgtggtctaggtggggtgggatggtcccatggtccccttggaagagatgggcctggagctcctttatggaggagaaaaggagggaggtgcagagctgaagggactgcctgaggccacactgttgggaagaatcaaggccaggagcctaggactgtcccaggctccagctcccaggcctgccaggtgagttcccgggacagtcctgggagcagtccgtggccgcccctggaatgtgctgcttcttctccctcagatgtggaagttcacgcagagccgctgggtggttaggaaagaggtggcaaccgtgaccaaagtaagtggcgtttttgtggtctgaggcccaggctgctgctggaggggagggggctggctgtgcctcacgctgggccccctcccctccagctctgcgccgaggatgtgaaggacttcctggagcacatggccgtggtgaggatcaacaaaggctgggagttcattctgccttatgatggggagttcatcaagaagcacccggatgtggtccagcggcagcacatgctgtggacgggtatccaggccaagtaagcaccctgggccagggaggggcagcccggtgatcccagcaaccctgcatcctggggagcactgtcagggtggatccgagcaatctctagaaaccccacatctggggagagcgcagttgggctggatctgggtgtgaagggcaggtgggggtccgcaggccccacgctcctcacccacactgataggcattgctggctgatcccaccatcctttcagcacaggacacacagccagtacctgctcatcagggtggccgtgctctgagggctcagggaagagggatgtgatggagagagggagcactcaggagcaagagctggggcctggggaccagaggggtgttggcagaagactgatggggtctgggtggtcctggggctgtgcactctgccagaagagggactcagtagggctggctgagctccaagcctgcgctgtcagtaaccagcgtgtcctggggcctaaggggtggttgtttctcttgtgaagcagatggtaggggacgtggtttaaagttaatggggttactcttcttttcagactggaaaaagtctataatcttgtaaaggaaaccatgccaaagaagccggatgcacaatcaggtgtgtgaggggctttgggctgggaggccccggctcctacactgtggctccggaagggctgctgtgctagagcttgtcaggcccggacctggagagggtggagggctctcaccgttcacccttcaccctccttcctttcctgccacccacagaccgcagctggtcgcttgcccagcagcagagcctcagggacggaggcttgcggattccagggctgagtctgggttccaggtctctgaggctcactcaccctcttgggtcaacaagcgggcccggaagagctgctggggggaggaactcagcagcacccttccccgcatgactctcggcacgctgggacggttctctcttccactgatggggtggctgattttcgagaaaggttggggatgagaccaggacgggaccacttgctgcagccccgcggtcccctgctgggcttttggcttcagatccctgtgccctcctgagca

SEQ ID NO: 28216 - DNA, 1324 bp, Artificial sequence
  DNA replication origin
aaaaccaaggcccagcagaaccacgcgttgctggagcgggagctgcagcggcggaaggagcagctgcgggtgcctgcggtcccgcccggtgtgcggatcaaggaggagcccgtgagcgaggagggcgaggaggacgaggagcaggaggcggaggaggagcccatggacacttcccccagcggcctccacagcaagctggccaacgggctgcctctcgggcgggctgcgggcacagacagcttcaacgggcacccgccccagggctgcgccagcacccctgtggctcgggaactgaaggccttcgtggaggccacctttcagagacagtttgtgctcacgctgagcgaactcaagcgcctcttcaatctgcacttggccagcctgccccccggccacacactcttcagcggcatctcggaccgcatgctacaggacacggtgctggccgccggttgcaagcagatactggtgcctgtaagtagagccctgcctgccaggggcatggggggtggggggtggggagaaccagctgttgggaggccacgtggggacacgggaggccatgcttggtgagcatctgctctcacgtgggcctaggtgtgacatgggcaagtcagcctctctgaggctctattctcatgaaatgggatcatgttgggttttatgtcacaggactgtggtaggggctaaatacggtgtctgaaggcccggcctattgcctggcctgcagcagggcctagtgaaacagggcccctgcctggtttctcaccctgtcccccaccaagaacacctgtttcctactagctttgccattgtttggaatgatttaacttctaagatcgtttgatcttctttgcaatctgcagatgaagaaactgaggctccaaggaatgaaatgtacgtttaaaggtcactacctaggaggtagtagagctggaatttggacctcagtatagtggcctggagttttgaatcctttctgctcagctaagatgagctgcttccccacagctgcgccacgccccagcttgggcctgggtcctggcggcctccctgtgcatcagaagcaagctgaccagctcagcgctgtgctctcagcacttccagtgccaggccttgagtgtggtattgcaagcctcctgccccttccccctgggctgcttttctgtcactgggaggggccctgacgggggagcagagtgcttgctggggaccgtttccctgcgctgaggatagagagcgccaggtgctgcctgaggcacgcctttcccgtgctccttttccacaaggctctgcccagacctggcagcaaaatggggtgagg

SEQ ID NO: 28217 - DNA, 1212 bp, Artificial sequence
  DNA replication origin
atgcccggccgttggggccgtcggtaggcgcgaggcgagtcgaggcagccggccggtcggcggccgccggcgggaacggggctgaggcggcgcagcggagtctgggcggcggcgcgtcccgcccgagggcggctctggctgagggcggaggggccggggaagagcccggggcagcggctgaggcgggacggcggcgggggccgctgcccctagaagacccagccgagatgctggcggaaaacctggtagaggagtttgagatgaaggaggacgagccgtggtacgaccaccaggacctccagcaaggtgagggcgggggcgccccgcgggcgggcggcggcctggcccgggaggcccccgctgcgaaactgttaaaaagttgctttttgtggcggcggaggatgcaggtgccgggaagggctcaggctcacctggcggctgggccggccgtgcccgcggatcccgcccgcaggaagcctcggcacggggcccacggccttgctaatgcgcagttgaatatcagccccgaggcgcgtgggggccagggacgagccaggcaccgttttaagcgctttccgtggattagctagtttaatcctcactgcattcctccgaggcagacccgggtgagccagtgtgtcccgcagtaagtggcatagcccgagaagccgccccgtcgcaggctgtctagcccagcgcctttcatggccagcgtggagggccggctgctgcaggtggtagttgttttgcggcgtagcgggagctgtgcgctccgcaccgtaactccaggagacagtaactttttaaaaattaatgtttgagggtacatggtaggtgtatatatttgtggggtacatgagatgtttggatacaggcacgcagtgtgaaataagcacgtgatggagaacggggcgtccatcccagcatttatccattgaggtacaaacaatccaattacacacttttgttatcccattttccatatgaggaaagcggagattaaaacggtaaagtggcttgcctaaagctaagtgtgggagggagtgttttttgaacccacacactcagaagaagagttgtagtcactgctcaaaccccatctcttccttaccatcctagtttacagtttttttcagttgggcgttaagctgttaggcatagttcaccagatgccaattgaaacgacagaagaaagagcgcatctatctctgc

SEQ ID NO: 28218 - DNA, 1054 bp, Artificial sequence
  DNA replication origin
ccgagtcagggaggggccgaggtcagctcggggtccatggccaggacgcacgtccagtgaggagggcgccccatcctcactctgggaacagcgtcctcggctgtcctgcgggagtgctgcctcccactctccaagcacaccttgctccaggcggggtcaccctcgggctggccagatgagcagccaaagccgggcccctgagaatcagccctgggatggtggctggaactgccgggaaagaggtgacgtcgctccactggaggccaagccacagcctcgggtggccaccattgccccatcagggaacccccatgagtgtcccctggggaaagcagagcctgggggagcactcagagccctggcagtcgacaacccctgcacccggttgcagccctgactctttaggatcggagctggcaaatctccctcttctttgcttaagccagtttgaggtggggttctgccaggtaaaccaaaaagaagtcttaagaagccttactggaattcctcacttggagagcagcagtgagatcccaggctgcagggacaagagggaggaaggcagggggcagtgacgggtgggagatggtgcatgctggctctggagctgactgtgcaaatctcttcccaactccactattggtgactgcaccttcaaaacttgaactcggccatgcaggggtaattgcaccatggaaagtggcgaacaccacacatcaccgctcttgtacctccacccagccccggaaagccagctgctaggcctgtaccagcattccccacccatggactcaggagggccaggcttacctgggaccacttctgaaagttgcaccagccccagcttccctgaggacaaggctgagtcacgaagcatggacgaggctgagctgcagtctgcacaggtggagttaaacaggccatagccaactcgcccctcacccagggtctgcacagacctcacctgcagccaaattacatttgagcacacagtaaaaggatggaaactgatgatcctcctgctccctcccttccatttctttgctctcagttt

SEQ ID NO: 28219 - DNA, 943 bp, Artificial sequence
  DNA replication origin
attccagctccgcgaatagttggtgccgttggtgccgccgccgccgctcagccgagaccccggggctctgcggctcattaccttccccgacacgacatggccaagcgccgccgcccagagaagcgcgagtcgccgcccgaaccggccgccgccaacaccccgctccggcccggggctgaggaggaagccgagaaggaggagaaggaggaggcggcggcgggcgggggaagaggacgaccgttccgggttccgcctgagcccgcagcacaggacgaggaggcgggagcggcgcggtgagagagaggtggatgaaggggaggcgacgtctcttccagggccgtgcgcggcccacgtcgccggggccgcggaggacgaggacgacgaggagcaggcggtggcggcagctcctcacgctcacaaggccactgctaacccgcctcccggctccgctggccgcgccgccgctatcgcacggtatgctgggagcgagaagcggggtcggccccgccgggcctggggagagaggcgggtcctgtcggcggggatctccactagtgcggccacacacttttctcccgaacgcttcccggaaagcaccgggattttaaaaactttaggctttgtcttttcttcttcttcttcttcttcttttttttttttttttttggtgggggaaacaatatagaaggcttttccttctctgcaacgattttgtggcttcctagaggtcaggagagtgttggtcatgggaaagaaggttgaattcagtctgcccacatgggcgtgcctagctttagaacagcgctatttaggagaagttggaagttacaccctttggtgagaagctgtgtctgtttttttccatgattggcataattaactcaaataccagctgtacgttagtccgtatttctgttcatggttgagttcagtgtgtccagag

SEQ ID NO: 28220 - DNA, 1039 bp, Artificial sequence
  DNA replication origin
ttcccccgcccgccgccgcctcctccttctcctccttctcggcttcctcctcagccccgggccggagcggggtgttggcggcggccggttcgggcggcgactcgcgcttctctgggcggcggcgcttggccatgtcgtgtcggggaaggtaatgagccgcagagccccggggtctcggctgagcggcggcggcggcaccaacggcaccaactattcgcggagctggaatgactggcaacccaggtgggtgaccggcccgggaccccgccccgacctcccgggctccgcctcgggcgggccgaggcctaggccctccacccccgggagccgggcgcagcttcctgggtctcctccgccccggctgggggaggaaggccgcggggaggcgaggcctaagtgcctctcccctccctgcttgttcagcccggggctgaagccgagacccggggctcccggcggtggcactggcctagggtcgggaccaggaggtgagaaagaggcgggggtgggggggcggggggcattccacttaccgcttccccctgaccccgagttgggagatcctgagagtccaggaccctccctgttactcattcactttctcggttccccagtctttcagccgccacgtgagagctcttctaacctctgttcctttctgtgacccccacgtggtaatattgaaaaaaccaaaacaaaactccagctaaggcattgctctgactttaggcagaacattcattagtggagcgtgagatgagattgtgtgactgttgatgggatcgacctactctggtcttgggcgatggaagttttccctaagtgcaaggccggttactctggtgaatcgtaattcatacctggacacttgagtgaactctgggcacccacttagaagtctagagaatttcctcttttatggaggatttgatgtcagaccgttttggggcttagttagatttgaatatattaggaacattaactttttaaataaatgtaatttcctgtctttttgatcaatggggggagggcagctgtg

SEQ ID NO: 28221 - DNA, 800 bp, Artificial sequence
  DNA replication origin
ctggactgcaatggcgtgatcttggctcaccgcaacctccacctccggggttcaagcaattctcctacctcagcctcccgagtagctgggattacaggtgcgtgccaccatgcctggctaattttgtatgtttagtagagacagggtttcgccgtgttggtcaggctgctctcgaactcctgacctcgtgatccacctgcctcggcctctcaaagtgttgggattacaggcatgagccactgagcctggcctggtgagctaatttttaaatttgttatagagacaagagagacaagagtctctcttatgttgcccaggctggtctcgaccccctggcctcaagtgatcctcccacctcagcctcccaaagtgctgggattacagatgggtgtcaccgcacctggcctctgaggaggatttcattataaacctgccctgaagggagggaatccaattttacgagagggtgtagcctggtgaggcctggatgacctccggaggcaggggcttgtgcctgggctgaggcctaagggacaatgggcagacatgaagttgccccaggcagagggtacagtgtgggcaaagtcaggaagtggcagggcttggatcactccaggaagagagaggagtcatgtgtcacaggagctcgagacccagagagtgaggcagggaggcagggaccaagcttgggcacagccaggaaggcaggacagggcatggtggggccaatggaatcattacccaagacggagattttcagggaaacagcttagataaggccaggcgtacagtagctccca

SEQ ID NO: 28222 - DNA, 1089 bp, Artificial sequence
  DNA replication origin
agacattctatggctgggtggtggtggagggcactcaccttgtgaacactcggacatggtgaattggcattggcattgctgttgaaggacaactcagccgtgttcttagccatggccatttaggcctgttctgatgcagggttctgatccaaggtaccagtgtggtccctcagggaagtactggggatcgtcacttatgcctgttctggacatggtcaccgagaactgtcctgtaggcattcacttaggaatcattcgaagtggaattgctcctggatacgttctccttgtactctgtttcctcctcctagtgtctctgtgtgaagaagccctcctcactcagccctcggcgaccctctggtaccctggacagctccccggggagcagtctaccgctaggcggcggctgctaagagaggaaccctcctgacgcggagtctgccgctccggggctcgctctccggcaggcccggggagaggtggggtgacaatgggttggggtgcgcgcgtgcctcataggtgcgagacagagcgagccgccggggtgtgagtcagcgcgctgggggctaagaagctgggtgaatagtcacggaatctcactcacgctcggctcctccacccatcccgtctacagcgcgtgtcccagtccagggcgtgcgtgcgctcggtgtccgattccgggctgtgtgtgtccatttggcgagatgtcgagagcggggggagtgtccttgtcggtgtatctgggcccaggttaggggacttctcctccccacccccgcgtgggtgtgggggtgtgtccgggctagggcgcgtgtgcttctgtgcctgtgcgtgcgtgtgcgggtcagggtggtgggaccgcgcatcagggcagggtgcctgcgtctgcgtctgggtctgtctggtctgcatgtcggcgcgatctcgacctggattcgtgtccctggatgtcgagaggccagcgtggtgggggtgtccagcctcccggaggagtactatgccttgacaccttcgtttcaccgccccaaagctggcctggggctccgtagggagtggcctgcatggggagggcccgcgtgctgtgtttct

SEQ ID NO: 28223 - DNA, 1076 bp, Artificial sequence
  DNA replication origin
accctggtcagcagcccccggagaagacggcgcccccaacgcccgacccgcgtggccgtggcagcgccacgcgagccctctaggcgaccgcagggccacagcagctcagccgccggtgccccctcggaaaccatgacccccggcgcgggcccatggagccatggcctatagggtcctgggccgcgcggggccacctcagccgcggagggcgcgcaggctgctcttcgccttcacgctctcgctctcctgcacttacctgtgttacagcttcctgtgctgctgcgacgacctgggtcggagccgcctcctcggcgcgcctcgctgcctccgcggccccagcgcgggcggccagaaacttctccagaagtcccgcccctgtgatccctccgggccgacgcccagcgagcccagcgctcccagcgcgcccgccgccgccgtgcccgcccctcgcctctccggttccaaccactccggctcacccaagctgggtaccaagcggttgccccaagccctcattgtgggcgtgaagaaggggggcacccgggccgtgctggagtttatccgagtacacccggacgtgcgggccttgggcacggaaccccacttctttgacaggaactacggccgcgggctggattggtacaggtaaggaccaggagctccgctccgtgcgccgggtctctgatcgcttccattgggagagccatccgtctcttgtgttttctctttcttttaacccaactcattgtatgggttcaggctgacacacagggccatggggggctatagcagaatttacccagaacttcccagtgataatctagacgggcagtttctggaactgcaaagggcgttccctcgtcactggagtcgttggaaaaggattatctccagtcaaacctaagtgccagctaaagggctaactccctctgtgaccagcccttagggtgcccaaggaagggacaggcgaggacctgtgctgcctgaacacggcaccatcctaaccctctgtaggtctttgctggtacccagcccctgaaggaccctgagaaagataaggcagttcagagacccct

SEQ ID NO: 28224 - DNA, 1297 bp, Artificial sequence
  DNA replication origin
gaaggaaggagggaaggaaggaaggagggaaggaaggaaggaaggaaggaatgaaggaaggaaggaaggaaggaaggaagggagggagggaggaagggagggagggagggaaggaaggaaggagggaaggaaggaaggaaggaatgaaggaaggaaggaaggaagggagggagggagggagggaggaaggaaggagggaaggaaggaaggagggaaggaaggaaggaaggaaggaaggaaggaagggagggagggagggagggaaggaaggaaggagggaaggaaggaaggaaggaatgaaggaaggaaggaaggaagggagggagggagggagggaggaaggaaggagggaaggaaggaaggaaggaaggaaggaaggaagggagggagggagggaaggaaggaaggagggaaggaaggaatgaaggaaggaaggaaggaagggaaggagggagggagggaaggaaggaaggagggaaggaaggaaggcaggcaaggagggagggaggaaggaaggaaggaaggaaaaggagaagggaaaggggagagagggaaggaggaagggaagggaaggaataaagaggaaagtatggaactatctttatagcaattgattaattcctcagcccgatttagtaacagcagcagcatcagaaactaatatttttaatactaacagaactaatagtgataacaggagtgttgtagtaattagtagcaataacagtagtaacattactgccttgtctttatatatcatagaattttccagggcaatttcatgtacagttttgcatttattcttcacaacacgtttctaggatagttactacaggtcccattccatgatgaggaagctgagacttgggagaatcacctttcttcaaatcatacagcacctaggtgaccacctctggtcttctgactgtggttccctgtcctggttccctcatcagcctggtgttgctttgcccacctgtccaagcagctaggagataccaccctgcagctcttacctcggggaggaaatgtgggtgggggagaacccaggccagacacatagttgaggtaagcatcagagatggcatggcagaaagacagcaaattggagagaacccactgcagaaggctgggctctctggtagtggcctgaacgggagtggttcccaagaaggatcaggctaaggacaagaaggtgcagactctgtctcctggtctctccaaatgatggtgtctttctggctatatcactcggccttcagctttatctccatttacccacagaaagaagcccctc

SEQ ID NO: 28225 - DNA, 1013 bp, Artificial sequence
  DNA replication origin
cgctggcggcggcggcgcggggggccccggggcgtccgggccggccgcgccttcctcgccctcctcgccctcctctgcacgctcggtgggcagcttcatgagccgcgttctcaagacgctgtccacgctctcgcaccttagctctgagggcgccgccccagaccgcggcggcctccgcagctgcttcccgcccgggccggccgccgcgcccacgccgccgccgtgcccgccgccgcccgcctctcccgcgccgcccgcttgcgccgccgagccggtgcccggcgtggcggggctccgcaaccacggcaacacgtgcttcatgaacgccacgctgcagtgcctcagcaacaccgagctcttcgccgagtacctggcgctgggccagtaccgggcggggcggcccgagccctcgcctgacccggagcagcctgcgggccgcggcgcgcagggccagggcgaggtcactgagcagctggcgcacctggtgcgggccctctggaccctggagtacaccccgcagcacagccgcgacttcaaggtgagcccgcgcgccgccgcgcccccactgcaccccgagcccctggggcacctgcccgcccaggtcttccttccctcggttcctcttggcccggcaggcttctgcattggttgctccgagtggtctgggcagtcgaccagtgattttaaggagattcattcattcattcatttattcactcactcactcactcaaacatgtatttattgagaacttactacatacgtgcccatactctgtgataataggcaatgggagtgacgttgcaatgaacaagactatccgccttcatggaacttgcatttttgtggggtgggagtgttgagcatgggttcaaatcctggttctgccacttactagcaatgtgacgtcgggtaagttaagcagcctctctgttcttacagtttcttcatctgggggacctactttgtaaggtggttgtgagctgcaaacaagttaatatattaaatcgaac

SEQ ID NO: 28226 - DNA, 1378 bp, Artificial sequence
  DNA replication origin
gcggctcatgaagctgcccaccgagcgtgcagaggagggcgaggagggcgaggaaggcgcggccggcccggacgccccggggccccccgcgccgccgccgccagcgcggccgctccgaaacagccgcttgctgaaggagcgcttctccttcccgctcgccgccgccggcggcccggacccaggcgccgttaccttggacatggcggcggccgcagacactcatcaccgcgcccgcccgcccggcccgcggccccgccacggccgccgccgcatcccgcagcgccgcgcctcaccgggcccgggggctcgacgccccacacacctcaaagcgcagccgagccagcgagcgagcggcggccggcggggccagcgggcgcgcgcgcggtccgcccagctgagccgctcacgtgacgtgcctcccggcgccgcccgcccggcgctgaagccgcctcggccgccatgttcactgtgggacggtagctgcctctccagccggacgcgatgcctggaggctgcgggcgcggtcctgctgcgtgaagcccgagggaggccatgtctagtgtgggcgccgtcccggcttggaggaaaaggctgggctcccgttggatggtggatccccggggtgggtctctgtctttgctggtcagatggcagaggcgggaacgtgcaggaatcaggatgctgtcagttaccagaccgtgcaagagctggtggacatggccctgacaggtcctgggcaagtcagccctgtctggctcccaagggacgttgcagatacctaccctctgggtgccagcggagcgcagtcacagaccctggcacgtcccagcgggcttttcttcctggctgcaccttggagtcccagcgaaacgctgttatcataactactttccttttcattccagcctttaaaactcctccgggctctcccatcattcatcattccattcattcattcactcactcattcattcagcagttactggggatattgcaaagaattaaacctattaaattagaatcaaatgtcatatccccagcggattaaattagcacggtttctacctgccctcttgcagcttacattcctactgggtgtttacaatagctgttgtgttccacacattatgccaagcatgcaatattttctttaatctttaattcaccgtctttgagattggtacagttcttatctgattcaaacccaagttttatttacaacccctatacttgacctctaaaccaaaggtcacgaatccacaaatatcacaggtcacaaacccacaaatgagtgaagaatcctggtgtttgaatcatcatattgactttcaagtgacttgggtctcagtgttgggggaaatataaggaatgatgggga

SEQ ID NO: 28227 - DNA, 1018 bp, Artificial sequence
  DNA replication origin
cccttgaactcgggagttcaagaccagccttgcaaacatggtgaaaccccttctctaccaaaaaaaaaaaaaaaaaaaaattagttgggtatcggtggcatgcacctggggtcccagctacttgggaggctgaggtgggaggatccttggagccacaggaagttgagactgcagtaagccatgatcatgccactacattccagcctgggtgacagagcaagaccctgtctcaaaataaataaataaataaataatttaaaagacaaaaagaagaaaaagctggctttattttgcagtgagaatataactgtgtattgtcattcaaaacaaacatagaatttgaacagtgtgtgtttcaaaatcccattatatatgtatgtgtatatatataaaactaatatgtgtgtgtggacacacacacatacacacacaccaaataataaccaaactgttagccatgcttatttggggaggggggggcacagtttattgttttaattctttgcaatgagcatatattgttagaagaagcagctgagattttttagaggattttctttaaatttctctccaataatgctggacctgtttccatccacctgggcaaaccgcccttggaccagcaaccaaggcatctcctaggaatttggaaattcggactcttaagacccactccacccctatcgagtcagaatctgcattttaacaacatccataggtgattgtaaccacattcaaatctgagaagctctaggtaagaacagatcctttcctctctctgggcttcagtttctccccggcacaaaggggctgtgtctctatggtccctcccaattgcagttttctaatctcgtttcttgtagttatctgagtccctataaaaaggcagctgaagctaggaaaggtggcttacctctgtaattccagctatttgagacgctgaagtgggaggctcgcttgagcccagtagttggcagctacagtgagctatgattgcagcactgcactccagccaagg

SEQ ID NO: 28228 - DNA, 1241 bp, Artificial sequence
  DNA replication origin
cagctcgggggttctgggcactggagcggatgccgggcgccagggcgtcggacgccgtcagcgcggtgggtggccgagccagcatcagccggtggcggcttcccggtgcccgggatgctgggacaccttgcccgggcggtagcggccagctctcccgggtctacccacgccgtggcccggagcacgaagccagtcgagagccactcagagtccgggggtctgggggtcccgggccacacctggcctcttttctccgcccagcgcctgttcagcccccttccctgccggggtgagtcgcgtggacctgtccgctactgttccttctaccctctggaatgctttctccggggtgacttggtgcagaaagaagcaaacacttgaagtgggctggttggattcgctccagcgccttcagccggcgctcccccggggcagacgtggcttccgccacaggacagcgcccgctcgctccgcgcagggagggcagggctgcggggtcgctcggcaggagctcgggtcagggccctgaggttgagttcaagtgatttctgcacaggactcgcccttcgggacgggcactgatcgggaactctccggtccagcgaacccaacgctagacttggggcaaatctctcatccctctccaagctttggggtcctgcactgtgggatgggggacaggcaaagtcggtggtaggtgaggagggggtgcacggagccgctgcgatgagccagggccctggaattctaaagaatccttcaaatcctttctacctgtgtggtcttgggcaaattacctaacctctgtgcctcagtttccttctctgtgaaatgggccaagtaatagcacctcatataactgtagtgaggattaaatcaggtagtgtgtgaaaaggactgagtgggatgcctgggagtacagaaagggatcaataagtgatagctgccattattgctgctttccctgctgctgttattattattaatgattgaagagcagcctagttagtcgttaaagggactcctaggtgcaaatcccagctcagccactttctagtgtgaccttgggcaagctacttaacctgtcagcgtctgtttcatttgtacaatggaggtggttgtgatacctacctcagacgattatcgtgaaaattaaatgaggtgacagctgcaaagtacttagaagagtaagtgctgggtatcagctagtaattcttccaccaagggtatcacattggctc

SEQ ID NO: 28229 - DNA, 1042 bp, Artificial sequence
  DNA replication origin
cacgtagaaagcgctctcgagtttcattgttgtcacctcttgaacaacttcttgccccgcccactctatgccaggactttgccgccgtctctgaggtcccagacacgccggggaccctggccccgtctgccttctgcaccctgggggcttttcccagcctccagctctcccctccgcccccaacccgttcagtccccaggccgggtcccaggcgcctcagacaggcacccaagcgccctcccgtgggaaactgaggccgggacaggagctcgcgggccggggttgggcaggagaaggcgcgcgcgcagggactccgggcagcgcgcgggagaccgggtgcgagccagggttcgccgtcatacctgctcgggcggcggagcggggacacggaggatgcgcgctgtcggcggtggcggaggcggcggtgcgcgccaagctggcggcggcggccgagtgttggtgacactgggacacccggcgagcgcggcgagaccgactgggagggagcaggttcaggggcggggaagcacggggagcgcccgcgggtggagcttactgggcgctaccggcctggccacacgcacggtcccggctcccctggccacctccctcgcctcccaataagctccagcccccacacgccaggttcagggacactggacgccccccgcacgcacgcgctccgcattctccctccccacctcgggacaccagcgatacccacatgcgccacgaatatgtccacagacccctcatccgagtgtaccccacgtcccctcagtacatatcacaagccacatatatgaacactccatcccaccccacgcgtgtacctgtcccgttcacctaggcgaagcatcgcgctcaccagtacaggcgcgcccccatcacatccacacccctgcagacacagtgtcctctgggcaagttggtgactttagggggacatatgcagccacttttcccaggaacgttcttccctccgcctcttccacctccaccaaggtggagacctcccagatctcagtcatccccgataggt

SEQ ID NO: 28230 - DNA, 1216 bp, Artificial sequence
  DNA replication origin
ggaccgtgcgtgtggccaggccggtagcgcccagtaagctccacccgcgggcgctccccgtgcttccccgcccctgaacctgctccctcccagtcggtctcgccgcgctcgccgggtgtcccagtgtcaccaacactcggccgccgccgccagcttggcgcgcaccgccgcctccgccaccgccgacagcgcgcatcctccgtgtccccgctccgccgcccgagcaggtatgacggcgaaccctggctcgcacccggtctcccgcgcgctgcccggagtccctgcgcgcgcgccttctcctgcccaaccccggcccgcgagctcctgtcccggcctcagtttcccacgggagggcgcttgggtgcctgtctgaggcgcctgggacccggcctggggactgaacgggttgggggcggaggggagagctggaggctgggaaaagcccccagggtgcagaaggcagacggggccagggtccccggcgtgtctgggacctcagagacggcggcaaagtcctggcatagagtgggcggggcaagaagttgttcaagaggtgacaacaatgaaactcgagagcgctttctacgtgctgggcacagctcagcagagcgccttgctcaaacgacctaacttcgctcacagggcatccctgtggggtggttctcttgctgtccccattttgcagaggtgcaaactgagggtcagagggtggggaagcttccctacgtcccaggaacaagttgctgagctcagatttgaacccaggcagtccgaccctggagcctacctcgtgggctgtcagtggcgtccggggaacgtgggtttcatttggggtgatgtggtggaggaggccagatccgaacgccctgcagttgtctgcgctgaggattctcaagtgctaagttgatgtctggacaatgtcatatgacttaggtgtgctgtggagggaaagggtctgggatatagtacagggacattctcactctagcgtggagggggaaaatgaggcacagagtttagggaggaagcagcagagacctccagtccacaaaaggcacatcttcccactcacctccaccagggagtaggggcagaacaaccaagactggctttggtccctggcagcccagctctcacaaagccgggtggatgggtctgaaagctcccagagacctgagcacccctgtctcagatcccagcatccgtgagtgaccca

SEQ ID NO: 28231 - DNA, 1361 bp, Artificial sequence
  DNA replication origin
tctgcccatgatggctcagcctctgcctccaggtgtcagctccaatgtcaccttttcagagaggccttccctgaccactcggtctaacatgctttcccagaagctgggcatggtggctcatgcctgtaatcccagcattttgggaggctgaggtgggaggatcgcttaaggccaggagttcaagaccagcctgggcaacatagcgagactccatctctacaaaaagtttaacaattagccaggcctggtggcatgtgcctgtggtcccagctgaggatcacagctgaggcaggagcatcacttaagcccaggagttcgaggcttcagtgagctgtgatcgtaccactgcactccagcctgggcgacagaggaagcccctgtctccaaaaataaaaaataaagtaaaaatacaaaaataaagtagtttcccgcagttactctctcccataacctgtttatttatttcacagccataatcacactttgaaacgattttatttctgcttgtgatcttggccctctcctattaaaaggattatgtctgtctaattctgtgctgtgtacacagcacagtgcctgggagaatattggtggaaggaaagaaggaaggaaggaaagaaggaagggagggaggaagaaaggaggaaggaaggaaagaaagaaggaaacagaagtggggagggagggagaaggaaggaggaaaggaaagaaggaaggaaatgagaagggagggagaaaggaaggaaggaaagaagaagggagggaggaaggaagggagaaggaatgaaggaaggaagaaagaaggaaggaaggaagggagaagggagggaggaagggaaaagagaggaggaaggaaggaaggaataaagcagagaaagaaggaaggaaggagggaaacagagaaggaaggaaggagggagggaaaaaggcacccccttcaaatttccaaatagcccacatcttatgcccagacttgtccccagccaaaggtgggagccaggagcttggcccccaactgtctcacctcggaggcctcagaaggccagtcagccatggagatggtcatcttgtactgggtgtcactgaaagagaaggccaggcctgttgtggtccctgccagtgatgcccctccatgcctgcccgctgctgtgcccgcccacccgcactcacttgcaggactccttgcacatgccaatgcaggtctctctctgcgccacgctcatctgtagatctgagtagcaatgggctgcgcaggagacagaaaggcggccaagaggtttaagggggctttttaggtgcccctgttccctgctgagcctctggctggcccctctgctctcctggccctgtggttaggtggc

SEQ ID NO: 28232 - DNA, 882 bp, Artificial sequence
  DNA replication origin
gaggaaacttaccattcaaaaatgacaaaaaagacatcccaataaatctctacgtgcaggatcctggatcctagatcctgactcaaagggttaaaataaattatgccatttataaaacaactggaaatttgaacactgatgacattaggaattccttttctttttcttttttagggttgactatggtactgtgattatttttagagtccttctatttcagatgagggggtatgtatgaaacaggatggctaggagtggatcatggttggagcaggtgatgagtatatggagttccttatactcttctccctacttctgtgtatgcgtgaaaaggtccataagaagttgctaaaaacagacaatcagactagccctggggagggttttgaatgaggagagataaaaccaaaacaatgctttgtgaaggtgaatacagcagctctgcagaaaattggggtggggggcagatgaaaagctcaaaaacagctcagagatgatgagaatcccctgtggaaacaggtgtgggacacagagaaaaggaagggacagcaatccttggtggtttgtcggcaaagaggggtgcagcaagggagcccagatggtgacaggctgggaagcagagtgtggggagaagcaacggcttccaggagaccaagagcaggtaacaatgtgcagggcgaagacaagcactgctgccatccatcccagggactgcagcctggaggccccaggaaaggcctcaaaggggaggcaggaggagcagcctcaaaacatgaacaggcagaggagagagggaaagaacagctggagtgggaaagaagtttggaagaagcgcaagacagagtggcttgaaataggagggtgcttaaaaagcagcagatg

SEQ ID NO: 28233 - DNA, 1533 bp, Artificial sequence
  DNA replication origin
agaccgctgggcaggatagcagctggctggctcctagagaacagtgacagcagctcgctgcacgcctctttacccatgggcccacctgtcctacatgccgagcttgcatggtatttgtgtttggtggcactgggaggtttatttttgtggtttaggtgctacagagagatctattgaggctggcactttccaaactctttgagaaagacaaacgcctagaggaggtttcatatgataatccaccccttgtactgctggggaagtggaatcttgacctccaccctgttttccttagcccaactttaccacccatcctacccatctaaatatgtacagaattacatgaacatgtgtaacacattatgacacatcccaaatgtggctaattccctgccttctcttttactgtaatttcttatgaaaacattgctttggacatagcagtttttaggatgcactcactatttcaaaaacagatccttgagttgttcaagaaatgcctgtacttgcaaataaatccctgtgatacgatcttcctcagaagccactgctgacataagcagctacctgcctctgccattaagttcaagttcgttcttcctgttgcttgagccaaccagtaactttggttgggtctcttatctgtcaaactgtggcctgtctctgccattgccttacttccagtcttcactagttcttgtctggatcacagcaggcttccaactaactggcttccccttcctctagtcctcgaagttctacttaatctgtcctcctaagggttagcagaatgatcttcccagaaggcaaatctgattttggctttttcccaaagatagtgcttcacaggggcattagaaaggcttggtagaggagaggccttaaggaccccaggaggtttcagccctctgcgccatcagccaatggcagagctcccaaagggctcttgcttctgttctgcatttaacacatgctgtctcatttccctccaactggacggtgaggacaaaacacggactgttcttcatttgtgaattactagcactagcacagtgcctggtacgtggcaggggctccacaactgttgaaggatgggtgaccctggctttagtgaccaggtcttcgggggacagttcaatgagacagtcaggttctggaaatctagcataaatttacaagttcccatggctgagaagtgggcaataacttgtcacagttgagggaaccaatggaattgtaatcctccctcctctgtgcacactgcgttctcttggcacagcaatgagcatactggcacatgctggatgctcccattaatttctaagctctttgagggcgaggattgagtttaattaactgatatccccaagacctagctcagagcccaggaaagctgtggcacagtgggaagggaggtaggggtgagtaaagtgggagacagaggtgagtggggcgagagataggggcgagtggggcgggaggcagggggcgagtgtggcgggaggcagggggcgagtgtggcgggaggcaggg

SEQ ID NO: 28234 - DNA, 2306 bp, Artificial sequence
  DNA replication origin
aaatttacaagttcccatggctgagaagtgggcaataacttgtcacagttgagggaaccaatggaattgtaatcctccctcctctgtgcacactgcgttctcttggcacagcaatgagcatactggcacatgctggatgctcccattaatttctaagctctttgagggcgaggattgagtttaattaactgatatccccaagacctagctcagagcccaggaaagctgtggcacagtgggaagggaggtaggggtgagtaaagtgggagacagaggtgagtggggcgagagataggggcgagtggggcgggaggcagggggcgagtgtggcgggaggcagggggcgagtgtggcgggaggcagggggcgagtgtggcgggaggcagggggcgagtgtggcgggaggcagggggcgagtgtggcgggaggcagggggcgagtggggcgggaggcagggggcgagtggggcgggaggtagggggcgagtggggcgggaggtaggggcgagtggggcgggaggtaggggacgagtggggcgggaggtaggggacgagtggggcgggaggtaggggtgagtggggcgggaggcagggggtgagcagggcagaagggagaggcgagtggcggggggaggtggggcaggaggtaggggcgagttgctaaggaaggtctgtgctctttgttggcagtttcttctcacgattctttgtttcccgtcatttctgagaccaccaactgtctttagtccaagattttttgtgatggttctcattatggggaaaggctcacagcaggatagagtgggagcagctgctgctgttcctaactcactcctgaatgcccagcacagaaattgcgtgactttcgggagtgaataaaaccaaagtgccacaggcatacagtagagtgtgtgtaaataatataaatgaagtaaatggtaattcctaggacacagattttccttaatctcttaatgaaatcaagtattacattctgaagggtaaggagagactggttaggagcacgaatggggacacaatagataaaagatgggcctctctgggctgcattttgcagcccagagaggctgaaagcctggctgagcttcaagtcaagaacagcctgggtgtatccaagggagctcctgaaagagatgatgtcatcctggaagcactaagcctggaaagggacagtcaccatctgtgttcctggctggaaggctgcacagtgtgcatgcgtgtgtgtgtgtgtgtgtgtgtgtgcgtgcatgtgtgtgtgtgtgtgtgtgtatgtggcaggcacctgtaaagcttatcttatctccccatcaatctcaccagcagcacctagactcctaccaaggaccactccccaccaacaggcgggtggcagaggcaacaggtcagaacgcgctgggccgctccagtgacaagattgacattggccacccagctcttatgatcacttctctgcagaaagggatcattttgtgatttacgggctgagtaaagcaaggccgagttgaaatctcatctgagagatttctctcatcctgggcagcttgggccagatatagggagattgctgtggctcctctgtattttcctagcacccattacttacttttggaacagtggtgctttcatttcactttgtaccaccactaaaaatttcatcacccagagattactttagggcaataaagaatcacctaagaaggaggttaagggattgctgctggtccctcaaacaactgtatgaaacagacttcttccccttaactcctaaggaataaaggcatcagccataccaagggaatcaagagatttcatttaaagggataaagaaagaaatgtgggaagccagagccccttgaagggaaaaactgtctgaggaaggccacctcagggcaacataaaagccctggcaggtatgagaagagaggaagggagtaggacaagcttttccagggcagaccccagagattcccctttgatacacagcccttcagcagcacggaatttgactgcaggacccagaaggcaggctgcctaagttcaccccgatcctgaaggctggcccaagggacttcaccaccacttgtcacaccgtttctatatggaaatttatttttagtcccaacaactaatttataaacaagcagtcggaaccaagcccattcctaatttggagacaagatgcactgtttcctcatttaggctgaaaccaccatatcaaaccaaaattacgtgacccctgccaagtaggacaaagccttgccctttttaggtgctcaataaacgttt

SEQ ID NO: 28235 - DNA, 1168 bp, Artificial sequence
  DNA replication origin
tatatgtgtgttttttttttcctttaagagacggggtctcattatgttaccctggttgggctcaaaccctttggccagaattcttctgcatgtctcctgtaagcttcacagtcatcttaggggttattattatctccgttttaccaatgagggattgaggttcaaaggggataaagaatattccccttgtacccagctctgctaggtgccaggaacactgagatgcataacacagggtccttgctcaccaaaacattttttagtgggtacaagccggcagtcacatcaccttactaacgggattggcgaggaggaggagggcgttcgtttcacctgtggtggtaggagttggtttacctgggggtcgtcacagccgaccgcattccaggcagaagaaactgcgtgtgcaaaagctggggacaagagaatgtggagcactccgggaacaagtaggtcagtccgctggagtgcaagcctaaagctcaggaatccgggaaaggggctgcacggctaattggggcgagatcttcaagagccttgtgtgctgcagaaaggagtttatgttttatccgagggcggggttgctgtttgggagttttcagccggagaatctgatcaaggaagcctgttaaaggcgtcacttgcagccatatggtgctaaattgggcggagagggtgagacttcaggcagggagagcggctaaaaagctcttttggtggtggttgggggccgcaggaggactaaggcagtggggagagggagaagcaatgagcaggcgtagtcagcagcctcggtgccttggaatgcagacaggggacaaggagaaatctaggctagatcgcgggtttcaggctcgaggaactggtgggttacagatgcctcccctgtgaggaggagctggtttaggcagagaaggttgagatgtggagtttgaggtgcttgtggcatagtcaaaaaagagatgccctctaggcagctggttggcactggagagggcaagtgtgggacgtacggtttgggagtctggttcattggcagtgagcttgcgggagaagcttgcgtatattaagagcagaggtttggaaagagagcgtggggagccccagcattgaagaggcagatgggaagagaagactgaaggctgagcagaaacaggcagggggagac

SEQ ID NO: 28236 - DNA, 1015 bp, Artificial sequence
  DNA replication origin
gctgagattggcccccgcagcagcccctaatctctcacagcccggccggaaacaggtggaggtttctatggagacccgcctcctccgctcccaggtccggcccctgccacgctttcgctttcccaagctgaagggggcgggtccgggaaatagccctttctctggcctctgccccctggtggcgagtgcggccgcagccgtccaggggggcgtgggatttcgcgctagggggcctgtgactttaaggggcaaggctgcgctggctgtggcggaggccgattggctggaagcagtccccggaagtgacgcagggagaagcccacgtgtgctattccatcccacatggcggcgctcctgaggagactgctgcagcgcgagaggccttcggcggcctctggccgccccgtaggacggcgcgaggccaacctgggcactgatgccggggttgcggtgcgagtgcggttcgctcccagccccacaggtaaccctggcggacgtgacgctacaggccgaggccccctgtcccgtctccgccccacgaatgttcccgaatgaatcctttccggtggtgtcagagtgggcgggcggaggagggttaaggcagcgcgagcccattttacagaggcggaaactgaggtgcaggagcggaaataattcaaattgccaggagtttcttgtgttttttgtgccatcccatctctttcgatctttttttcatgcattccatacatgtgcattgatgacaacctgtgtaacaggtgttgtagacgctgggatacagtgatcattgagaaaggtaggggccttgctctgtggaagtctgcattctagtggctgccgcagacacttataaaaaataagtgtaattttagagtcacatgtgccatgcgggaagtgaaacaggataggagactggggattaagaaggacgctccagaaggctttactgagcaggtaacatttgagctgagatccaaatgacaagaaggagcacgctatgtgaagcctatagaag

SEQ ID NO: 28237 - DNA, 971 bp, Artificial sequence
  DNA replication origin
agagattaggggctgctgcgggggccaatctcagccagctcgcctcttcccagcggcctctgcgggagcggtgggtgttgtacacaatcatcatggcggcggccggggccccggatggtgagtgcggcgggggtggcgggcgccgggccggggctgaggttgcggtcgctcctctgggggatgcggcccggcccgggagggagaaccgcggctcgggaacggaggtccggcggcgcccggacagcgtccgttcccaagcccagcccgcggcgagcgcccaccccctaacccccttgcaggcatggaggaacctggcatggacacggaggccgagactgtggctactgaggctcccgcgcggcccgtcaactgcctggaggctgaagccgcggcgggggcggcggccgaggactccggcgccgcacgaggcagcctgcagccggccccggcccagccccctggggaccccgcagcccaggcctcggtcagcaacggcgaagacgcgggcggcggcgcgggcagggagctggtggacttgaagatcatctggaataagaccaagcatgacgtgaagttccccctggacagcacaggctccgagctgaaacagaagatccactcgattacaggtaattcctgtggcgctgacagccagtcttccccaccccgcctcctgatggcccttgcaccctactaggcacctggtggctttccttgcatcaggtccccccatccttacagcagtcttctgaaggatacttggatgcccattactcagctggggaaagagactcaagtttatagagctagtaagttgcagagctgggattaaagccgaagtctgacgtttaggccccagtttctcattgatgttgctctaacatctctaattaaaaaatcacctaaggcgcttgttttacagcttctgggccctttcccaggagattctgattcagtgggtctgggatgta

SEQ ID NO: 28238 - DNA, 1167 bp, Artificial sequence
  DNA replication origin
gtttaacaaagcacatcttgcaccacccttaatccatttaaccctgagtggacacagcacatgtttcagagagcaccgggttgggggtaaggtcatagatcaacagcatcccaaggcagaagaatttttcttagtacagaacaaaatggagtctcctatgtctacttctttctacacagacacagcaacaatctgatttctctatcttttccccacatttcccccttttctattcgaaacaaccgccatcgtcatcatggcccgttctcaatgagctgttgggtacacctccctgacggggcggctgccgggcggagacgctcctcacttcccagacggggcggctgccgggcagaggggctcctcacttctcagacggggcggctgccgggcggaggggctcctcacttctcagacggggcggctgccgggcggaggggctcctcacttctcagagggggcagccgggcagagacgctcctcacctcccagatggggtcgcggccgggcagaggcgctcctcacatcccagacggggcagtggggcagaggcgctccccacatctcagacgatgggtggccgggcagagacgctcctcacttcctagacgggatggtggccgggaagaggcgctcctcacttcccagactgggcagccgggcagaggcgctccccacatctcagacgatgggtggccgggcagagacgctcctcacttcctagacaggatggcggccgggaaggggcgctcctcacttcccagactgggcagccgggcagaggggctcctcacatcccagacgatgggcggccaggcagaggctgcaatctcggcactttgggaggccaaggcaggcagctgggaggtggaggttgtagctagccgagatcacgccactgcactccagcctgggcaacattgtgcactgagtgaacgagactccatctgcaatcccggcacctcgggaggccgaggctggcagatcactcgcggttaggagctggagaccagcccagccaacacagcgaaaccctgtctccaccaaaaaaatacgaaaaccagtcaggcgtggcggcgcgtgcctgcaatcgcaggcactgggcaggccgaggcaggagaatcaggcagggaggttgcagtgagcagagatggcggcagtacagtc

SEQ ID NO: 28239 - DNA, 915 bp, Artificial sequence
  DNA replication origin
ccagtctgggaagtgaggagcgccccttcccggccgccatcctgtctaggaagtgaggagcgtctctgcccggccacccatcgtctgagatgtggggagcgcctctgcccggctgcccagtctgggaagtgaggagcgcctcttcccggccaccatcccgtctaggaagtgaggagcgtctctgcccggccacccatcgtctgagatgtggggagcgcctctgccccactgccccgtctgggatgtgaggagcgcctctgcccggccgcgaccccatctgggaggtgaggagcgtctctgcccggctgccccctctgagaagtgaggagcccctccgcccggcagccgccccgtctgagaagtgaggagcccctccgcccggcagccgccccgtctgagaagtgaggagcccctctgcccggcagccgccccgtctgggaagtgaggagcgtctccgcccggcagccgccccgtcagggaggtgtacccaacagctcattgagaacgggccatgatgacgatggcggttgtttcgaatagaaaagggggaaatgtggggaaaagatagagaaatcagattgttgctgtgtctgtgtagaaagaagtagacataggagactccattttgttctgtactaagaaaaattcttctgccttgggatgctgttgatctatgaccttacccccaacccggtgctctctgaaacatgtgctgtgtccactcagggttaaatggattaagggtggtgcaagatgtgctttgttaaacagatacttgaaggcagcatgcttgttaagagtcatcaccactccctaatctcaagtacccagggacacaaacactgcggaaggccccagggtcctctgcctaggaaaaccagagacctttgttcacttgtttacctgctgaccttc

SEQ ID NO: 28240 - DNA, 917 bp, Artificial sequence
  DNA replication origin
ccacggctttttcgaggacaacgacttcgtgttcgtggtgttggagctctgccgccggagggtgagtgtcgctgctggggaactggaactgcctgcggggcagttggagcgcccagacctggagctgctggaaagagtacccagcaagggagagcctgggacttggagctgctagagaagggtgctgggagcctcccgcttacgtatggaaagtgtctttggtaagggcttcttggctctgggagctgctagaggagggggttccagtgaagtggagtctgagtcatgttgctgatagggaagtcagcttctggacgcgaggtgctggggggaggggtgctggtaatggacgctagggccctggagtacccagggaggagtcccaggttagtgatgccgcgccctgggagcttctggggtggagctgggtcagtgggggggtagttggagccagacttcgggccttccgggggagatacgagtcaggaaagggatctggtgctggggactcggagcttccggagtggggctgagagaggacccccaggtaaggggggaagctagtaggagaaggggtgctgcgaatggttgtggacagtgttaaggcagggtccagatgccgctgtgctggagaaggaatggggtgggggcatagggaaggagagaaacccaccaagacccctctttcatcccttgggagtccagagtccagtcctgtgcttcctttgcctggtaaccctctcccttccccaccggcctcaatccacctccccatccctcctgccctctccttcccacccacagtctctcctggagctgcacaagaggaggaaagccctgactgagcctgaggcccgatactacctacggcaaattgtgcttggctgccagtacctgcaccgaaaccgagttattca

SEQ ID NO: 28241 - DNA, 804 bp, Artificial sequence
  DNA replication origin
gtgggagctgcgcgaccccatggccgagctggaggcggaagggccggagcagccacccggacccacgcgttctctcctcccgccggagaggcgtggccgccccagtggccccagggggacgaaggccacaagcctggcgcgcggccaagctccagaaccccggcgtgcctctcctcccacccgcgacccgggcgaatggaaaacaatgtgcagggtggcgggtcagagggaggctgcgaacaacgggctgtttcagctccgagattttgcgatccgcacgggagaggctggtcgagtcccaggccccgcgtttccacgcctcccccggggccggttcccacggtgcgccctgacacctgagccacctcctccttcgcgggccccgggcgctcccaaccccagggcgctccccggcgtcgacgctgaggaagcctgggagacctgacctcctctgtagagaccacgccctgctggaaggcgggtggcctatggggagggaatcctggggggaggggggaagaggcatcgaagaactcccaaagacggggaagtggggaggggcggcgagatgaagggtgtgcgttaggttaagtggaaagagcactggtttgggagtccttgttggaatcccagccgtgcccgtgactctgggaaagtcagtaaatcttggtttcatcccttttgttcggttcacattgccttattgttgtttaattgagccaatgcttaaaattcaggagatttaacccaaaatccacattcttggcttttcctgagaaatcagaagttctatcaccaccaggc

SEQ ID NO: 28242 - DNA, 1557 bp, Artificial sequence
  DNA replication origin
gtcagggcgcaccgtgggaaccggccccgggggaggcgtggaaacgcggggcctgggactcgaccagcctctcccgtgcggatcgcaaaatctcggagctgaaacagcccgttgttcgcagcctccctctgacccgccaccctgcacattgttttccattcgcccgggtcgcgggtgggaggagaggcacgccggggttctggagcttggccgcgcgccaggcttgtggccttcgtccccctggggccactggggcggccacgcctctccggcgggaggagagaacgcgtgggtccgggtggctgctccggcccttccgcctccagctcggccatggggtcgcgcagctcccacgccgcggtcattcccgacggggacagtattcggcgagagaccggctgtgagtgcgcccgcgtcggcggctgcggaggggacggggcgaacccaggcgtctggggctagggaaggggttgggttgaaggatggacgaacttacaagtctggggtccggggctccccggagctggaagaccaaggcccctgtgcctgggatcgctgggttaggggcgggttaacctaggggtcccagcctccaagtctggggaggatccgggttcacggggtcggagtccagaggaatccaggcacccaggtgtcctccagcccggctcgaagctgaaggcagagctgacggcggttggaagggatggctttggttctttggttttcgggaggttgcgagccgcccgggtcttgaacctggatcttcgcggggtcgtgtcactctccctccgccccggccagctcaacccctgattccccgggatgatcgccccttccagccagcccccgctgttctggcccatcttcctggcctgttggggcgggtttctggagctggccctgcagagtcacacacccccaccccactctccttcccgcagtctcccaagccagcctgctccgcctgcaccaccggttccgggcactggacaggaataagaagggctacctgaggtgagggggagccggcctcataacttctggcctctgtctctctgactccatgtccctctttgaccctccgtctggcatctctgccttaccctctttgaaatttggctttgcagccgcatggatctccagcagataggggcgctcgccgtgaaccccctgggagaccgaattatagaaagcttcttccccgatgggtgaggcttgctgggcgtggggaggtgaaggcgggaaaaccggtgtgtgagtgggtgggaggggaggttagagacggaggcaaagtgatggccaaggtgaccaccacctctttccattctgtcccgtctccccaggagccagcgagtggatttcccaggctttgtcagggtcttggctcattttcgccctgtagaagatgaggacacagaaacccaagaccccaagaaacctgaacctctcaacagcagaaggaacaaacttcactgtgagtttgtgaggacctgcacaagtgagaatgcagatgtacccacaccagggacaggctccagggatctcccactccct

SEQ ID NO: 28243 - DNA, 865 bp, Artificial sequence
  DNA replication origin
cggccccgcagccgggtcagccatcttgcgcgcggggagccggagcccgagaggtgccggccccggggccgcgggaccgcgggctgcgggccggggaggcgcgggaggcggcggccgctgctgcacccggggccgcgggcgcttcccctgcgccggctctggcggccgcggcgcgcggagccggggctgtcactcgcccagctgctgccgctcgtccagctgcgcttggcaccgctggccccagctgcgggggagggaggcggagccccgggccagccccgccctcctcatttgcatcgcgcccaggccccgcccagcgctgccagctgctttacatatcggcgcccgggctaccgcgggcctcgcggctaagcgtgcacagccgcagctctgcagcgccgggaccgcagcccggggtcgtcggacccgagcctcgccccccaccccaccccgtcctcggcccccggggctgcgttcaggagatgtgcccaggggaggagcgagagtggaaagacctacggggcgaaggggagcgggtggaaggggtggggcgcagcgaattccaccccggcctctgcggagactggtacccatccacccccatccatcccattggtcattctgcacgcgtctcctggagggatgggctcccgctgtcactcattcggaaaggcttgtggccgcacacacttacacacacatacacacacacgttctgcagaggtaggggaggagcgatctttattttatatgtctctaactccaccacagagaagattcttggctttgcttgcctcctgcacgtttggaagagaactccctaccttctgtccatcccctctgcaaaacgactccgtttccccaa

SEQ ID NO: 28244 - DNA, 864 bp, Artificial sequence
  DNA replication origin
cagagccgggaaggcaggaagggtaggtgaacttccttggcatgtaagactcccaagcgccatcggccccagtcacacacacaccccttgaaaggaccctgttgtggtgaagaattcctagcctgggaggtcactccgaccaacgtgattctttcactctctgcctaactcagtaacttcttctataaagtatttttcaccctctcttcccacaaatagcatccccaaagccccagagcctaccttggcactggaatccctgcttcccgaagcccctgcaaaagcagaaggaggtgtatgtcaggcagcccggggggcccagcctccagctagttacccacagagtcacccgccttcctccctgcctctgtaccccaggtgcaaactcccagccacaggcgggtgcccaagagtcttccgcctttgtgggggtaggtgggagctcggctgtaacccccatctgccttcactcctgcagaagagaggaggctgcgaccaccaggtggcgggatagtggggagcgtttccgtcggggtaggggctgaaggcaggcgacagatgtacccatagatgccccgagcaccctcgggaaaagagaagagataaagacgcattcagagggagggcgagagtgaccccgcggcggtggtgtcctctgggagggggactgggaaggaggaaaggatgccccactactggagggactggggaagaaaggggcccgcagtgatgtgaccgaggagtggaaaggggaacccaggccctcggggaggggcaatgggagataacacagggcgctgcccggaggcacagaggagtgagaaaggatgtcccatgcccgcagggagatagagaaggacaccc

SEQ ID NO: 28245 - DNA, 900 bp, Artificial sequence
  DNA replication origin
gcgggcatgggacatcctttctcactcctctgtgcctccgggcagcgccctgtgttatctcccattgcccctccccgagggcctgggttcccctttccactcctcggtcacatcactgcgggcccctttcttccccagtccctccagtagtggggcatcctttcctccttcccagtccccctcccagaggacaccaccgccgcggggtcactctcgccctccctctgaatgcgtctttatctcttctcttttcccgagggtgctcggggcatctatgggtacatctgtcgcctgccttcagcccctaccccgacggaaacgctccccactatcccgccacctggtggtcgcagcctcctctcttctgcaggagtgaaggcagatgggggttacagccgagctcccacctacccccacaaaggcggaagactcttgggcacccgcctgtggctgggagtttgcacctggggtacagaggcagggaggaaggcgggtgactctgtgggtaactagctggaggctgggccccccgggctgcctgacatacacctccttctgcttttgcaggggcttcgggaagcagggattccagtgccaaggtaggctctggggctttggggatgctatttgtgggaagagagggtgaaaaatactttatagaagaagttactgagttaggcagagagtgaaagaatcacgttggtcggagtgacctcccaggctaggaattcttcaccacaacagggtcctttcaaggggtgtgtgtgtgactggggccgatggcgcttgggagtcttacatgccaaggaagttcacctacccttcctgccttcccggctctggaagagtcaaagcggtctcctgaagcaatcctggcatggtcagttccgctgggggaga

SEQ ID NO: 28246 - DNA, 982 bp, Artificial sequence
  DNA replication origin
ggggaagctaggactataccacatgcccagctaattttttagtttttgtagagacagggtcttactatgttgcataggctggtctcaaactgctggccacaagcaatcctcttgcctaggcctcctgaagcactgggattatgggcgtgagccactgtgcccagcctgaacagaccgttgattagatgcatgtgaggccctttcttgttctgagagtctgtcatcagcagtatcaatggctccagatgtctgggaggcaggaagggaggtgcctatctatctcagagaccagaacacccagatttctggtatgagtgtggggtctgtggggaaagggtggaaccataccggtcgactccgggaggaacagaggttcccacctagccctacaggtgaatcttgcaaaactccctaggacctgcctgggagcctagccattccccctgctaaccacacccccagacaacaaggcctggccatggatccaggaacaatgactctgagaaccggaggtggcagatgttttgtgatttaacagcatatcggtttattgtcttatttttcttaggagtaaaagagtccatgggtgtattgttgggggcagcaggaagcacacgtgtctattcggagatttggggcagcaggtggggagagaaagtccatctagacgagggaggtgtgggagtgagatggaagaggagagggaagtgggtggaatccctgggagctgggggaaggaggaaaacacagagaggagctggctgaggtttgagcaaggcctctggagattggtgagagctggggcggcggggattctttatgacagtgctgcagagggaaaaaggattgttgctgagttgggtggaggtaggtaggagtgatttgaagaaggaggtccccttgggaagttgcattagtgggtgaatgggggttttataggccaggcagagaatatggggagggcaactccagcagatgaaca

SEQ ID NO: 28247 - DNA, 1160 bp, Artificial sequence
  DNA replication origin
gagaaggggaagggaaagggaaggggaaggtgaagggaaagggaagtggaagggaaaggggaagtggaagggaaaaggaagggaaagggaagggaaggggaagggaaagtgaaggggaagggaaagggaagggaaggggaagggaagggaaggggaaggggaagggaaggggaaggggaggggaaggggaagggaaggggaaggggaggggaaggggaaggggaagggaagggaagggaaggggaaggggaagggaaggggaagggaaggggaagggaaggggaagggaaggggaagggaaggggaagggaaagggaagggaaggggaagggaaggggaagggaaggggaagggaaagggaaggggaagggaaggggaagggaaggggaaggggaagagaaagggaaaaaaggaagggaaggagaaaagaaagggaaaaaagggaagggaaagggaaaggaaagggaagggaagggaaggaaaggaaaggaaaagaaaggaaagaagaaaggccacctgccagctctgtaggcagaataatgttcccatcccctacccccgaccccctgacaccaccaccagatatccgtgtcctaatcctgggacctgtgaatatattacttacatgacaaaattgattttgcagatgtgattaaattaaggatcttgagaaagggggttatactagattatctggatgagcccagtgtgatcacaggggtccttataggagggagggaagagactcggagtcagaggatgagacgtgatgatggaagcagaggttggaattgtgccatttctggaagggaacgcaagccaaggaatgtgggtggcctctagaaaaggtaagaaacagattgtcccctagagcctccagaaggaaggcagccctgctgacacctcgatttcagccccggaagacctgctgttcagaatgttgacatctagaagtataagataataaatgtgtgccattttaggccaggaaatttgtggtaatttgttacagcagcaataagaaacactagatcagcaaggataagaaacgcctggttaatcccagatggaaggagtagactgtagccaaaagcttgggtgacaggggccctctcggatgtttctgccccaggaaaagcactgagatctcaactctgctt

SEQ ID NO: 28248 - DNA, 928 bp, Artificial sequence
  DNA replication origin
cgccccgtctgggaagtgaggagcgtctccgcccggcagccaccccatccgggagggaggtgggggggtcagccccccgcccggccagccgccccgtccgggaggtgaggggcgcctctgcccggccgcccctactgggaagcgaggagcccctctgcccggccagccgccccgtcggggagggaggtgggggggtcagccccccgcccggccagccgccccgtccgggaggtgaggggcgcctctgcccggccgcccctactgggaagtgaggagcccctctgcccggccagccgccccatctgggagagaggtgggggggtcagccccccgcccggccagccgccccgtccgggagggaggtgggggggtcagtcccccgcccggccagcccccccatccgggaagtgaggggcgcctctgcccggccgcccctactgggaagtgaggagcccctctgcccggccaccaccccgtctgggaggtgtgcccaacagctcattgagaacgggccaggatgacaatggcggctttgtggaatagaaaggcaggaaaggtggggaaaagattgagaaatcggatggttgccgtgtctgtgtagaaagaagtagacatgggagacttttcattttgttctgtactaagaaaaattcttctgccttgggatcctgttgatctatgaccttacccccaaccctgtgctctctgaaacatgtgctgtgtccactcagggttgaatggattaagggcggtgcaagatgtgctttgttaaacagatgcttgaaggcagcatgctcgttaagagtcatcaccactccctaatctcaagtacccagggacacaaacactgcggaaggccgcagggtcctctgcctaggaaaaccagagacctttgttcacttgtttagctgctgaccttccctccact

SEQ ID NO: 28249 - DNA, 1237 bp, Artificial sequence
  DNA replication origin
gccgggcagaggggctcctcacttcccagtaggggcggccgggcagaggcgcccctcacttcccggatgggggggctggccgggcgggggactgacccccccacctccctcccggacggggcggctggccgggcggggggctgacccccccacctctctcccagatggggcggctggccgggcagaggggctcctcacttcccagtaggggcggccgggcagaggcgcccctcacctcccggacggggcggctggccgggcggggggctgacccccccacctccctccccgacggggcggctggccgggcagaggggctcctcgcttcccagtaggggcggccgggcagaggcgcccctcacctcccggacggggcggctggccgggcggggggctgacccccccacctccctcccggatggggtggctgccgggcggagacgctcctcacttcccagacggggcggctgctaggcggaggggctcctcacttctcagacggggcggccgggcagagatgctcctcacctcccagacggggttgcggccgggcagaggtgctcctcacatcccagacggggcggcggggcagaggcgctccccacatctcagacgatgggcggccgggcagagacgctcctcacttcctagatgtgatggccgcccggcagaggtgctcctcacttcctaggtgggatggcggccgggcggagacgctcctcactttccagactgggcagccaggcagaggggctcctcacatcccagatgatgggtggccaggcagagatgctcctcacttcccagacggggtggcggccgggcagaggctgcaatctcggcactttgggaggccaaggcaggcggctgggaggtggaggttgtagcgagccgagatcacgctactgcactccagcctgggcaccattgagcactgagtgaacgagactccatctgcaatcccggcacctcaggaggccgaggctggtggatcacgtgcggttaggggctggagaccggcctggccaacacagcgaaaccccgtctccaccaaaaccagtcaggcgtggcggcacgagtctgcaatcgcaggcactcggcaggctgagtcaggagagtcaggcagggaggttgcagtgagccgagatggcagcagtacagtccagcttcggctcagcatgagagggagaccgtggaaagagagggagagggagaccgtggggagagggagagggag

SEQ ID NO: 28250 - DNA, 1040 bp, Artificial sequence
  DNA replication origin
tcggcggaggagaggccttcccgcaggccgcccccggctccgcctccccccgccgccgccgccgcctcggacacaaagccggcgctaggcctcggcgaggcctcggagcacttcctcaccaccccgggccccagccggcggccgggtggcttcggcggaccccggggacaccgccgaggctccctgacgcttcttctcgccggatcctccgcgcttcgctcgcctttcgtttccgtcgccttgaggcccggaaccgcgagaacacgcccgcaagctgctgggcagcggctagggcttctccggctccctttttgtgttggccccctgccgctcgggggctctcaccgagcggcggcgacacctccaagccaggtactatggcggacgcggcctggcttcggacgagcgccccactgcggggtctcttaagcagggattgcacgggcggcgcgcgcgaggcggggctggcgtgcgcggataggcgggccgagaggcggggcggctgacgtcacaaagcgcacggcccgcccacgtgaccccgcgctttgtgactccaaagcgcggaaactgaaagagcagggacaacgggaagaaccatctgcttcaaaagggaggggggttgcgcgtcaggaggaccggctcacagggaggctcggtggggagagctcgccttgcaggggctgcgtgcagtttccactgcaaagtggcttgcctaggggtggccggctaactcccccttccccacaggccccgtcagctcctctaagcctcccaatttaagtgagcattatggttgctacgcagaaaactatggttgctatgcaagcgctccctagctgctgcttccaataaactggctaccctatactcttgacaagtggaaatcgtggagcagccgctgccaagaactgataacagccaccagcaccatacagatttattgagctcttactatgtgctaggcacagggctgatcgcataacaacattgccaggctcagcagccacgttgtctgggttggatccctggctgtgggggct

SEQ ID NO: 28251 - DNA, 1214 bp, Artificial sequence
  DNA replication origin
atccctgcttaagagaccccgcagtggggcgctcgtccgaagccaggccgcgtccgccatagtacctggcttggaggtgtcgccgccgctcggtgagagcccccgagcggcagggggccaacacaaaaagggagccggagaagccctagccgctgcccagcagcttgcgggcgtgttctcgcggttccgggcctcaaggcgacggaaacgaaaggcgagcgaagcgcggaggatccggcgagaagaagcgtcagggagcctcggcggtgtccccggggtccgccgaagccacccggccgccggctggggcccggggtggtgaggaagtgctccgaggcctcgccgaggcctagcgccggctttgtgtccgaggcggcggcggcggcggggggaggcggagccgggggcggcctgcgggaaggcctctcctccgccgaccgcgcgttttcggcctaggccgtggggccgctcgtggcctccggggagcaggcgccaggggtttgtgtgcggtgggggcctgggcctgggcctggggaagctgacgccggtcgtccggaagccaggaggaggcgtgaggccgctcgtggactccgggcctaggccctctcccctcaaccttctcccggggcctgggtcaccccaatccacggagagagagacccgccgggaggtgcggccgcgctatggacccctgaccccgtggggtcgctcggactcttaacgtgtggactgaccgctactgactgcaccgccaatccccccgtctctgccggccccttagcatgagcgagggggacccagccgggtgacattgtgcccgttggcggattctcgatttcccctcttccccgtcctcgtcctcctcctcccccatgaagtgattctgagtatcggggggtctctggattattgttctgacgaacccctgcttgtggttggggggtatttaatctgaggccttagggtccttcggtgtctttgagtgttttgtgtgtacatattttgctcttaaagtttataaatatacgtatattgagagtgtccacgtctcctcgctgaaccttaggaatcccttggcaccatgtcctgtgtgcattataaattttcctctaaactcaactatgataccgtcacctttgatgggctccacatctccctctgcgacttaaagaagcagattatggggagagagaagctgaaagctgccgactgcg

SEQ ID NO: 28252 - DNA, 828 bp, Artificial sequence
  DNA replication origin
cccctccgcccggcagccgccccatctgagaagtgagaagcccctccgcccggcagccgccccatctgagaagtgaggagcccctccgcccggcagccgccccgtctgagaagtgaggagcccctccgcccggcagccgccccgtctgagaagtgaggagcccctctccgcccggcagccgccccgtctgagaagtgaggagcccctccgcccggcagccgccccgtctgagaagtgaggagcccctccgcccggcagccgccccgtctgagaagtgaggagcccctctgcccggcagccaccccgtctgggaagtgaggagcgtctccgcccggcagccgccccatccgggagggaggtggggggcagcccccgcccggccagccgccccgtccgggaggtgggggggtgcctctgcccggccgccccttctgggaagtgaggagcccctccgcccggccgccaccccgtctgggaggtgtacccaacagctccttgagaatgggccatgatgatgacggcggttttgtggaatagaaaagggggaaatgtggggaaaagatagagaaatcagattgttgctgtgtctgtgtagaaagaagtagacataggagactccattttgttctgtactaagattcttctgccttgggatgctgttgatctatgaccttgcccccaaccctgtgctctctgaaacatgtgctgtgtccactcagggttaaatggattaagggcggagcaagatgtgctttgttaaacagatgcttgaaggcagcatgctcgttaagagtcatcaccactccctaatctcaagtacccagggac

SEQ ID NO: 28253 - DNA, 1742 bp, Artificial sequence
  DNA replication origin
cggggtggcggccgggcggaggggctcctcacttcccagaaggggcggccgggcagaggcacccccccacctcccggacggggcggctggccgggcgggggctgccccccacctccctcccggatggggcggctgccgggcggagacgctcctcacttcccagacggggtggctgccgggcagaggggctcctcacttctcagacggggcggctgccgggcggaggggctcctcacttctcagacggggcggctgccgggcggaggggctcctcacttctcagacggggcggctgccgggcggagaggggctcctcacttctcagacggggcggctgccgggcggaggggctcctcacttctcagacggggcggctgccgggcggaggggctcctcacttctcagatggggcggctgccgggcggaggggcttctcacttctcagatggggcggctgccgggcggaggggctcctcacttctcagacggggcggctgccgggcggaggggctcctcacttctcagatggggcggctgccgggcggaggggcttctcacttctcagatggggcggctgccgggcggaggggctcctcacttctcagacggggcagccgggcagagacgctcctcacctcccagacggggtcacggccgggcagaggcgcttctcacatcccagacggggcggcagagcagaggcggtccccacatctcagacgatgggccactgggcagagacgctcgtcacttcctagacgggatggcggccgggcagagacgctcctcacctcccagacggggtcacggctgggcagaggcgctcctcaaatcccagatggggcggcggagcagaggcactccccacatctcagacgatgggccaccgggcagagacgctcgtcacttcctagacgggatggcggccgggcagagacgctcctcacctcccagacggggtcacggccgggcagaggcgctcctcacatcccagatggggcggcggagcagaggcactccccacatctcagacgatgggccaccgggcagagacgctcgtcacttcctagacgggatggcggccggaaagagacgctcctcacctcccagacggggttgcagctgggcagaggcgctcctcacatcccagacggggcggcggggcagaggcgctccccacatctcagacgatgggtggccaggcagagacgctcctcacttcctagacaggatggcggccgggaagaggcgctcctcacttcccagactgggcagctggacagaggggctcctcacatcccagaggatgggtggccaggcagagacgctcctcacttcccagacagggtggcggccgggcacaggctgcaatctcggcactttgggaggccaaggcaggcggctgggaggtggaggttgtagctagctgagatcacaccactgcactccagcctgggcaacattgagcactgagtgaacgagactccgtctgcaatcccggcacctcgggaggccgaggcgggcagatcactcacggttaggagctggagaccagcccggccaacacagcgaaaccccgtctccaccaaaaaaatacgaaaaccagtcaggcgtggtggtgtgcgcctgcaatcgcaggcactcggcaggctgaggcgggagaatcaggcagggaggttgcagtgagccgagatggcagcagtacagtccagctttggctcggcatcagagggagaccgtgg

SEQ ID NO: 28254 - DNA, 1105 bp, Artificial sequence
  DNA replication origin
ctcacggttaggagctggagaccagcccggccaacacagcgaaaccccgtctccaccaaaaaaatacgaaaaccagtcaggcgtggtggtgtgcgcctgcaatcgcaggcactcggcaggctgaggcgggagaatcaggcagggaggttgcagtgagccgagatggcagcagtacagtccagctttggctcggcatcagagggagaccgtggaaagagagggagagggaggagggagagagggaggagagggaggagagggagagggaggagggggagggaggagggggagagggaggagagggagagggagggggagggaggagggggagagggaggagagggagagggaggagagggaggagggggagagggaggagagggagagggaggaggggagaggggggagagggagagggagagagagggagagggagagccggagtctcactcttacccaggcaggagtgcagtggcatgatctcggctcactgcaacctctgcctcctgggttcaagtggattctcctgcctccgcatcccaaatagctggggttacaggtgccggccaccacacccagctagtttttgtattttcagtagagacagggtttcaccatgttggccaggctcatcttgaactcctgacctcgggtgatctgcctgcctcggcctcccaaagtgctggcattataggtgtgagtcactgcgccagccagtcatcgattttaagtggtatacagacatactttttttaaatgtgttttttaagtgcaatacttactaagtgattttaaaattttagaatgttatatttctataggtgacaggcaagtactgtaaagatcatgaaagctgttcagaactgaattagggaaatgctgcctctgaatcaaattaactttcttctgaagggccctcctttcgttgtgatgcttagattacatttgtttattcccagacacccctgttgcacgggatgggatgtctggcctaaccattccaactctaccccaccccacacacaacacacactgccattttgactttaaaataatccagctagatttactgttaattcttgctaatctggaccaaaaatctgga

SEQ ID NO: 28255 - DNA, 1575 bp, Artificial sequence
  DNA replication origin
acagtgccctgagatctcccttctggagcattcaatttggcataaatcatgttttttaaagttatacctgaaattctgtacttaatatgaacacttttactcttagaagtactgtttaagcattttaatgaggaattcactaagaaataaagttcatgctcgtgttgtaaaataccttccacctggaataaaagccattatgttgagaaaaatgtaaacgtacataggtcttaaacacacaagcaactataagtcaggggtcggcaaacttaaaggaccaggcagtaaatgtttccaactttgtgggccacaggatctttggtcacgactacccagctctgctgtttcagcaccaatgcagccacagacaatatgttaacaaatgggtgtagctgtgttccaataaaactttaatgacaaaaactggctgcaggacaggtttggtttggcttgcgggtgtagtttgctgacacctggcataaatcaaagcttaaataaaatgtagtagtacaaaagcaatgtagagcagacgaggaaatacgggcattgatgtcctacttacctgttactatcttggaagctgttggtgctgtgttggtgaggctgctgtccccagctgagtggacaccaggaggttgggggggtgggggcacgctgggccggttccttggctttggtactggtctcggtctcggtaaggttccagcatgtggctgtgcagtttcagggttaccccctgccagggtctgaggagctggcagactggggttctgttttcctaggggcggagtactggggggcgttggagtctggggaggggtgtgagatggctgctcaagtccatgctcactgggcaatgccatggggttgggagggccctggctattgggtttggtgtgcatcagtggcgtggcctgcgtagggggctgcggcggtgggtgattgggagcttggattggagacaagctgctggagtacctccggggtgctgagagctgggagggggcggagggctggcctggaggctggcccgtgtgctgggtgggaggagaggggcttcgggtgggtggctttggtgacagactgggtggatgctgagatgttcctgaagaactctggcccccggggtggccaggaggtgggttgcccggtttcgggggtgctggagcgggttttttaacagctgcacaaaaagagaaaaaacacctttcagtaggaacagtgaggcagcaaccaaccctggccaggagcccaaatttaacatcaccagtaataaggtacaccagcatcatgtacctctgatgagaggtggtcaggagggcaccacactgtgtcttcctccccaaagcccataacccatcagaagaacatctgacaaacacaaattgaaggcctttcttcaaaatgcctgaccagtactctccaaaaccatcaaggccatagaaaagcacagaaagacggagaacatgtcacagacagcaggagacgaagaagatacgatgactacatataatgtgggctcctggatgagatcctgggacagaaaatggacatgagtggaaaaactagggaaat

SEQ ID NO: 28256 - DNA, 1079 bp, Artificial sequence
  DNA replication origin
ccagccacagtttgccagcgggcaggcggcgccgcaggaagtgaccgggcaagaacgggggtcgccgcccagctcggccttctggtctctgcgccctcggcctggggctccaggccacaaggggaggccgtgctgggcgggcccgaagggggtgggcggggccccggaagagacgtgggggcggggccaacggaccgcggaggcggagccgctacagtctgggcgctggagcggtgggagcagcgctcgtccgccgttggggcccccagcccgcgcgcgtgaagcagctagccgaccaagccccggaaggcgagtgccggagggggcgggacagctcctccggggccagcgggcaccaggcttgggggctgaggcccagcggcccgagaccaactgggctgaccgaggccgcctccccgccagccctggggtccactgcccggggagcagctcccttcccaggtcagactcgggcttcatcctctcttgccgcgcgccgagcggttttcaactctcactgctagaattcctccaaccacccaggatagcaggaccgagatacatggccacccatgacccggagcgtccacttccagggacaggcagtggtgattggcttcggttgtcatctgtgccatctgtccatggttcgagaagctgctgttcacgttttggggaggatcatggtttgagggctcccgtggtagaatttggggagctctcataggcagaaggctgagaaaagttggtgctgtgggaagtcaactggcagccgatggagtcgggacccgggaggaatggaaagggaacccagataggaagctactgcagtaggctcagagaggtgatgacggcagggctaagacagcggccttgggcggtgactgggaagaacgttgaacaccgtgtttgggctgaagaaaagagcaagggaagaggtgaggaacttcaggtgagggttgatgtagatgttacttacacaggtaacagacattcttcaccttttcattgttttacaatgattcattctctctctctctaacatataattgtgatattttcacctgtagtcccagctg

SEQ ID NO: 28257 - DNA, 819 bp, Artificial sequence
  DNA replication origin
ggtgggagatgcagtgggtgtgttggaaggagttgtcatctgagatggggtggctagggaaggcctcactgaggtcagtgcagaggaaaggcttgcagggggcaggagtgagccctctgggtgtctggggaagcaatgtccagcagagagaagcaggagagtagaaaggtcctgaggcaggagccggcctgacctgttccaggagcaccaagactagggtgagggatggggatgagtgcaggatagatctcggagagcatgggtgcaggaggcgggggcagatgctgcaggtcactcgagggaggctcttgtaaggacccgacttttcctctcagtggggtgggagctgttggagcatttggaactgaagagtgaggtggtctcacttggttttaatagcattgcttcagcctctgttaggagcagactgcagagttaaggacggaggcaggatcagttagtcggctgtgggggtgtcccctgtgagacaggctggtgcttggatcaggatagtggtgatggaggtgctgagaatgtatcagattctgggtgcattttgaaggtggagttgatagaatgttctggcagagtggatgtggggcaagactgaggggcccaagatgactccaaggtttttggcttagctcaaatgtggctcactccaagaggcctctctgacactcacagacaagatctagcttctgttaaatgttctcgtaacaccctgttcatcttcttggtggtcatcggcccagttgtaatttagaaagtgcctagtgttcatctctgccactggaatagacgcgatactgagcacag

SEQ ID NO: 28258 - DNA, 1639 bp, Artificial sequence
  DNA replication origin
gggtgccgctggggccgccggattccgagagcggcgccgggctctttcgggcccacgacggccccgaccgtcctgaggaaaccgctgccgccgaggaaaggccgcaaaaactgttccgcccggaagggagaagagctgcggggcgaagccagggctcgcagggggcagcggcaggctgctcgcgttcggcctcgtccactcggcccgcggagagcgcggggggcgctgggaaccgcagtcacgcatgcgccgcctgccaccgagcgccgcggggcccgcgcgaggcgtcctggcgggcgaggggctgggggagggggggggggccgtgcggtggactctcgcgagagcgcgcggcgcggtgactcgtcgctgagggactttaagattgtagaggggcgcggagggtcctccccggggcggagggacacagagggattctagggaacctgccgtcgcgagtcccgcttcaggcggagaatctaggcggcggcggggcctccctgaggcggaggagtcggcaccggggcctggctgccggggaaggagagcacgggagcggggactcctgtgtctggcggagggacacggcgttccggtggagggatctgttccttgtacctggtccagggttgcggtcggggatggagcggttaccccgaccctgcgggaccttcttcctctggcggaggtgcacggcgcggcgtggtgtttttctggcggaagtatctgtgcgtggccccaggcccttcccggcgcggtctcatctggggccacttgttggccctcgcgttggggaggttcatgtggtgcatcctgatgagaaggggggtcacaggggtctcggggccagggttcagccagccaggccccagcttgctctcttctggtgctgcccctgtccctgaattcatagacccggctttccctctcttgagcacctactatgtgccaggctgcgctttgcgcatgtagcagaggcaacagtgtcacctgggaagctggtttcccccaaaggaactcttgtctgtccgttgttgcagagccagcgcatgagaccaagtgtgagtatcaggcagtgcagccttcattcagtggccatggaattggagaagtgggagggtagctcgcaaatcaagctctcagctcttggaaactgagaagttacaggtaatagggagtgttgacgaaaagtaaaaccgtgcaaaatatttgaagagatttattgtgagccaaatacgagtaaccacagcctgtgatacagccctctcgaggccctgagaacatgtgcccaaggtggtcggggtgcagcttggttttatgttttaggttggcatgagacatcagtcaaatacattaaatacattggtttggtccaggaaggcgggacaacgcaaaggggtgggggtgggggcttccaggctataggtaaatttaaatattttctagttgacaattggttgagtttgtctgaagacctgggattgatagaaaggaagtgttcaggttaagataaaagatagtggagactaaggttcttttgaagtcttatggtggctgctcttagagataatagatgacaaatgtttcctattcagatcttcaaaaggtgttagacttttagttaatccgtttaggattg

SEQ ID NO: 28259 - DNA, 1406 bp, Artificial sequence
  DNA replication origin
agcccccggcgctgcccggacatggtttcagccgccgcccccgccgccgccgccgccgccgccgccgccgccgctgcccagccgccccggctgcatgaagcgacgccgctgcgcccccggccctggccgctgtcccgctgcgccaggggggagcccggccgcatggccccccgccccacgctgcccgccgagtccgggtggcccccccaccaccgcccccccctcagcctcaggcaaggggaccgaggggggcgcgcggacccgccggcggcacctgctccgtctgcagcgcccccgcttccccggctccgccgcggcttctgcttcagcctctgccgccgccgccgcgcgctgttgcagcccggagttccttccccgctgctaactttctgccgggagagaggagaggcgcggaggggaggaggagggggccgggcgcgcgcccggcgccgccgagggaaggggggtgcgcctcgcgcgcgcctgcgaagggggcgggggagcggaggcgtgcgctagggctggggcacccgggagaacggagatcgtgccccccagcccccagcacgcacgcacttggggtgttccccaccccacctcgtttactcccctcccttgggagctcgggacgccgtgttctccattcctttgccccagtacttttagagaggtaaagcccaacgcctgcctccggtgccgcgcaccgggagctggaagacagcgggtgacgaagctctcgcttccgcttttcctctgggactccaactcagcccatccccgaccctcccttctctcgcccgggatatcctcctgccttcggtccaggagtgaatccttttctacaaccgctttcccatcccaacttccatctttccagccaccgccccccgccccccatcttctcttgaagctcctgatgggtggagctttgacacaagcccccaggtttcccagccccagagcttttccctctgtcccatcaccaggtgacaacactttctgcttcaagagatgaggctgcccctcctcgacacccttaatcacaggtgcacacacctgcgcctcttcgggggcattgccactaacggagttcatggtttcctggactgaaatagtgtgggaccactgtcgctctgaacacctaataagcggagacaagctgggttgctgggtgtctgtgcatcggctcgctgaaattttttaagtgtattttctttgcagagagatctccacccctcacctccctctcctgggggaacatggtaaacatcagaaggctttggaagattcacaactagactttgcttcctgttgcattttgctcagggaagtgagggaaatgggagaaagagacagagtgatcaactgaggcactccaacaaactcagctttctgcaaccggggct

SEQ ID NO: 28260 - DNA, 1613 bp, Artificial sequence
  DNA replication origin
gccgggagccgcgatggcccggtggcccgcacctcctccgcctccgcctccgcctccacctctggccgcgccgccgccgcccggcgcctctgctaaggggccgccggcgcgcaagctgctttttatgtgcaccttgtccctgtctgtcacctacctgtgctacagcctcctgggcggctcgggctccctgcaattccctctggcgctgcaggagtcgccgggcgccgccgccgagcccccgccgagcccgccgccaccctctctgctgcctacccccgtgcgcctcggcgccccctcgcagccgcccgcgccgccgccgctggacaacgcgagccacggggagccgcccgagcccccagagcagccagccgcccccgggaccgacggctgggggctgccgagcggcggcggaggcgcccaggacgcctggctccggaccccgctggcccccagcgagatgatcacggctcagagcgcgctgccggagagggaagcgcaggagtccagcaccaccgacgaggatctcgcaggccggagagcggccaacgggagcagcgagaggggcggcgccgtcagcacccccgactatggggagaagaagctgccacaggcgctcatcatcggggtcaagaaaggagggacccgcgcgctgctggaggcgatccgcgtgcacccggacgtgcgggcggtgggcgtagagccgcacttcttcgacaggaactacgaaaaggggttggagtggtacaggtaggaccctgggctccgcgggctggtggagacgcgtgggggagacgcggaggggaagccgcggctttccacgcccttcgagcatccaggcaccgtcccgagaggcccaagcccccgcgagggctctgcaaaccctggcggcgttgctcagggggatcggctgagagggctggactccagcgaaaggtcactttatttcagggcgaggggaggaggtgtcaccctgccctgcctcccgcgctcctcatccaaggaggtgctgtctgaatctgcccagctccaagcctgggaacccccagccctcctgcctgctgggtgtttccgaaaccaggctcttgcggggttctgggattctgggcagaggactttgaggagtgagacaggatggctaaattgactaaggggatttgaggtcccctggaatctcttaaaatcaccctcaaacgcatttgcgtggctggaattcaactttagtgtgttaaggtcagagcaaaatgaatagggaacagttacaaagatcatgctggcgttttggctttctagtaaagaaaggatgcctcccacctccgtaactttccatcccccttggctgaatgagcacggagttgattttgcaccagaagcctcaatgtctgcatgacagttggtgccctgagagtttttatgcctcagaccgtgccctgtctaatctccgcctccttcgcaacagattggagcttctgtcttgtgagatgttcatctccctcctttcccaccgtctgccggtggtgagagaaaggtaggagagaggactagaaagttaagtgcaggtaaaataaattaataatccagctttcctgccagccataacattttaaacggcactg

SEQ ID NO: 28261 - DNA, 1262 bp, Artificial sequence
  DNA replication origin
aggacacagtgagaagccactatccagaaagcagagagcagggagtctaccttgatcttggacttcttggcctccaaaactgtgagaaatctgtgtgtgttgtttattagccacacagtttatggcctttggttatagcagctccagtggactaaagcattccatgaaacccagtttgagtagtgaaggtttttagaaaggtttcaaagaaggtgacatgttaactcttgaaaggtgaatagtgttttgcagggtagagaagaaaggaagggttactaggttgagagaaaatggaatgcaaaggcagagagcatgtgtgtgtgtagtgtggtgtatgtgtatatgtaagtaatgtggtagatgtgtgtgtgtatgtgtggggtgtatgtggatgtggagggagggtgtatatgtgtggggtgtgtgtgcacgggggaggtgtatgtatgtggatgtggagggagggtgtgtgtgggggtgtgtgtggggtatagtatatttgtggagtgtatgtgtgtgcatatgtatgtagggagaggctatgtgtgtgtgtggtgtgtgtgtaagtgatgtggtagatgtgtatgtggtgtgtgtgtgcagggaggtgtatgtgtgtgtatgtggatgtggagggagcatgtgtatgtgtgtgtggggtgtgtgtgtgcacggagtgtgtgtgtgggggtatgatatatgtgtgtgtatgtgtatgtagggagagggtatatgtgtgtggtgtttgtatgtgttgtgatgtgtgtatgtggggtggtgtggagggtatggtgtgtgtgtggagtgtgtgtgtgtagggtgtggtgtgtgtaaggggtatgtaagtgatgtggtatatgtgtgtgtgcatgtgtggggtgtgtgtgggtagggtgtgcacgtatatgtgtatgtatgtgtgtataggggtatatgtggtgtgatgtatgtatgtggggtgtgtatgtttatggggctggatgtgatgtttttatagggaatatgtgtatgaggcttgtagaatgtgcgagttatgtgtagggtgtgtacatggtgtggcgtgttgtgtgttcatgttagtggggtgtgtaagcaatgtacatgtgtggggggaggcaggggaggtgcggtgtgcatgtatatgtgtgtatgtgtgtgggtgtatgtttatgtggttggatgtggtgtctgtggggagtatgtgtatggtgtgtgtagggtgtgtggggtgtgtgtggtgtgtgtgtgtgtgtgcacgtgtg

SEQ ID NO: 28262 - DNA, 1824 bp, Artificial sequence
  DNA replication origin
tacatgatcagaattgagaatgttacccagctaagacatggctcaccaagacatcccaagaggctgtgcccaatgctggcttggtgagtcgggagttggcctttataagtgtctaacaaggccatgttgctcaaaggaagcagaaatctaagcagcaagggaaataccttaggcaaaagaggtcttggtgtgatagaggtcttgagacaattctcaagtggttaagtagagtgggatggaaagattgtgatctaaaagaatctgagaggaaagaaggggtcagatcactccgaacgttgtgttaaataagaaatttgggatataagctaagaggagtgggagtcatagaaagattttaggcaggaagtgacaagaattggcttatatttttaaaggatcattctggcttttaggtaaaactgattgcaggaagggcaggcaagaatgaaaacaggggaaccaattagaagaatattacagcagtgaaggataaaaaacgatgctggctttgactaggatgacggaagtaaagacggaaagaagtgaatgcattggtagatatgtggatgtatgggtatatgtgtgaatggattgatgggtgagtgagtgggtgaacagatgggtgaatggatgagtggatagatgggtagatgaatcgatagatggatgagtggataggtatatgggtgatggatgggtggatggttgagtagatggatggatgggaagatgggtggatagatggatgggagagtgagtaggtgggtggatgagtgtatgagtgaatgggtatatgggtgggtaaatgggtggatgaagagataggtggatgactgaatgggtgaatggatgaatgaatgaatagttggatggatgggtgaatgggtggatggaagaatcagtggaggggtagatgaatggatggatggatggatggatggatggatgagtgtgagtggatgggtgggtggatgggtggataggcagatgagtgagtaggtgggtggataggtgggtagacaaatggatgaccgatgaataaatgggtggatagacgaatgggtagatgggtgaatggggggggggtagatgagtgaataggtggatgggtggatagataagatggatggatgattggctgggtgggtggatggatttatgagtgggcaggtggatgggtggatgaacgaatgggtgatggatgggtggatgcttagataggtgagtgaatggatgaatgaatgaaaggactggtgggggtgtatgtatggatggaagggtgaatgtatggatgatgggtgagtggatgggtggatggatggaatgggtaagtaagcaggcagatggatgggtggatgaatgggagaatgggtgaatggatagatgggtggatgggttgatgggtgagcaagtagatgggtggatacatggataaaagggtggatttgtgagtggatgtatgtgctgatgggtgaatgtatggataaacgggtatatgggtggattaatgggtggatgggtgaatggatgggtagatgtgtggatggatagatgcgtgagtgggtgggtggatttatgggtgaatggtggagtggataatgggtagatgggtaggtggttgtatgagtggtagatggttggatggatggatggatggatggatggatggatggatggatgaatggatcgatacatgggtgggtggatgggtgagtgaatacattggtgaaagtatggatggatggatggatggatggatggatggatggacgcatggatggatggacgcatggatggatggatggatggatgggtggatgaatg

SEQ ID NO: 28263 - DNA, 831 bp, Artificial sequence
  DNA replication origin
tcagtctgaaaggtggtggaagttcaggcggtgatgttagcaagccggtactgcagaccctagttggtcgttttggttctaatcaactttagctagttcttttatctcataaatggagggagtttctgtgtttcagcaagttgttttttttttctcatttgccatcctgcaaatacaagaatttctgttcatcattggtttcaactctttgggacacagtttcaagcatgtgcccagcattggagattccatgatgagcaaaacctttaagatcccattgaaaggccttgtaacccatcagggaaggaaagagggaagggagggaaggagggaagaaaggaaagaaggaaggaaggaaagaaggaaggaagggagggagggagggagggagggagggagggaggggggagggagggagggggaggggggagggagggagggagggaagggaagaaaggaaggaagggtgttaagaaggagtgaaggaaggaaggagggagggacggaaggagagaaggagggaaagaaggaagagaaggaaggatgggtgttcagtggagaggaaaatgatgagggcagtcagggggctctgctttcatctcctaggggcctattttagtctaggtggagtgaaaacagtccatgagtggggatgtttcagctgagacaggaatgaggatatgagttagccagacaatgggagtagggattgtccgaggcggggaggcagaggtaaattgaggaaaggaggaaagttcaaacaagctgaaatgcagacaatgcagagggcagttgtggtcctagaatctcattacatctttatttccagga

SEQ ID NO: 28264 - DNA, 1661 bp, Artificial sequence
  DNA replication origin
ttattcagcaatcccactactggatatctacccaaaggaaaagaaatcattatatcaaagacacgcctgtactcgtatgtttatcacagcactgtttacaattgaaaagtcatggaatcaacctaagtgcccctcaatggatgatgcggtaaagaaactgtggtacatataacatggactaccactcagccatcaaaagaatgaaatcgtgtcttttgcagcaaaatggaaggagctatagaccattatctaaggaaaatagctcagaaacagaaagtcaaatgctgcattttctctcttgtaagcgggaactaaataatatgtacacacagacacacagaaaggaattatagacactggagactacaaaaggtgggagggtgggaggggttgagggatgctaaattacttaatgggtacgatatacactattcaggtgatagttacactaaaagcttaggtttcaccactaggcaatatatccatgtaacaaaactgcaactgtacccctaagtctataaaaaaaatagaagaccaggaaagggataagttacttgcttcaggttacagaactaataatgatagagctgggtctttaatccagctctgcctgactctaatcacttaatacgcattaatgattttaggcaagtgcggctaaggccaggaagctaacaatagggaggatgccgtgctgaggctaagagagaagaaatatggggatgtgggagcagagaggaggggggcttattctagttgtgtgcgtgtgtgtgtctgtgagaaagagagagagacagagcaagagggagagagaaagagagagcatatgggggacagaaagagggagagagggaggaagagagagtgggagagagagagaagggggagagggggagagagagaaagggagacagaggggagagagagagaaaggggggaagggaaagagaaagagtaggggagagagaggggagtgagggagaagaagagagggggaagggaaggagtgggagagaaagagtgggatggagagggaggggggagggagagggagggagagagagaaagagtagtagaaagagcaggggagggagggagacagagagagagaggaggagggggacagagagcatgcaagagaaaggcgggagagacagagtgggagagaggggagagagagagcaggaggtggagagagagagcaggaggtggggagagagagggtgagaaagagaaaaagagagagggggagagagagagggagagaacagggaaagagagagagggagagaaagagagggacagagagagagagaggaagagagagtgttggaggagagagagcgaaggagcaggggttagggagagatgggagtgggactggttaaggagcatgctccagagcacatggcatcgaagtttgggtctggaagctccaagggtctgatgagagttctggaagcacctacaggaatcactgagatggcagaatccctctctctccttggcttcctcactttgcttctcttgtgtaaagcgtctctctgtctcaaaaataataatcgattgaaaaagaaatcatatggagacagcagagagaaagggcaaccccttaatgtggcatcagaagagaagtctcctctgggaaacaggtgcccacc

SEQ ID NO: 28265 - DNA, 1107 bp, Artificial sequence
  DNA replication origin
catgatgtgaatggctctagatgagctaagagccactacacaataagacacacatagtaatcaccccagctcaggtagaaacaacctccagagatgtgaatcagatcatgctagttcattcagtcctagtagagccaccagtctttcaagatcagaagaacccttaagacaacccacaaaatagtaacacaaaataaatgtttgttatttaaagtcactaagttttggggtggttttttatggatggatggatgaatggatgtgtcaatggatgtgtgggtggatgaatgtgtgggtggatgaatgatggatggatgtgtaggtgaatgggcgggtgaataattcaatggatggatggatatgtggatagctgtgtgagttgatatgtgggtagatggatagatatgtgggtgggtggatggatatgtgggtggatggatggatgtatgtgtgtgtggggtggatggataaatggatggatggatggatggatgaatgtatgagtagatggatggatagatggatggatgtgtgggtgggtatgtggaggagagtggatggatggttggatgaatgaaagaatgtgttggggggatgaatgaatggatggatagatggatggatgaatgtgtggatggatatgtggaggtgagtgcataggtgaatgaatgtgtccgtagatggacagatatatggatgtgtaagtggaaggatagatagatgtgtaagagggagtgaatggatgatggatggatgaaagtgtgaagggagtggctggatgatgaatgtgtgggtagatggatggatggatgaatggatgggtgtgtgggtgagtgggtaggtggatgaatgaatgatgggcagatggatggatgtgtgtatggatggctgagtggaaggatggatggatggatggatggatgggtaggaggacagaattgatcatggatggacggatgtgtaggaggacagaatggatcatggatcgatggatgtggtgggaagtggatgaatggatgggttgctagatatgtgggtggatggatggatggattgatggatgtgtgggtggataggtggctggttggctggaagtgtacatgggtg

SEQ ID NO: 28266 - DNA, 1107 bp, Artificial sequence
  DNA replication origin
cttgcggggaggtgtagagggagaggtgcgggctgcaaccagcgctgcacgtggtgcttgcaggccagcgcgagttccgggtgggcgtgggctcggcggccccgcactcggagtggccggccagccccgcggaccccgggcagtgaggggcttagcacctgggccagcagctgctgtgttcaacttctcgccaggccttagctgccttcctgcgggcagggctcgggacctgcagcccgccatgcctgagcctccccgcctcctccgtggactcctgtgcagcccaagcctccccgacgagcgccgccccctgctccatggcgcccagtcccatcgaccacccaagggctgaggagtgcggcacacggtgcgggactggcaggcagctccacctgcggccctggtgcaggatccactgggtgaagccagctgggctcctgagtctggtggggacttggagaacctttatgtctagcaaagggattgtaaatacaccaatcgacactctgtatctagctactctggtggggacttggagaacctttgtgtggacactctgtatctagctaatctagtggggactggagaacctttgtgtctagctcagggattgtaaacgcaccaatcagcgccctgtcaaaacagaccactcggctctctgtaaaatgaaccaatcagcaggatgtgggtggggccagataagagaataaaagcaggctatccgcgccagcagtggcaacccgctggggtccccttctgcactgtggaagctttgttctttccctctttgcaataaatcttgctgctgctcactctttgggtccacgctgcctttatgagctgtaacacacaccgtgaaggtctgcagcttcactcctgaagccagcgagaccacgaacccaccaggaggaatgaacaactccagacgcacggccttaagagctgtaacactcaccacgaaggtctgcagcttcactcctgagccagggagaccacgaacccaccagaaggaagaaactccgaacacatccgaacatcagaaggaacaaactctggacacgccacctttaagaactgtaacactcaccacgagggtccgtggcttca

SEQ ID NO: 28267 - DNA, 1591 bp, Artificial sequence
  DNA replication origin
ggcgagaaggacagagagagacagaatctggagagcaaagagctgaagacagacaagctcaaagtttgatatgttttagtgtcccacagtctccatggacactgttgattggtggccaagctgagctaagcacaatttgctgagaaggagagatgtggatctgacatgcagggacctagagaggcccccggcctgcactcccttcccccaagccccagcccagagtgagagctctgtcctgcccaggtctgtgccctcttgtcctgcagctcttcatccccagccgctaagaaccaataaggacagttgtattctgtggaaagtgtcaggaggaatttacagcccttctgcagagaagtaaaatatggccctctacttgggcttctcatcctgctgggctcctccttcttatttcccagagatgagattttgagtgatgaggggggtagaggatgggttgggggcagggatggagagaaacggtgacctccaaagagatgcagagatggaggtggaattaatgaagactacatagttgggagtcacatggagagaaagaaagagagggacagaatccagagagcaaagagctggagaaagacacctagctggagaagacaatccagagccagagacaaagatgaagaggagacagggacagagccagtggcagagagacagaagaatgatcggggtgggggaagagaaagagggagggggaagagaaagagggagagaggaaaagagagagagagagagagagagagaccgagatagataaatagagagaggaggaagagagggaggagcgggggagacgacagagaggggagagagggaggaagagagggagagggaagagatagagagggagaaggagaggagggagatagggtgatgggggaaagatagagaaagagagaggaagggggaagagagacagaagggtgagaggagggatagagagaggaaatgaaagaaaaaggaagaaagagaaggttgagagagggagaagagggagagaggaaagggagagaggagaggagaggagaagagaggagaggagaagggggagagagaggagaggagaggagaagagaggagaggagaagggcggggggagagagagacagagacaacagagacagagagagacagagaaagtgtgagcacattttctagggcctaagacaaaactacagagaaagtaactgtggagtgaagaaaggcagcgagagatgcaaacacaacagacaaggaagcgacatgaaattaaaagaatgatccagagataagcagaatgtggttcacagcagagaggggcaacataagaaggatagagatggaaacagtgacaccaggcattttgggagaatgcccacaggaaataggacagagctgagagtctatatttattgagagcctcttacgccaaggcagtttacatgcatatttgctggttacaaacatttattttcttgttggatccttgtgaaaatcttaagggcttatcattatccttactttaaagatgaggaaatggaggtgttgtgtggccatgagctgggattcacctggacctacctggctc

SEQ ID NO: 28268 - DNA, 951 bp, Artificial sequence
  DNA replication origin
aaataaaataaataaaataaaatataaaataataaaataaaatagtgtctgggacccaccagaagttctggttaccggtatgtcttaaaggctcccgggtgattctaaggcgcagccagattagagaagtaagggcctggacgtgcccctcctggcacagccctgggctctcactggtgcggagcctgtgcaaggctcttctgcgactgtccggttcgatcctgcccgcggctctgtgaggctggccaggcgtcctcccctcccaggtgcagaaacagccatgcaggccaggtaaccacgtacccagagactgaagttaaatctgactccagaatccagaagaaaggaagagaaagggaggaaagagggatggaggaaaggaagggaggaaagagtgggggaagaaaagaagagggaaggaagggaggaagggagggaggaaaaaagggcaggagggagggaggaagggagggggagggagggaaagagagagggaggaagggaaggaggaaaagagagggagaatgaaagggaaagaagggaagaaaggagggagggagggaggaaaggagagagagtaaggaagggaaagagggaaaagggaagaaggcagggaggaaggaaaggaaggaggggaagttggagggatagatagatgatgggtggatggacggaagaatggatgagtggtgggtgggtgggtgaaaggatacgagggaggaatgaatgaatgaagaggaggaagggaagaaaagaagatagggaaaggaggagaagggagaaaaagtgatatgtgggggttggagaaacgaaggcggaaaggacggatgaattaatgaattagggatagatgaaagaggggaggagcaaggagagcgggctgctgcctcggcgacctctggtccccggggtcccgtgagcagccagggcggaggtcagggaaggcgggtc

SEQ ID NO: 28269 - DNA, 2355 bp, Artificial sequence
  DNA replication origin
agtaagtggcagtttagtttcagcaaaaccacatcatctatcatattaaataaataatgctaatttgaattttatcacttttagtgttcagtttctaatttgtttagtcttgtttataaacttcttttgtcattgatactaaaacataattttcctctcattttgactctgaaattgcgatgcatcttaaaatctacagcctcttacaatttcaaatgacagcactttttccctttttaatgctacataaaataataatgcatcttacaattgatggtgtttcagattcaatgaagcacagtatgtgcaaaatgagttaatacctagttttgtttggaaataagtaagtaacattaaaaattcaaattttgaagtcaatatggggtctatagaatgttttcccttcaaacattttacatactactgcagttggagtatcgttgatgacaatgaggcaatgagatgaagttttcatcacaggagtaagatgatcagattaccacatgaggaagataatctagcaccacactggcaagaaaaagacaagttttgcagtaaagcaagagaagacctaaacttaggaaacataaggaaagatgaagacataacttgaagatctatgcaggaggcagactcaacaagatttagtgattgattagatgtgtgaaagcaagcatgtgtggagaggagaaagaaggagaaggaggatccagggatgatgctgggtttctggatggaagggagtggcatctccaaggtacagaaaggcagtgaaggttgagatgatatgattataaccataatcatggtgatagtgatactggtattgaaggctgtgatgggtggtgataatagtgttggtgatgatgggtggtcatggtggtgatggtagtgatggtgttagtggttatagaggtgatgataatggtggcggtgatgtgtgatgatggtggtaataaaaatgttggtgacgttgggtggtgatggtaatgatgacggaggtgatgacagtggtaaagaaaatagtggtgatagtggcggtgatggtagtgagtggtgacgatagtgatggtaataaaaatggtggtgggtggtaatggtggtgatgttagtggtggagatgatggaaatggtgatggtggaggtgatagtggtagtggtgatgatgtggtggtaataaaactggcttgcattttgataaacgtagtggtgatggtggtggtggtggtgatggtggtggtggtggtggtggtggcggtggtggcggtggtggcggtgttgtggtggtggcggcagtggcggcggcagcagcggtgtggtggtgtggtgatgtggtggtgatggtggtggtggtggtggtggtggtggcagtggtggcagtggtggcggtgttgtggtggtgtggtggtggcggcagtggcggcagtggcggcgatgtggtggtgtggtgatgtggtggtggtggtggtggtggtggtggtggtggtggtggtgatgatggtggtggtggtggtggtggtgatgatggtggtggtggtggtggtggtggtggtggtgatgtggtggtggtggtggtgatggtggtggtggtgatggtggtggtggtggtggtggtggtgatgatggtggtggtggtggtggtggtggtggtggtggtggtggtgatggtggtggtggtggtggtggtggtggtggtggtggtggtggtgatggtggtggtggtggtggtgatggtggtggtgatgtggtggtggtggtgatggtggtggtggtggtggtggtggtggtggtggtggtggtggtgatggtggtggtggtggtgatgatggtggtgatggtgatggtggtgatggtagtggtgatggtagtgataagggtgataatgattggtggtagtgggggtggtcatgatgattaatatagcagaataatcatcatggtgttttaaccaggaggcctagaagtaaaagtagtcatactggggattggtcgcttctcctgccccaccttgacaccaagcacctactggagatatccaaccttcttcaggcctcatccaagaaataactatcatggctttttcttcctatggcgactgtaggtatcactctcactccctcctcactcaatggaaaataaattataagtgaatgctggaaccaatgaattcccctcacagcagagaatatccattatttacccataaaaatatttcaaggattattagcatgtaaactgtgattaattaaatttgcaaaaattgtttctgatgcatgtaaatgaggtggttcctgctgggtgagactaaggtgttgctctctctcctgctgcttgaggagacagttgcagggaagt

SEQ ID NO: 28270 - DNA, 1127 bp, Artificial sequence
  DNA replication origin
gggcttcactggagacccacccctttctgcccgggagcctgtctgcctcctgctgccacctgtttaatacatgtcatccacggtgcccaggctgtttatgcaaaggggctcctgcaggcctgtgccaagctgccctcagctcccccttggcctccctcccatgtttgtcagtgaccaaagtctggaggggctgagatggcaggaggctggtatgtcagcactgctctgcgtgtgcaacacctggccgggttgagacagtccccaggcttggccacagctttgctctgaaatcgaagtgagtgctgggagcagggagaggccagacagttggagcaggaacttctgagcctgtcgtggcgggggcttccccgacccctgagaacttagggatgccctggtctggagccatggctgggcagctgcagctgtaccggaagagcacggggctcccactccaccaactcacaacagggcaggcaggagccctgcctgttcctggctcccaccagctccgtggagtgcacagccctggctgcttctcccccactgcagccagcgtcttcacagcggctgctccaaacgggcgccactggcatcagtatccccaggatcccctagagccatccactcatttctccgtctctgaagtgctgtattgatccctgtaatccagtattgtcattgtttgccgtcactgtcatggcactcgatttcttctacttgaatgtgagttcttcaagggcagggaccatatcctgtgaatcttgtgtcgccagtgcccagcacgtagcagaagtcagtacagaagacacatcaaccactgaagtcggtttgcagaccagttgtcccatgtatctaatgctgagtaacaaccataaaatttggtggcttaaaacaccatttattttgagcaataatctataatgtgaacagggattggtggagacagcttgtctgtgttccacttggtatcaactggggagctagaagtccaggggctgaagttatctgaaaggcccccatcacatgcatgtctggcacctgggctgggaagactcaaatatctgggggctggaacagctgggggtccttgtgcatttgtttccctccccttccctcccctcccc

SEQ ID NO: 28271 - DNA, 777 bp, Artificial sequence
  DNA replication origin
accccacgcttctgccctgccttccttcctgtgctcacccagctcctctactggtgttccagagcgaacgcactgtgagcccagattacgcaagcacacccctccacattgcactgtggggatgaaggtgggaatggggtggggggctctacctgtcagaaacgggagtgggctgggtgcggtgactcacgcctgcaatcccagcactttggaaggccgaggtgggcggatcacctgaggtcgggagttcaagaccagcctggctaacatggtgaaaccctgtctctactaaaaatacaaaattagccaggcgtggtggcgcatgcctgtaatcccagctactcaggaggctgaggcaggagaattgcttgaacccgggatgcggaagttgcattgagccaagattgtgccattgcattccaccctgggcaacaagagcaaaactccatctcaaaaaaaaaaaaaaaaaaagaaaagaaaagaaacgggagtgacagctcttgcttgtaaaaattaaaaattagaaaataacagaaaaggcagttgagcactcgggtgacttgcaggcgtcagtgacgtcatctcctggtgtggttcatatccgatgcatgagctgactgtggagaaactggaatcagcctgcatgggtccatgtcctgggtcccgtgtcatttgcctgccttgggtctccctcagtgctgcctttctcctgtgacctggcagtagggtcggcctggggagctgcattgttcttgtgcttccgggctctcccaggga

SEQ ID NO: 28272 - DNA, 1835 bp, Artificial sequence
  DNA replication origin
gaggccaaggcgggtagatcacttgaagtcaggagtttgagaccagcctggccgatatggtgaaaccctgtctctactaaaaatataaaaaagttagctgggtgtggtggcgggcatctgtaatcccaggtactcgggaagctgaggcagaagaatcgcttgaaccctggaagcagaggttgcagtgagctgagatcgtgccattgcatgatctagcctgggcaacaagagcgaaactctgtctcaaataaataaataaaaaataaatgcagctcctgcctcagtctgagcttgaacttgcttagtgtcaggcattcctttgggatcagtgcaaggtctacttcatcttcccgtgggtgtttatcacaggcctgccaagtgctgggccccacagcaggtgctgcggacacaggagtgagcacagccagagctggtggccgctcccatggggccatggtctggagggggagcccgagatcagtgagacggtcatctcactgcagtcctggtacagatggaaaggaaacatggctttatgacagctgtcccagaggaaccggccctcagctgctgaggaagtgacacttgagctgaaggctgtgtgggagttgcctggagcctggggtgggaggatcatcagcccggcagtggccctgtggccagcaggtgcactcaagaagctaaggccagggccatctgagcacaaagattgcgaggcgagcagacggagggcagcccgggagatacgcgtattaggggcttggctcttggacctaagggtggtgggaagccctggggtgggggtgagttgggagtgacagggccaggcttgttcggtagcgagtgcgttgctggaggagagtgggctcagagagcagcaggagcaggggagggtggaagagggtggaggccggggaggtgggttgccatgatggatctgtaggggagggtggaagagggcggtggccggggatgtggggtaccatgatgcatctggaggggagggcggaagagggcggtggttgggggtgtggggtgccatgatggatctggaggggagggtggaagagggtgagggctggagaggtggagtaccatgatggatctggaggggagggtggaagagggtggtggctggggatgtggggtgctgtgatggatctggaggggagggtggaagagggtgggggctggagaggtggggtaccatgatggatctggaggggagggtggaagagggtggtggctggggatgtggggtgctgtgatggatctggaggggagggtggaagagggtgggggccaaggaggtggggtgccgtgatggatctggaggggaggctggaagagggcggtggccagggaggtggggtgccatgatggatttgggagctttgggggaaggtaacagccataggactgaggaccgaggacagcctgggggctggtcacatcctcccattgcccacagcacttggatgacacaaagcccctgtgcaccagcaacagctgcggtgcagggcacaagcacctggtgccccggcctccctccactgttcccgcagcggctgtccatgccccaaccccacgcttctgccctgccttccttcctgtgctcacccagctcctctactggtgttccagagcgaacgcactgtgagcccagattacgcaagcacacccctccacattgcactgtggggatgaaggtgggaatggggtggggggctctacctgtcagaaacgggagtgggctgggtgcggtgactcacgcctgcaatcccagcactttggaaggccgaggtgggcggatcacctgaggtcgggagttcaag

SEQ ID NO: 28273 - DNA, 1968 bp, Artificial sequence
  DNA replication origin
agagatggggtttctccatgttggccaggctggtcttgaactcctgacctcaagtggtcgacctgctttggcctctcaaagtgctgggattacaggcatgaaccactgcacccagcccctgacatttttgagcagctgaaccgcaccagttgtgaccaacctccagattccatgtaactagagaaaatttaacctctgtttatgttcctattattgagttttttgttattttgcaacttaacagatcagacccaatggaattattttgagagtgggagccatttgggaatcatggctcaactggttttggtgggtgaagacacaggggtttgccaacaacccgagtcaagctctgtggatatagccaggagattgtgcagaggctgagggttgactccttgcttccacccttggggaagaatgatatccagtcatatccctcttacctctggcaaatcaggttcaacagataaactttctctaaaataaaatgatgatgttgacggtgatggtggtggtggtgatgatgatggtgatgatggtgatggtggcggtggtgacgatgttgacggtgatgatggtgatggtggcggtggtgacgatgttgacggtgatgatggtgatggtggcggtggtgacgatgttgacggtgatgatggtgatggtggcggtggtgacgatgttgacggtgatgatggtgatggtggcggtggtgacgatgttgacggtgatgatggtgatggtggcggtggtgacgatgttgatggtgatgatggtgatggtggcggtggtgatgatgatgttgatggtggtggtggtgatgttgatggtgatgatggtggtggtggtgatgatgttgatggtgatgatggtggtggtggtgatgatgttgatggtgatgatggtgatggtgggggtggtgatgatgacggtgatgatggtgatggtggcggtggtgatgatgttgatggtgatggtgatggtggcagtggtgatgatgatgttgatggtggtggtggtgatgatgttgatggtgatgatggtggtggtggtggtgatgttgacggtgatgatggtgatggtgggggtggtgatgatgacggtgatgatggtgatggtggtggtggtgatggtgttgatggtgatgatggtggtgatgatgttgatggtgatgatggcgatggtcgtggtgataatggtagtggtggcagtggtgatgatgatagtgatggtggcggtgatgatgttgatggtggtagtggtggtgatgatgatggtgatagtggggaggaagatgtgatgatgttaagagctaacacatataaccacacttactacgtaccaggccctgttgtaggctcttgtaatatattaattaatcctcacaaaactccaagaagtaggtactgttattagctccatttcacagacaagagaacaggcacagacaggaaagtaactctctcaagatcccatagctgttgagtgtgagtgagcacactttctcaggagaaacaaacctctcccagaaacctaagagatgtgacatattcactttgcttgttgcgatagatatcatttgccatctgggaggagtgcccacagagcttagtgtttctggctgaagagcaatagactcttgccagcttacctcactgatttccaggaggaggaagaaaagaggaagaaaggtcatgatttacactggtctgcagtcctgccttcctcttggccatcacagacagctgccagagtttccaaagctaaatctctcactctctgttgagaatccttctgaagctccccattcctgaaaagtcaaagcaggatttctcaacctcagcactactgacatttcgagccagataattctttgctgtgggggactttctgtgcattgtaggatgtttagcagaatttttaatctttacccagcagattgcagaagcatccccttagttgtgacat

SEQ ID NO: 28274 - DNA, 973 bp, Artificial sequence
  DNA replication origin
cgggccgggcgcgccgggcggggcggcgcatgcaaatctgccgggcgccggggcggggagcaggaagccggggcgggctgggtctccgcgcccaggaaagccccgcgcggcgcgggccagggaagggccacccaggggtcccccacttcccgcttgggcgcccggacggcgaatggagcaggggcgcgcaggtaggatccggggcccgcgcgcggatcgggttgcgaaggtatcgcccgggcacgccggctgagggcgttcgggaagggctcggccgccggcggggaccacggggaccaccccgactccgagcggggcccgagcccgcgactctcggtgcgcgcggagcagcgcccggttccgtccttgccgccgaacggcagcggaggcgcgaggcccggggtacgtggacacccagcgctccccaaagccggtgctggcagtgagacctccgccgggacggcctgcgggggtggggggcttggggttaggctgtcggaggccacgcagcccctcttctccgggcagtggcgcccagccctgcgctcaggaagtcagtgaggacttcggagagagaaagggtggggaaagttctgagaactgtaaatttgagtagtaggtcagtgaatcggggcggtctccgcctccgaatatcagatggacccaataatcgcgatcattgactgggacttgttttactgaaaggatgccaagtgaaacctcccactaacttctctgtggccggtgctgtgcgtcatggacattgtacagatgaggtcaccaagaccccagccgctttagtaacttgccctaaggtgccgcccacttgggagtccgtggggcagcaggactagagcccaggcaatcccacgccagagccagctgctctccatctctcaatcacgtttgaggagcccccacaataaccagaatctccgggagatttgcttaaaatgcagattcccaggtcctt

SEQ ID NO: 28275 - DNA, 1083 bp, Artificial sequence
  DNA replication origin
attaatggcgtgccagggtcctgcagtatgtcacctggccttatggagattacactgcagtgggaggggacagccaatgacaagtggccctgattatcagtaaattctaaagattgttagaaagtgatgggagccgggtgcagtggctcacacctgtaatcccagcacttcaggaggccgaggcaggaggatcgcttgagcccaggagttcgaggtcagcttgggcaacatagggagaccttgtctctacaaataataaaatattagccaggtgtggcagtgcacgcctgtagccccagctactcaggaggccgaggtgggaggatcccttgaactcaggaggtcaaggctgcagtgaactgtgatcgcgccactccactccagcctgcgtgagaaagtgagaccctgtcaaaaaaaaagagaaggtgatggggaaagaacacagaacagcataagagggggttggggaagctgggtggagtgggggggattgcagttgaaagtagggaagtcagggaaggcctcattgagctgacttggaggaagcgggaaccgtgcagatgtctggggaaggctcattcttggcagagaggccctgcactgagcctggcgggagggttgagcacaggagggaatgtggtggaggagagtgagcagcaggagggagcagtgaaggtcagcaaggtgacagagtggctgaatcaaaaaagaccttgcagtgtttgagcagaggatccatatcatccattatgttccaaaggactcttcaggatgccgtgtggagaaaggaagagggtggaagccaggaggtctggagggaggtctggagtggaggagatgagaggctccggatccctctgggaggtagatttgaggacagattggaattgaggtgaaagacagagaaagagaagtggccaggatgactccaagatttctgacctaaactactgggaaggacgcggttgtcatttctgaaatgcagaaggatgccagaagagaaggtactttggggaggggcgggaatcaggagttagttttggacatgagataagcttggaatatttatttgctatctaagac

SEQ ID NO: 28276 - DNA, 1292 bp, Artificial sequence
  DNA replication origin
catgagccaccgtgaccggcctatgttttactttaaatatgtaagagctctttgcttttagctatgaaaatacagaaaaaaaataataaatattattggtcatattggcatatatgagacctcagtaaataagagctcttatgatgattctgcttccccccttttacagatggggaaactgaagttcagagcagggtgggggtttttctagggtcactcagggaaccgtctagaagggagcagtgaaaagaggggaacagatgcttcctccaggaagagggtcttcttgccctcgcagccccttcctcacatgccctccttccctgccctccggagcccccggacacgtgaaggggagggagagggggcaatgggaggaacccacccccacccctggctcacaggtgccaccgcccccactccctgccctggccccaggccaaagggacttttcatgacagctcaaatgagacctctgagtaaacttggaacttctgaaacgacctgagaatattccccaggctggggggcaggggccacaaggagggcccccgactgcccaggacatctgcatcaggaacccagcctgctgatctctgcagcccacaggaaggatctggccaccccgacccctgccctgaattgtccccggggagttggggcaagtgcaccagcccgggtcctagcccaggcccctgccatcccccactgtgtgaacaggacaaggccctgggcctctctgggcctcctttccccatctgccaagcgggcttgactaggacgagggcttgccaactttccccagaatgaatcagtaacaccagtccactttggccagggccagggcgggctgatgggggctgctgggaactgaggggagagagacggtgggtggccagctccgctccatctcgtggcatagttcaaagcctcctttcactgctctacaagcggcccctcctgggctggaggaaatggagctggagtgagatctggctgcagaggctgagagattgcaaggtttgggcaaggctgcagaggatggcagggcttgcagggagatagagattgcacaggcagcgggggtggggagtggggggtgcgggtgctgggactgggacctcatgctccacagctaggagaggttgcacaggctggaagaagtgccaggagggaaagattgctggagctaatagagatttgctgcctggctaggagagagagataggctgagaggtcgcacagcctcagaggttgcacgagctggggaggagaaggcccttcctctcacc

SEQ ID NO: 28277 - DNA, 675 bp, Artificial sequence
  DNA replication origin
ccagcgccctcctggagcgccaggtgaggccacattgaattagatgaggagacaggactctgcccggaaggtactcaggcaagcggggaagagagacacaaacaccgctaggtgggaatgcagcaccttcatctgggatgggacagagagctttagggaagaagtggggcgttttgcttagttctcaccataatggtttgacgtgctcatagtccatccaaatgaaggcttcccacagctggccctcagtcaggcccttcctttctttttgtctgtaggatttttacgtggcgatttccaagcaccatctgcacggagtcattccagtttttggacagaatgcgggctgccggcaagttggaccagcctgatcgtttctctttcaaagaccaggataataacgagcccacaaacgacatggtggccttttcactggacggccctggaggaaattgtgtggccgtcctgaccctcttctctctgggcctcatttctgtggatgtcaggatcccggagcagatcatcgtggtagacagctcaatggtggagaatgaggtcatcaaaaggtaagagtccggcatccgcagcatcaggtctggccacgtgctaggcattggccagatacagacgggcaggggtcagcagtgccttctgggagcttgtgggatgggagtt

SEQ ID NO: 28278 - DNA, 958 bp, Artificial sequence
  DNA replication origin
ggaccaatgacggtggagctccacttactgagcccgcccccggggagtgacgtcatgccggcgcgctggaactcctcctccgaaccctgggtctgacccacctccccgggccccggatcgttgtgcgcaggcgcgatggaccaaggcccttggcggtgcgttgcgcatgcgccccgggcgccgccgactgaagtagcaatggacgcgctggagtcgttgttggacgaagtcgctctggaggggctcgatggcctgtgtctgccagcgctgtggagccggctggagacgcgagtgccgcccttcccgctgcctttggaaccctgcacgcaggagtttctctggcgggccctcgccacgcacccgggcatcagcttctatgaggagcctcgggagcgacccgacctacagctccaggaccggtcagcgggcggcctggcctggcgggcgggcgggcgggcgcagggcccgggggctgatggagctgggggcagggcgggggaatggagtggggctgtgcaagtaccggaggcctgttgattgagttggggcacggcggtaaggctaatctggggtccctcaggcctggcagggccctggagtccgatggagttggcggggggagggggagaatctagtgatgtcccgttttgtccctgtgtgtgttttggggtaatggcgaacaggattggggatattcttcaggcttaaaagaatgtttcctttacattggaggataggattagagcaggaaagacactttagagccagactggagactcctgagatcaacagaccctcatggtatattcattcggtgcagatagcctagggcaactcgagatctgcgtatcaggacaattagcgataatgctaaaagctgacatttatcagggacttcatgggtgaggtgctgttcttttttttcttttttgagatagagtctctctctgtggcccag

SEQ ID NO: 28279 - DNA, 814 bp, Artificial sequence
  DNA replication origin
gatcacttgagcctgggaagttgaggctgcagtgagctgagatcacgcctgcactctatccagggcaatagagtgagaccctgtctcaaacgtactcacatacacacacagaaaaccagatgtggacacaggaggatatacaggagtgtgggggaccagcaagttgttcattgtgatagaggcaaagaaaagaataggtattgggagcaaatgagcatcaccaagtctggtcgtgtagatgggggccctatagaggaaactttgtgcactcattctttcatttatttggcaaatgtttatcaagcacctgccatgtgacaaacattgtcccaggccctggagagtcagcagtgaacaaaataaacacaaatccatgcccctgtagagcttatgtgccagcggctggaggcagacactaagcaaataaagaagcaaaatataaagggtgtcagagaagaaataaagcagggaagagggctggggacaacggaggagggatgtgacattaaatagggccctcagaagggccttgctgagaatgtgagcagagactacaggaagtgagaggaagccacgcagatctctgggaaaggagcatttctgcagagggaacagcaagggcaaaatcgcggggacaggggacatccgtgtggctgatggaggaggaacgagggtggtgggagaggaggacagaggggtcaaggccaggtcgtgtagggctttgtgtcatttgtagggtctgggcttttactctgggggcagtgggagccaggggagcattttgagtagaggaggaccgtgacctagcaggctt

SEQ ID NO: 28280 - DNA, 704 bp, Artificial sequence
  DNA replication origin
ctaaaaaaatacaaaaaattagctgggcgtggtggtgtgtgcctgtaatcccaggtactcgggaggctgaggcaggagaatcgcttgaatctgggaggcggaggttgtggtaagccgagattgcgccactgcactcctgcctgggaaacaagattaaaactccgtctaaaaaaaaaaaaaaagaggaggcagctgtgccacaagggcagtgggtggagtggagggggcctgggattactggcggggctgggtgggctttgcagaagagaaaacaagacaccgaattgtaaaagagctcaccaggagaatgggggagggcggagcaggggccagaagggaagagtgtttgtaaaagcagatgccaggagactccaggagcctgtcttgggctggggtggagagtgatcaaagcctgctggctgatcccaggggacggctagagagtctttgcttctgacatcccaggtatgcttaagggcaaagcctgtttgtgctaacggcaggtgctgaaatatcattctcaagtgtagggcagtgcagtggggttcatgggcctcaaactggattaactctcacatactgcagtcaagattttgccatgtgagacaatgttcatctaggaatttaaaggcgacagcaaatgctcattctctctgaccctggtcccctccccgaccatgtgggactgcgttcctttccctcct

SEQ ID NO: 28281 - DNA, 1870 bp, Artificial sequence
  DNA replication origin
agtgaattaacaaattgttcgcttgatgaatcaatgcgtgaatgaatgagcacaaacctccagctggctgtcccctgagcccctgagactcaagacatctgaaccacgaagtctccgtcttccctatcccccaagctgaccctgtaacctgagagtcgtcaccaactttcctcttctcccactcagtctattccctcctaattggttcctgaatctgcccgcatggtcccctccccagggcaactttcctaagccagcccactttcttctctttcttgagtgtaagagggatgaggaagggagaagcatctcccacaactattctgtgcccatagttgcggtgatcttcctcaaatgtacacccaggcgcatcccagtctgctaaaagcatctcactgcccactccccattgccccagggtaaactctaagctccctaagaaggtttccagttcctcctggcctggctccactgccctctgatgcctaatttcccacaactgcctcctgacctccctgctctccacacctgccattgggactattttaaagtcctctaatgtactttctttccctgctatactcttgcctggctgatgcccagacaatcttcatgtcttggcttagacatcattttctcaaaggagcctccctagactacagctcccacagccccgatttccccttgttgtcctgttagtaaacacccacaaagtgtttacttgtgccaggctctgttctagacacttcaaatatgttagctcatttaatttgcacaacagcttgaagaggtaggtataatgattatccggatttaatggatgaggaaacaggcacagaaaggtcaagtaactcgcccaaggtcacaagtggagaaggtggaatctgaacccaggctcacgacaatagatgccctctctggatgctccagcatcccacctcaagtgcctaccacagtgcttggcacatagtaggggcacagtgaactatatcagtgaatagatggatgcacagctggatggttgagtaatgaggatgtgtgacacatggaaggaggatggatggaagtctgatacaaggaaggatgacaagcaatcaatagaagatggatagatggatggatgaatggatggataattgatggatgatggatagatgaaggaatggatggatgatagataggtgtaaggataatggatggatagatgatgaatagatgaagaaatggataaagaataaatggataatgcagaaatggataatggatggatggatggttgatggataatgggcagatggagggatgaatggatgtgtggatgacggataatggatggatggatggttgatggataatgggcagatggagggatgaatggatgagtggatgatggataatggatagatggagggatgatggctgatgaatgatggataaaggatggatggatgatggatagatggatgaatggatagatagtggatggaaagatgatggatgatggatggaaggataaataatggataaatgaagaaatgcataatggttgaatggataagggatgaatggatgatggatagatggaggaatggataatggataaatagctaacgaatgggtggatggatgatgaatggatggatgaaagcatagacaatgaatggatagatgatggatggatggatggatggatggatgatggatggatggatgatggatagatagctgatgaataggtgggtggatgatgaatggatggatgaatggatagataatggatggacagatgatggatggatggatgggtggatggatggatgaaggatggatggatggatgatgaaggatggatggttgatggactatagat

SEQ ID NO: 28282 - DNA, 1185 bp, Artificial sequence
  DNA replication origin
gggatgagggagatccctgagtgccagggggaggatgtcagagggggcttcctggagagctgaaactccagctgggtcttgatttgattcggcgggaggtacaaggacattttaggccacagcatgagatgggaatgattctggtgcgctagaaagactttgaagagacacttgaggggtgacaagggagtgatcttccaaaaattgccaaaaacacgaaggagtgagagtggcagaggggaagagcctttccagcccttccccttgtccagtccactaagtgtggtagacagtggcaggtgccccctgcctcggtgcccagagagtttctcagagtcagcttagggcacacccatgtccacacacacagtttctggggtccagcaaggacttggggacctaggagacatctgctcttgttccccttctaatatccgtacacaacagctcctgaacacatataaggcaaatggggtgctcaaggaggcctgcttgggggcagatggcaaggtggggagacagctgcaggatgacaggatggtggtggatgatggctgcacaagtaggtggatttgctgaggggtgggtggtggaagggaaggatggagggaaaatgggtgggcagatggcaggagtgggggcatggctttatgtgaggtgagtgaacgtgactgcagggggtgctgtcgtggctgtcaggtgggcatggggtggataaggggatgttttgggtgtaggtggatgtgtacatgtaaaggtgtgttattgggtggtaggaggatggttgggttactgggtggtaggaggatggctgggggagtggtgcacctgttggcaggtgtgaggtgcatgagcgggttctgggctgtgggttggagagggtgtgagcagagtcgtggatacattggtggcttgataagtggatggcagcaaatattggcagatacatgactaggtcacaggtgtgttggtgaactggtgggtgactgggtggctgacaggggagggatgggtggagagctggtggtgttgggcatggatcggtagacaaaaggcatgatgggcagaaggcctagtaaatgagggtgagtgatggatgtgtgggtggggggcggtgggtagacaggatgtgggtggaggaaggtggctttcagcactgaccgccttgtctcctggcaggacacc

SEQ ID NO: 28283 - DNA, 1124 bp, Artificial sequence
  DNA replication origin
ttggggtggggggagggctgtgggcactgggattggggtggggggagggctgtgggcactgggattggggtggggggagggctgtgggcactgggattgggggtggggggagggctgtgggcactgggattgggggtggggggagggctgtgggcactgggattggggtggggggagggctgtgggcactgggattggggtggggggagggctgtgggcactgggattggggtggggggagggctgtgggcactgggattgggggtggggggagggctgtgggcactgggattggggtggggggagggctgtgggcactgggattggggtggggggagggctgtgggcactgggattgggggtggggggagggctgtgggcactgggattggggtggggggagggctgtgggcactgggattggggtggggggagggctgtgggcactgggattgggggtgggttggaggggttttgccatttcctctgaccctgagaactctcgttcttaattccagggcttgcttttcgggccacagtgccttgactcttccagtggtagggacctccacccaggcccccagatgcccctaagacaagccccaaggcctctttctacccaggatttcccgcctattctgcagggagcctggggaggctcactcccaaataagggagctgaggacattctggaatgcaccaggattctcaacctctatccctgctgtgtgcttcccgagcccgtctctgatgatttcttcactctgttgtccctgcaggaggagttctccaaacacatccatcccctggtttctgatcccctcttccaggaagccctccaagctagcacagacatgaaaccatgatgtgtgagcccatggttcacttcagcaccatctcctgtccctcacaggccaaaattgggctctcttccctctcctcttctccaacaaggcctcctcccaagcatcttggttcaccactgtctcctccccactagcagagccatttctcattcagttactaggatcacaggatttggaatcagacagacctgtgtttaaatctctgccttcttagtttggattccccagcagcagacccacaggtaagaatttgagtgc

SEQ ID NO: 28284 - DNA, 892 bp, Artificial sequence
  DNA replication origin
aatacaaaaaaattagccaggcatggtggcatgtgcctgtaatctcagctactagggaggctgaggcaggaaaatcgcttaaaccggggaggcagaggttgcagtgagccaagatcacgccactgcactccagcctggcgacagaacaagactctgtcttaaaaaaaaaaaaaacagacctctagatattaacaccttgaagttacactttggttatttctagaatcgcatgggttagcaatgattacctggcaatacaaataatcactggcatggtggtggtccccatcccaaaaccccatccccatctttgacaacccctaaggagtccctccacccataaaggccgtaccgacagcacgaaacctccagacaggacttgtctcagaagtccctttcagcacccagacgacgccaggagggagaacagacgtgaggatacctgaggcgtgatgctgcccagcttggcggaggagacggtggggaaggtgtcaggcagcactccagcagagagaagagtgggtcagagctgcacaggccggaacatggccgggctggggagctgtgtatgatcaggagatgctgcatgcagggcaaggggcccggagtacacggtgggactctgaagttatgatgaggaattgggtctttgtcctgagagccatgggaaaccactccagtgttttaggcagaaagatgggggtcctgttaccctgatgacgttagcatattgaggaggcattgcagcttctggggtgagagtagattagaggggacaaaaatgggtgtgcaaagatcatgaagaaagttgctggattcacccaggtaagtcctgttgcagccacagactaggacgatggaagtggaggcagagaaaaaggaaggagacata

SEQ ID NO: 28285 - DNA, 1472 bp, Artificial sequence
  DNA replication origin
acaatgggaagttgagagagatactgaaaccagttgatgttatatgagcacctggatccagctgagactgaagccccgctacctttttcttcacataagccagtaaaaatttgtctttttgcttgtgctggtttgagctggattttgtcacttgcagccaaataaatttcccaattcatttttgaatcccaatgcccagaccaggaactcgggaccatagggataggatgggataggatgggatgggttaggatggaatgggatgggatgggatgggatgggatgggatgggatgggatgagataagttgtattgggatgggttgagatggggtggaatgggatgggattggatagactgggatgggatgggatgggatgggttgggataggatgggttgggacaggatggaacaggttgggatgggatgggatgagttgtattgagatgggttaagatgggatgggatgggttgggatgggttgcgatggaatgggataagatgggatgggagggatgggattggatgggatggtatgggatgaatggggtggaatgggatgggatggattggtatgggctgagttgggatgggatgggttggaataagatgaattgagataggttgggatgggataggatggaatgggatgggatgggttgagatgggaatgggatgggatggtttgggatgaaatgatggggtgggatgagatggaataggatgggatgggatgggatggggtgggataagatggaatgggatgggatgggatggggtgggataagatggaatgggatgggatgagatggaatgggatgggatgggatgagatgggatgggattggatgagatgggatggggtgggatgagatgggatgggatgggatgagatgggataggttgggatgggatgatgggatgggttggcatgggatgatgggatgggatgggaatggaatggaatgggattcagcctggctcataatgataaccacacccatgccatgctgagactaggaacattattatttgcactcacctattaactttcccaaagcagggtgtccaagagcttgaggctccctgaggttatgaatggatgcacccatttgttcattaatgagaggcttgaacacaaaggtggcctagaattttctgcctactttaagttctcagattctctgtggcaagctgagagacaggctcagttctgaccccagcacacggataaccctccataaacatctgttagctacattagttaatgccgccttatataaaagttaacataaatacaagattcactttctgaatgtgcgtagagctgtttctgacagacgaacctccatgccaggggcctgagagcagccactccacagagatcacgcatttcctaattccttgccttgatggcggaggggaaaaacacatgccctggggctccaacaaggaattataaccccactgg

SEQ ID NO: 28286 - DNA, 1169 bp, Artificial sequence
  DNA replication origin
cgccatggaatactatgcagccataaaaaaatgatgagttcatgtcttttgtagggacatggatgaagctggaaaccatcattctcagcaaactatcgcaaggacaaaaaaccaaacaccacatgttctcacttataggtgggaattgaacaatgagaacacatggacacaggaaggggaacatcacaccggggcctgctgttgggtggggggaggggggagggatagcattaggagatatgcctaaggtaaatgacgagttaatgggtgcagcacaccaatatggcacatgtatacatatgtaacaaacctgcacattgtgcacatgtaccctagaacttaaagtataataaaaaatatatattaaaaaaaaaaatcttggtccctgtcacacggtgctgcctccgagagcctggatgagctgccatgctgagtcctacggcattgaagtgtcagctcatctaggctctgggggcagcacgatgtgaccgggacaaggcttgtcctcagggagccagcgtcccagcagggagatggatgatagagagaagacagtgtgatacgcagtgggtatgacctcgatcagagcagtggggacatcaggggtgcaggggagtgccggcgggcagcaaggcggctaatttcagtggggtggtccaggaaggcctcacaaactggaggacatttgagcagagacttgtacggggttgtcttatggaagagttcctggaggcaaggaacagcaagtacaaaagcctcggcctgtcaaagagccggtaaggaggccggtgtggctgaagaagagtgactgtgggggcagagaggagtggggaagggcaggaggcagcagagaagactgcagacttcctggcagtccttggaaggcattcgactgtgactgagtgaggaagggtccggagtggggaacgggggtgatccgcctcagatggaacagggaaccctccagccaccgggtggagaaacggaccatgaagtcaaagccaggagcagggggagctgcggggcaaggtgggacgcactgggttctgattgaccggctggcaggttggaccaatggactaggcatccaaactgaggtttggaggcctgagctcctagaagggaagggcggcaattcgtgtaaactgagggcagaactggttggtggg

SEQ ID NO: 28287 - DNA, 2073 bp, Artificial sequence
  DNA replication origin
gccaacggcaccgccgcccccgccgccgccgccgccgccgccaccgcctcggggaacggcccccctggcggcgcgctctacagctgggagaccggcgacgaccgcttcctcttcaggaatttccacaccggcatctggtactcgtgcgaggaggagctcagcgggcttggtgagtgcgcgcgggcggcggccagctcggctccggctcccccggggcggcgcggccatcgaggcccgagccccggacccgttcgccctcctcccgccgcctgggcccagctcccagcgctccgcctggctaggggcgacgttccggggcagggggcgcgcgccgttccggggccggggaccagcatggggggacgtgcgggacgccccgccgtggagaggtgcaaggcagagctcctacccgctgcggacgccccgcggctttggggacgctcccgcgccccgggaaggcgcccacccccgctgccggtcggaggggcgcgcgctgctttccgctcctgaactcatctccacgctcgccccctcctcctcttcctttcgcggggcactagatgcccccacccaccccggaacgcccctgggggtgggggtgatgcagggactcctgctaccagccgcccctcctgccgcagatccacagacccgggagccttccacccccatcgccaacccacgccgaacctcccagacgggagtggggagtgggggagtcccgcgggctcccggaaagccgcacccgcccagaggcacccctattgccagacgccagggagccctctgtatcctggccccctcctgggagaggcaggctagggaactggggacagctgggcaaactccgggtcgaggagtccaggagggcttagcttagcacaaggctcctattaggttcggtgggggactgacttttcagaaggcagatcagactgtcccctttgcctggaccccctcctctaccctccagaggcagcctgggctggagtgcgtgttttggaggcagacagccgggctgtggcagggcccaggggacagctgccggacagctggttgtgccacacagcaggtagagctggcccgaaagacgtggtatctctgagcgggtgtccaggcatggacaccctcctgagtgaattgacctctttctccaaggttaaaactcctccctgcatgcctagctcctcagtgtggacaccacacatatgtgtgtgctcaagggtgggttacagcagacctccacccttagtttgccctaaataagccagtggcctaagtggtttagagggcagagggaggaagctgtgaagcgaacccagtgaaaagctccaggcctctgcacaggctgcatcctctgtctggaatgcccttccccgccccacctccttcttcaggggctcctttcactgggactctcccacctgccttccatgtcaggatactgaggagggacaaccttgtgagctccccgttggagggagggtctccatctttggatctcaccactgcgtttatctccctgccacacttggcactccctgacattttctggggcctgtttttggtcactagcttatagtccccactccccataggatgtcactctgtgagggccagcccggttggtcttgttcactgctgcctcccagtaatgtctagcgcatagtaggtcttcaataaacatttgccgggtgcatactggatggggttgggatgatgaaccggaggcttcctgcggtgctgcctcctctgtctctcttctgggggtggctgaccaaacttttctgtgacttgagccaggctggccgtttgtcagagatacatggtgtttgaatatggacctgcccctgattggtttcatcccatcagacccacttctggtttacactcaacactcaaatgtttactgtgggatgcaattaaaattattaacttcaaaaggcatcttggccaaaattccctgccttccgcacagcccaaccctaatctctcacacggaggcctcgtaacaccttgttgtcaggaacatcttcgtccttggaggtagacatcttgctactgtacatcttt

SEQ ID NO: 28288 - DNA, 1137 bp, Artificial sequence
  DNA replication origin
gaaagcggtggtggcgaacagcagcgccagcaggttcagggccacggccaggagcgctcggccgcggcggctagtcttcatgccgcccgcgccgccgggacgggactgcaccgccggggagctccgcgcgcgaagttggcagctggcgccccgcgtcagcggccgctgcccgccgcgccccggggctcgggtgcctgagatcggcggcggcggacgcggcgcgggcccatgccccccccaaccccggggtgggggcgcggcgcggggggcgtgcggggcgggctggcggggcgggcggcggtggaggagcggctacggcgcgcccggagcccggagcgcgagtgcacctcggctaggagccgctggcgcctggcagcggccacggcgcagggacgcgcgcccctccgtggggagacacctgcaggcggccggcgacactgttccggagcccgcccgcacggggagagggggccgccacgccgggcgcgggcgggggcctgggagtggagggacgcccccgaaagaaatccgagccagggtgagggtctgagacgcaaggagaatcccaggcaaggcgctcctgagaaaagatccccacggcggacgtggggcaacaaaacccgccgggagcgggcatctcatgagacccagagaggccctgccccaggagacaagggcagagcctgctggggctccccaagagggacacggaccagcaggaccctgtcccagaaggggatccccaaaaggacccccgcaccagaccctgagaaaggagtttttccaaaggttctaaacagcagagcctgcagggcttcccacagccagggagctgcaagaccccctggataagacaacccatgctggacttggagtggcagaatctgtcaggaggcgcccctcctggagtattgggttatagggtttgaaacgtttttctgtctcctgggtgtcacctccagcatctgggaagagctcccctccaaggatgaaactgtcatctgggctcccaaccatggcatgcaactgcaggaagagtggcaacagggtaccccagacagcccactgcacccacctgagatcccaaacagcagaaccctaggagggcccatgccggccacaaagttattgcagcta

SEQ ID NO: 28289 - DNA, 801 bp, Artificial sequence
  DNA replication origin
agtatgagaatcgcttgaacccagaaggcggaggttgcagtgagctgagattgcaccactgcactccagcctgggcgacagagtgagactccatctcaaaaaaaaaaaaaaaaaaaagatgctactggattctttacagctgtttggcgatgatgtattttctctgtcaaccaatactctcaatgccaccattatcacatggaggtcctctctttcaaaatagttgagaatctcttgcacagtgccagaaaagggctctaaaagcaagtttggagacccttggccatccttcgtgcctgctcttaccagggacgttgcccacaacgttttcctctcacctaccccccggcagattagcagcagctgacagtgggtgccggctcacccacaggagtaaggcaattcataatcggttaaccttgaattctgcaaggcctgccactcggcaagccgggggttgtcggagcagttctcagcttgggcagaattcaaatgagctcttataatcaacatgcaattaattgttgcacgccctgagcatctgggcagtaagtgctgtgcagcgcgaagggagttcagggagcgtggtcatcttagagcagaggtggggacggggttgcacacagtttccacgttgcacaggagagcctgaagaggtttgtctgagtttggtcaactgatcttggttcagatgtcagtaacagtgaattattaattgagtctactgtgtgccaaatgctttttgcagccatgatctcattacagcagcccactgtgatataccttgaaggggggggggtc

SEQ ID NO: 28290 - DNA, 1028 bp, Artificial sequence
  DNA replication origin
cctgaggatgcacagagggatttggaatttccatctaagatgctcctccactcactgagccacccactgaatgctcagcactgggaagaaaagagaacgtgaacaaagttcgtaagaaagaacatcactcagaactttgagaggccgaggcgggcagatcacctgaggtcaagagttcaagaccagcctggccaacatggcgaaaccctgtctctactaaaaatacaaaaattagcctggtgtggtggcgcacaactgtaattccagctactcaggaggctgaggcaggagaatcccttgaaccccgggggcagaggttgcagtgagctgagatcgtgccactgcactccagcctgagcgagagagcgagactttgtctcaaaaagaaaaaaagaaagaacactgcagagtatgcaggggtgaaagccagggagagcaattcagcagggagggatcaaagtggggatggcttcaaggagggcctcactgagaaggggacattggagcaaggatttgaaggagatgtaggggcaagccatgaagacatccgggggaatggaagttccaggcagagggatggccagtgcaaaagcctcgaggcaggagcctgtctggccctttggggaaaaactgagagcacagtgtggctgcagctgagtgagcaaagggcagaggaggaaaaaaagggggcgggaggtgctagaggaggggacagatcacacaggaatgcagagaccacacaaggactcaggtattcactctgagcaagatattcatgccggcggagggtctgggcagaggggacccatgtctggtttcgtgtctaacaggaccgcacgtgctgctatgggaagaagggtggaagcagagagaccagacaggctggtgtgtggattccagtgcatgaggccagggactcagaccagtgtggggacaggcatggtggaggttctgggtcagctttaaaggcagctccaggccaggtgcggtggctcacgcctttcatctcagcactttgggaagccgag

SEQ ID NO: 28291 - DNA, 1001 bp, Artificial sequence
  DNA replication origin
catgtttcctgaaaagtatgaatttcattattaatagcaacagtttttctggtaaattttgttgagtataaaaacacgagccaggggcacaccaccacacctggctaatttaaaaatttttatagagataggatttaatttttttgccctgctggtctccaattcctggcctcaagcaatccttctgcctcagcttcctaaagtcctggtattataggtgggagccatctcgcctggcctgggagtctagattcttatgtgaactctcatgattctggaatgttggcaactgataaaaatttaacactctgtagaggccagttccatccaggccaaacaaaataagcttaagggccagatttggtctgcaggtgccatgtggggtgagctggaggggctcccaggcacgtgggggagacaggtgtgaaaacagacatcatggttcagagtgattcatgatattgaagatcagaggagggatgactggctgccaggacgtgggataggggtcagggaggattctacggcggcatgaggcttacaacagcaccctgaaagacgcacagaggaaggagagcaaggattttccatggagaggaaggaatgtgtgtgaaggcctgggttcagtttgagcaccaggtggtctgacgccgcacggtggtttggtgcagctgtggcagtgcaggggcggcaaaggggctggagacgtggacaggagctagtcactaggacctggaagagcgaactcagtcattgagcctttttgtcctgcagggcaggcggtgggagcatttggggggggtttggcggaggtgtgtggggctggtctctctggaggcaggtgcagggttggggtggctgagggacagcatggagacaggaggctgcagtgaggccttggcctgtggcagtgagccagagaggagggagccagggacttaggctcacatttctggcctcctaaacaaatcccattacctctccctgcaaccgcttccctc

SEQ ID NO: 28292 - DNA, 1857 bp, Artificial sequence
  DNA replication origin
ggctcacgcctgtaatctcaacactttgggaggcccgggaggcagaatcgctggaagcaaggagtttgagaccagcctaggcaacatagtgagacctcatctcaaccaaaagtagaaaaattagctgagcatggtgtgggcctgtagtcccagctactcgaggctgaggcaggaggatctcttgagcctgggaattcgaggccacagtgagctatgcttgtgccactgcactctagcctgggtgacagagaaagaccctgtctgtttaagagaaaaataaaagattgctggagtgattacagcttccctttggagatggcaaagcatctgacttcacactcccaccctcaactcccacccttagctctgggacacatctcttgtgcgtcactcgttctttcagtcatcaccagacgtatccagaggtgtgacaggtaccggatccagaactaggcatgaggcacggttctgccttttaggaaggaaagggaggatcagctagggccaggtgctttttacttgaatataattcgtgtgtgtgtgtgtgtgtgtgtatgtggtttgtatgcatgtgcatgcatgtgggtatgtgcacatgtgtatgtgtgtgtgcatgagtgtgtagtgtgtgtggtgtggggtgtttgtggggtgtgtgtatatgtgtgtgtatggtgtgaggggtgtgtggtgtggtatgtggtgtgaggggtgtgtggtgtgtgtggggtgtgtgtgtggtgtgtatgtgtgtggggcatgtgtgtggtgtgtggggggcatgtgtgtggggcgtgtgtgtgtttgtgtgtgtgtgtgaggggtgtatgtggggtgtgtatgtggggtgtgtgtgtggtgtgtgtgtgcgggggtgtgtggtgtatgggtgtgtggtgtgaggggtgtgtgtggtgtatgtggggtgtgtgtagtgtgtatatgtggtgtgtgatgtgtggtgtgtgtgtggatgtctggtgtgtatgtgtgtggtgtgtgtggcgtgtgtgtggtgtgtatgtgtgggagtgtggtgtgtatgggtgtgtgtgtggtgtatgtgtatgtggggtgtgtggtgtgtatgtgtgtggggtgtgtgtatgtgtgaggggtgtgtgtggtgtatgtgtgtggggtgtgtgtgtgtggtatgtgtgggggtgtgtggtgtatgtgtgtgggtgtggtgtgaggggtgtggtgtgtgtgtggggtgtgtgtggtgtgtgtagtgtatgtgtggttgtgtggtgtggtgtgtgtgggggtgtgtgtggtgtgtgggtgtgtggtgtatgtgtgtggggggtgtgtggtgtgtgtatgtgtgtgggggtgtgtgggtgtgtggtgtgtgtggggtgtgtggtgtgtatgtgggggtgtgtggtttgtgtgtggttgtgtggtgtgtgtgtgtggggtgtgtgtgggggtgtgtgtggggtgtgtagtgtgtgtggtgtgtgtgtggtgtgtggggggtgtgtgggggggtgtgggggtgtggggtgtgtggggtgtgtgtggggtgtgtgtgggggtgtgtgtggggtgtgtgtagtgtgtggggtgtggggtgtgtgtgggggtgtgtggggggtgtggggtgtgtgtggtgtgtgtgtggtgtgtgtgtggggtgtgtgtgggggtgtgtggtgtgtgtgtgcggggtgtggggtgtgtgtgtggtgtgtatgtgtgtgtgggggggttgtgtgtgggggtgtgtggtgtgtgtgtgagtgtgtgtgtgtggggtgtgtaaggtgattgatgaaatgcactctatgctctcacctgactcagatgcacgcaaaatgcatgtttcttttttctttttctttc

SEQ ID NO: 28293 - DNA, 1129 bp, Artificial sequence
  DNA replication origin
ggcccgacccccgcgggggaggctgcgggcccaggcaggggctccccggcctccgcgggcagaggtggcggcggccccggccccgaggctgaacgggcggaggctgacaggcctcgaccgcgcggcccaggcggccggctcaggggagaggcccgggggcccgcgctgtcctcgcagcctcaacccacacggccactgccgccgccccctagagcatccttgcgcgcgcccgccctggagccgcccgctagtaccgcgcggccgcccccgaccaacagccccaacgcgccggaagtggcgagcgccgggcggccccacagcgcggccgccgggctgcggcgctggaaccggaccaatccggaatcgagcggggcgagcggggggagcgggcggagggcggagggcggggctgcacctgacggctcccactggccccgccttcttaccacgccctctcttgccccgccccctgcgcccaccgcccgtgcgtccacgcgggccggcagccatcttggtaaagggagcccgggctgccattttagtaaaggcgtggtttccctttcgcttttttcgcccattcattccgctaaaattttagtgagtgccttttacgggcggagcatcgagctggcagcgtgacgacacgcggccctatggagcttacattcatgcagtccacacactcttgcccgactatattccaggccctgctgtggatgctaggacaggggagataaacgtaacttcgatagccaaggtgctgagagaggcagagaatgtgttggattcctgttcccatcctccaatccactttactcgtgaaagtgctcatctttattttgttttatttttggggacaggttcttgctctgttgcccaggctggagtgcggtaacacaatcatggctcactgcagcctcaacctcctggtgcgccaccatgcccagctaaatttttttattttttgcagaggtgaggcctccttttgatgcttgggctggtctggaactcctgggctcaagcagctttcctgcctcagccttccaaagtgctgggattacaggtatgagtcatccagccaggctgaaagtgctaattttaagaaacagtcaggaaactatcccaaaca

SEQ ID NO: 28294 - DNA, 1218 bp, Artificial sequence
  DNA replication origin
gacccagtgacgaagcagccacagtgcctagcgtattttattgaggagtatgggaagagggtgggagtgggggaatcataacagaatttgtttgcctgaatctatttatttatttatttatttatttacttatttgagacagggttttgctatgctgcccaggctggtctcaaactcctgggctcaagcgatcttcccatgtcagcctcccaagtagctgggattatagctactgcaccaggcttggaaatgtttattgagcacctgcttggtgccaggcaccatgctggacatggacacacagcagtgaagtgggcaggtgccgttcctctttggtgggtttgggtgtcactgcaggaggtgacaccagtggagctgcagcttgcctgcatagtgccatcatgtgagttaggaaaaggtgcctcccgccaagcaggtacagccccagcaccagcttgtagtgtgggcccaggctgggtttcggccccactcacctcctctgcagttgacaacatgcaccaccattcacaatggctctggaaacacccgtaaaccaaggaaaaataaattcagattgtccaaagtgctacgaaaaaaataaaacagggacatgtgacaggctgatggggaggtagttagatggggtgttcagggaacacctcccaagaagggaacactggagctgaaacctgcaggaggaggaggaggaggaggaaggaggaggaaccagccagatctggaggcagaacattctaggaagaggtgcaaaaccccagaggcaagaactggctggcatttgaggaggagagtgagaggcagagatctttaagctgggccttgaagagtgagtagagttttccagggggctcaagagaggaggtatcgccagcagagagaatagagtatgcgaaggctcagaggcatggaaggcagggacggtgcactgcaaggcagcaagaagcagaggtgatgcagtaggatatgcatgagggattggttccagagctgcccatccagggctttgaggaggaagggtgggtgggaggaagatggaagtgggaactcgggtcagctaaggggctgaggagtttggaggtggggaagcagagaggcttggaagggaccatcgatatatgtggaactgagttccactggctggaagaataggtctgggcctccttggcccagagaaggtggaggcttggaacagagcagcca

SEQ ID NO: 28295 - DNA, 855 bp, Artificial sequence
  DNA replication origin
ccgcaatgggacttcttccagcagctcctcttcctcctccctgtggaagcagacgaagcagaaggccggcacatcatcgactccgcagcccatgggccaggccggaggcagctccaggacagggcaggggtggccaggggtggcctccgcagcatcatcgccagcctgggcaggagtccccgagccagggcgctccagggtcagcagcccgtcggcttcagggctctgcacttgcccgcccgccacctgtgccttctcactcaggttgcccgtcgcctcggtgggtggaggagccgggggctctgtctggcgggggctcctgtcttgacccgtgggggttccagccacggggctgggccgtgcgaagcggtgtccagccacctggattccgaggtggctggtgggcagacggaggtctgggagtgcccccccaactgcccctgtggagccctaggccctccggctgcccactctgtggctgtctgtcagaggcaggactaggagggcaggcttgcaggtgtcccgtgccccagtccccctgtctgtccagccgtctgctcctcctggtccagccagcacggccgcagaggtgccttccctaagaaagtttgttctcctcggctggggtgagtggcatgggtggcctccaggagagagggttgggacctgcagctgaaagacgggcaagggccaggtgaggctggcacggtgcccacgctgtcctcgagaaaagttctgacccctggagtcccggtcccggctcggctgcgactggcggctctcccggctccctgctctccccagctccagtggcttctctggcagactggctgggctgtgggtattaatagctcc

SEQ ID NO: 28296 - DNA, 1090 bp, Artificial sequence
  DNA replication origin
gggcgctggaagcccctcagccgctggggggctcggtcgccgccgctacgagcagcccggccctgcgctcccggcccccggcctggcccgggctccggctgcggctccagctcgcgctccgcctggcgctcgggccccggccccggcgcccgcccgggctgcgctccatcgcggcatcgcggctccgccctccagccagcgcgcacctgcccgcccggcccgcggctccgccctccggctcgcgcgccgccgcccgcccctttgtccgtcccgctcggcgcgcgccctcgcgcaagcgcgctcacccgccgcgcgcccgccctcccgccgcgcgccgcggagcgcagattctccccgcgcggcgcccccacccccttccggccgcgctgggtcctagcgccggtggctcccgagctggctcccaccccccaccccccacccaccccactccttttctaggtcagagcccacgagggggcgagaacgaggttacagaggactcgggggagtctgagagggtcacctggtccagctttctgggccctgcgggacgagactgccccagactgtcccggtctgtgctagtggggcggagcctgtgtgtgtttgaaggagggaaaacaaatccaggttctgcattcggatatgcatttcattcatccatgcgtccgcctgcctgcctgcgcttccatccatccatccatccgtccgtccatccatccatccatccatccatgcatcctatttccagcgagacgtcagagaactcacagtcttcttggggaagaggtcataaacttgggcctgggtggttgccctatccaactgaggtcgcctttgcgatccctgctgcaaataggcagtgactagtccaggagtgcagctgggaggaactgctcgccggatagaagggaagaaaggagattctaggcagaggtacagcaggtgtaagggatgttgcattgtctgtttgataaccggaaattggtggcctggatgaagtgggtggatggggacagagatgagatagggacagctcgtccttccaggccctgttctttctcctccctgcagctcactctttccctag

SEQ ID NO: 28297 - DNA, 929 bp, Artificial sequence
  DNA replication origin
tcggggggacttcactagaagctcagcttggccgtgggggaggggtattcacactccaaggacctgggggccaacctccaggctcgcagcttttggggggggactctccgccctcttcccccctctccatggcacaacgggctccaccaccactcctccgtggggccggggagctgcgcccgagcctcaaggctagggagtggggtgggggaagggagaggaggagggggcggctcctccaagcgagacacaaagagacgtccttcagcctcggctccatggcgacgctggggaagggggagcgcgcaacccgatacttccttccccacctgcagggctatggggacctcggtggccactcacctgccgcccctcacctgggcccggcttacctgggctggggccgcggggacgccgcggcagggggcctgggcgccgtcgcggtcttcgtctgcccggccccgggggctcagggcgccacgaccatggaccggggtgcaagcggtgccgccaggggctcagtcgcccaagtcctggagctttaggggggggatccccgaggcttcttgctggtgagagtgtctcttgctgtccccggctgcctagatttgggatttctatgtaccggagttggggggaattgggatcccctgatctaggggcgttctgagctgggtcttcttgtcttgaggtgtggagttgtaatgaccggatcttgggagggggttctcgcaatcccggcctgggggcactgcgttctaggtcttggggcgggggcccagactgaggagggggagtccttgcggtgccgtagggggcttgctgtcttctaaataccgaggaagtctccgctttccccgcaggggagtcgctcggtgtcggatccgggagggccccccctcttccccgaggctcgccggatcctggat

SEQ ID NO: 28298 - DNA, 1670 bp, Artificial sequence
  DNA replication origin
gacccagctcagaacgcccctagatcaggggatcccaattccccccaactccggtacatagaaatcccaaatctaggcagccggggacagcaagagacactctcaccagcaagaagcctcggggatcccccccctaaagctccaggacttgggcgactgagcccctggcggcaccgcttgcaccccggtccatggtcgtggcgccctgagcccccggggccgggcagacgaagaccgcgacggcgcccaggccccctgccgcggcgtccccgcggccccagcccaggtaagccgggcccaggtgaggggcggcaggtgagtggccaccgaggtccccatagccctgcaggtggggaaggaagtatcgggttgcgcgctcccccttccccagcgtcgccatggagccgaggctgaaggacgtctctttgtgtctcgcttggaggagccgccccctcctcctctcccttcccccaccccactccctagccttgaggctcgggcgcagctccccggccccacggaggagtggtggtggagcccgttgtgccatggagaggggggaagagggcggagagtccccccccaaaagctgcgagcctggaggttggcccccaggtccttggagtgtgaatacccctcccccacggccaagctgagcttctagtgaagtccccccgagaggggaaaatttgggggtgcccacaggtgaggggggctgccttatgtggccctgggtgatggctggggcttcgggtgtgtgtctttgtctgtgagagtgcggggaaggggtgtgtttgagcggatgaatgggaatcgcatcttccctgtgactctgctgcccgacccaggccacactggcggtctttacctaaaccatactttgtactccctgtgggacagggagggagtaagtaccccccaaagtgaggcgctagtttctggggaggagaggtagcctagatgaagaagctatttcaggtcagggcaccgttctgttcccatttgtcccagggacagcaacccaagtctttcccttcccctcctaacctggagaacacccaggttaaaccaagggttggctcaatgtgtcccagacaaccaagggccaattccagggtctcactgtggctttccaggtggtacacacggccgtaccccagcctggccctcagtgaggtcctgaaccccaggctctaccgcatatgaggaagccgagagaccctaggggacattgtaccctgaaatcctgaatcagatcctgagaaggggctggactgcatggaaagaacacactctgggctgctgggagttcctctcatctcttctctctgagccttctgcagacaagcagtgatgctggacccatttgataggtgcacaaactgaggctcgggaaggcaggacccaggatacagctagccctgccagtagctccttcacttattcattcaacaaacctgtcgccaatgtctgtgatggaccatgcgctagagtcagggtccttttccccacttcattcctatctcctttcttgatgtctcctgatcatcagacccctgggcacgtcccattgggcctgttgaagtggaccgggccaggtccagctgagagattcttgaccctacacctgaagcagctgatccctgtcctgctacagccttgggagccct

SEQ ID NO: 28299 - DNA, 920 bp, Artificial sequence
  DNA replication origin
tccgggcccatcctcaagttttctgggttctggggagggcagaggggctggaggaggggacccttgcctgatgtcacacttcatgctcaccacccctacccaacagggagaagatgagcgtgggctgcccagagcctgagccgccccgctccctgacctgctgtgggccggggactgcccctgggcctggtgccggtgtgccccttctcactgaagacatgcaggccctgactctccgcacactggccgccagcgacgtcaccaagcactacgaactagtccgggagctgggcaaaggcacctatgggaaggttgacctggtggtctacaagggcacaggtgaacaagtgcagggtggcagggctgagaggttggggtggggcagggctgggaggtcagggttgggggacatgaccttgcagctgggccggggctctctggtgctctgtggaagccaggaggcagggtcaggggccagatgtagaggatgaggcctgaggcagcccagggggaaagagactgggcagatggggcaagggaggaatccggggcagagtggccagggtacaggatgggctgctgtggggccatctggggtgactttgagacagccaaggggctgtgccaggagtgtctggggagggcagggctgccggctgtgtctgagtatcaccagcgtctcagggatgtctggccccaggaaggtggatggagagtgagggtggttcctcaggaacagggtgccacacttaatgggtggtggaaggacctgtgaggtcaatattgcaatcaccatctctcaggtgaggacagggagacctaggccaattcagccacatagccaatgccctgcagctacagaggctgtgaaccaaaacgagaccccaggagtcatctccagagccttgtcgcttagtcac

SEQ ID NO: 28300 - DNA, 1322 bp, Artificial sequence
  DNA replication origin
aagacaggaagcttagggagacccgttctagatggggtaggctgacaagataaataagcatatggcgggcaggacaaaatgagagaggtggagggcatcacaggccccctcgccccctcctcttggagagctgcagagtgggtgtagaaggctcaggttgaccctgcctgcatggccttgggcaagtcctttcctctctctgggtctgttcccatccgtgagatgaggacagtcatgcctgctggggaccctgttgcaccagggtccagagacaggcatgggtgcatccagtgcggaggcactgggagagggggcttcaaccctgttgctgttgctcccatcaggcacaaaaatggcactgaagtttgtgaacaagagcaaaaccaagctgaagaacttcctacgggaggtgagcatcaccaacagcctctcctccagccccttcatcatcaaggtctttgacgtggtctttgagacagaggactgctacgtctttgcccaggagtacgcacctgctggggacctgtttgacatcatccctccccaggtactcgggatggtggcatagggtggggaaagggtcttcagggtcccagagtgtgagagtgggagtggagtcagaccatttaattaacaagtatttactgggtgcctgctgtatgtcagttaccatttggggaggtggggatgtgcagtaaggaagacaaaagtccctgttctagtgggaaactgacactccacagcgggccagataataacagatggagatgagtgcctaaaaggagacagtgagaatgatgggatgaagtcactgggccctcccctggggctacacaagaggagaggtgtcagatccacctgggaaggggccctcagaggaagcgaccctggaaccgggacggtgggggagggttccaggcactagctttaaatctgctctgccacttgctggctgagtgatgagaccttcggagcaggtcctccttctttgctgagcacctactacatgccagaatctggagacacagatgcacggacacagcagggaacaggacgggaagctcagggagccccgttctagttggggaagaccgacgagataagtatctagcaggcagggcaaaatgacagcaggtggagggcgccgcggaccccctcatcaacctcctggagagccgcgtgtccctcctggagccccgatgtccccataggagaagcaggcatggtagccactatgaggattggatgagacagcgggggaaagggcgctcagcagcatccgggccgcgtctgcgcggtcgccccagttactggggacaggg

SEQ ID NO: 28301 - DNA, 1277 bp, Artificial sequence
  DNA replication origin
ctctgttttgctacctgggggcctgaaccaacctgcaggggcctccttgccggatttcctgagggctgtggtgcaaggcaggcctgggcgccctgggacagctgcctgggaggaccagggtgtggtgggggggccgctggtgaggggtctggacgcacagtcactgaacgcaaaggatggcacccatgcgtctgcaccctacacatgtgcacacacacctagtcacacactcgccccctggtgtccaccgcccccattctcacacccacacatgcaggtcctacgccctgcacactccagcgccagaaaagtgggagacgtgaggatggggtcttggaggttggcatgtttgaccccaagaaacccaggagaaatttccagcacgaaccagctcgccacctgctggaagcccaggctactacgtctaggctgtgtggcaagggctgggaggacccggcagaggtccctgggcctgggacagtgcggctggcagggggagctgggacctgctctcggctccacactaactcccctgccctaaggatgggggcagctgagacccctgccctgtgagcccttctatccccacaagttgtcaggacaatcccttgtggttagggggaggggcggggagagagctctatttctcagccagtgccaagctaccctccctcctgggctgtgatttcatttgtgcaatgggggtgtgcaggagtcactagcttctcggggcctgtcccgcacatacacgcacttatgcgacatccagacatttgctacattttccaagggcttggcctctcccctccagcctccagaagggagggcaggacacagctgcccttcgctcactgccctgatcccagcctgtgcccaggggccttaagccccctctctgcccaacacttcagtccctttctgtacccagggtggggagggggcagaatgggatggcgaggaggaggggatctggggtgggaccgcaggatgatctgccagggggtatggaaggccaggagcaacgagtccgggttccagggctcagggaggcgtctgggagtgtggcccgaaagctcccttgctcctggcgtgtgtgtgtgtgtgtgtgtgtgtgtgtgtgtgtgtgtgtgtgtgtgtgtgtgtgttgtgtggtggcctccgaattctcgggtctgtgcggcttggctcctctgggccaagcccccgctcaccaggccgcgctaggggtctttggtggccccctcaccagcccgccggggacggaccaggtgccgggc

SEQ ID NO: 28302 - DNA, 918 bp, Artificial sequence
  DNA replication origin
agttattgcaggagagatcaggatgtcgcgaggcctaaggcaaaaggagaagtcgcggctgggagaggcagccccgatgggctccaggtgggccgggggcagtgaccagggccttctctgagacctggtccttggagggagtgggggtttgctacttacctggcatgtggagggcccatacccactggggaggtggagtctggagaggagtgggcacagcagggagagtggggccaggccctggggccaccccacactgtttgtaaactggacccgggcagggcaggggacctatagccctttttcaaggtgggaatgagtggggagtggagaggttggggcaccagccagaaagtgctcggagttcactctggccggcctggcccatcaaagagcccctcaaatggcccagaaccccaggagggaccctggcaggggaccctgacagggacagcctcacccatgtggtgcttattgcgggggtcccgggcctccacagagaggggcagggggtcaggcggggctgctgttgtctctgttttgctacctgggggcctgaaccaacctgcaggggcctccttgccggatttcctgagggctgtggtgcaaggcaggcctgggcgccctgggacagctgcctgggaggaccagggtgtggtgggggggccgctggtgaggggtctggacgcacagtcactgaacgcaaaggatggcacccatgcgtctgcaccctacacatgtgcacacacacctagtcacacactcgccccctggtgtccaccgcccccattctcacacccacacatgcaggtcctacgccctgcacactccagcgccagaaaagtgggagacgtgaggatggggtcttggaggttggcatgtttgaccccaagaaacccaggagaaatttccagcacg

SEQ ID NO: 28303 - DNA, 751 bp, Artificial sequence
  DNA replication origin
ttcttcgacagtgacataaactgaggtaaacatctgtgaccaacacctctcctaaggggcaaagggtcccagcccgaccagcagaggaggtggcagcaccagggccccaacctggtgttccggttctgctctggggtcaggctggaggctggccctctgggtgcctctgggaatgagggggctgggctacataactatggtcccctcccaactctaacatactagatactacaacggctggggaaactcccgaacaggatcttaacagagagagggagagagagaaagagaggagagagagagagagagagagagagagagagagagagagagagagagagggagagagagagcgcgcgcgagagagagagcgagcacggcaagggacgtctactgtggaatctcgattcctagttattgcaggagagatcaggatgtcgcgaggcctaaggcaaaaggagaagtcgcggctgggagaggcagccccgatgggctccaggtgggccgggggcagtgaccagggccttctctgagacctggtccttggagggagtgggggtttgctacttacctggcatgtggagggcccatacccactggggaggtggagtctggagaggagtgggcacagcagggagagtggggccaggccctggggccaccccacactgtttgtaaactggacccgggcagggcaggggacctatagccctttttcaaggtgggaatgagtggggagtggagaggttgg

SEQ ID NO: 28304 - DNA, 1147 bp, Artificial sequence
  DNA replication origin
accaggcccgactaatcttttttggaattttttgtagagatggggtttcgccatgatgccctggctagtcttcaactcctggactcaagtgatctgcccacctcggccccctaaagtgctgggattacaaggcctgagctgtgtaatttcatgccgcgtgacacagcccagtaaaaaggaagaaaccccgcgggtccagcgtctactcacaggggtgggctgatggctgataaatcccagcaggagccaaatgaggagccaaaagcgcagccgcatgtcatgatcctttcagggtgccctgaggcggccaggacagaggtggaggtggcttagggcaggggggagggaaggggacggggaccggggcggatctgagttggggaggggcaggggagggggaggggaaggggagggggaggggaaggggagggggaggggaaggggaaggggaggggaaggggggaagtaagggaagggaaaggagaagggggctgttgggcacctggaggaggtggaggagggggaggagaagaagaaaggggtctgggaaaggatccggttcaaattaagttctcaagcgctggtggaaggtttagctacaggtcacggagaagatcagggaagcaacaggacacgcggggcaagggagcgtgaggcttaggagcaattagagggagacaaaaaggttctgctatccgccaaaccttcttcggtctgggccctcccttagcaaacctggggctttatactccctctccaccaatccctgatgaccccggtggtgcctcacaatggacaatgccaagtagcgcccgcatcattccaatgacccctcccccatctcagtctcccacactcctcgcaaggacaggtcctctctggaaccttcacaaacctgatttctggtcctccccaaccagctccctgtccctgcttctgggcgctccttccttcctgagctcccagggttcctcaaggtcacttttggcgacaaaacataaaaaacaaatgatggcaggatggcaggaagaacctcatacccaagcagagtgccaggttttacagcctccgctcagccattcatatcctaagcaacaaaacatcagcaggatgcggaaggtcccgatagtaaaccatctccatcaca

SEQ ID NO: 28305 - DNA, 1115 bp, Artificial sequence
  DNA replication origin
gcgtctttcttccccgccccgccggctgctggggaagcggcgggcgcccagtgcctggaggtcgctccctcgcctcctctggctgcgggaacggagaggcggcggcggccggagcagggtgggcggcctgagccgagagcccggccggcccccgcgaggaatatggcgacctgcggcgaccggagcagcagcggcgtcagttgctgcaccgccgacttcttggagcagcgaaagcgactcgcgagaagacgccgccaagtggaacccgggccctgcggccctgggagggggcagcagcgacacagccatgaagccccgggcgcggcgctgggcgccaacgagagccacggcaacctccagacggcgccacagcaacctctaggcagtgcccacaccagcctacaggtggcgcccctcgcactgcacctgccgcggccgccccgggtgtgaactgcgctgtcagcagggccgcgctgacccgggtggcccaggcccgcagcagccgaggagcccaggggcactgcccggggtgacgagaaggagaagacggtgccccagaaaaaggcaagagctcagagctcgggtccccgtgccaggaatggccaggagcagaagatggagaggtggagatggagaaggagaagcaggaggtgggaaggagcggcgctccaccggtggggtcaacatgcgctggctgagcttagagtatgaagaggatgaagcaagtcagaaagagcggaaacgagaaggtgcaatgacacagcagagcacaatgcagaatccagccctaggactccaataaaggctgggtttaattccaactcacaccctcccacccctaatcagagaggatcacaggagagagaggacccaaggaacactggaacctgaaggacaggaatctgaggccaagactgattgctggaaattgtgggaatcaggaaaggagaaactgaggcagaatggggggatggagggtggtggtggggggcagtgagctgggttaggaaggattagaaatcagaaccctaggaaggatccagaaaggaactgtccttaagaaggtgcatgctgcggctgggtactgtggctcacgcctgtaatcccagcacctt

SEQ ID NO: 28306 - DNA, 1519 bp, Artificial sequence
  DNA replication origin
gcagagcacaatgcagaatccagccctaggactccaataaaggctgggtttaattccaactcacaccctcccacccctaatcagagaggatcacaggagagagaggacccaaggaacactggaacctgaaggacaggaatctgaggccaagactgattgctggaaattgtgggaatcaggaaaggagaaactgaggcagaatggggggatggagggtggtggtggggggcagtgagctgggttaggaaggattagaaatcagaaccctaggaaggatccagaaaggaactgtccttaagaaggtgcatgctgcggctgggtactgtggctcacgcctgtaatcccagcaccttgggaggccgaggcgggcagatcacctgaggtcaggagttcgagaccagcctggccaacatggcgaaaccccatctctactaaaaatacaaaaattagccaggagtggtggtgtgcacccgtaatcccagctacttgggaggctgaggcagggagaattgcttgaacctgggaggtgggagttgcagtgagctgagatcgtgccactccattgcagcctgggcaacaagaatgagattctgtttcaaaaaaaaaaaaaagaagaaggtgcatgctggggatgaaggaatgggttctaagactcagggagtgagggaaggggagggacaggggttgggggtgcagtggggtgctaatgcagcacccaaacagaagaagactggaggaaagcagggcccttctcctccaactccagctgctcctctgagtcccaggccacctgctcctgtgtctgccgacctactggcctatctctgaatcctgctggaatgccattcctcctgatctctgccctgcctcagacctttcactaacaccaccacccctactgcccagggcccaccacccccactgtccccgaccatagcctgcccctatccagaagcccctgcttccagccacatgccctaggtgacctaaaggggacctggacatgcaggggaagagggtgctcttctggttcctcctgcttaggtatcccagtctcgcaatcatgagtgtgagtaaatgttggatatgacacagattctatttctcaagctgtttcacactgtggtttacctaacagtgttttgtggggtcatcgatggggatttggttctccctgcagaccaaggacctcagcgcagatttcttgagcagcctagagaggctctggcctcacctggccacatcaagttctgggtcctgcctgccctgcttggcccaaacacagcaagggtgacaggagggaaacgggaaaatggtgactttataatattggaaaggaaggatttcatggcccagtggaacacaacagagaacccagaaataaatccatgcatttacagccagctcattttgcaccgaggcaccaaaaacataccatggggaaacagatggtgtcttcaataagtggtgctgggaaaatgagatatatctatgtgtgaagaataaaactagacccctg

SEQ ID NO: 28307 - DNA, 1507 bp, Artificial sequence
  DNA replication origin
tgcctgacttattttttgtctttttagtagagacaggctttcaccctgttgctcaggctggtctcaaactccggacctcagaagatccacctacttcagcttcccaaattgctgggattataggcatgagccatggtgcccggctccttattttatttatttatttttttgagttttgctctgtcacccaggctggattgtagtggcacgatctcagctcactgaaaccttcgcctcctgggttcaagcaattctctgtcttggcctcccgagtagctggaattacaggcgtccgccactacgctggctaatttttgcatttttagtagagacggggtttcatcatcttggccaggctggtcttgaactcctgacctcgtaatccacccgcctaggcctctcaaagtgctgtgattacaggcatgagccattgtgtctgaccccttacgttttttaaaaacaactttattgaaatagaattcacgtagcatacaacttccccatttaaggcatacaattcaatggcttttagtatattcacaaatcctttctttttgtgtatatgtaccacattttctttgtccattcatctgttgatggatacttaggttgattttgtattttggctgttttgaatagtgctgcaataaacataggagtgcagatgtgtctttgagatactgagtttctttcttgtggacttacacccagcagtgtgattgccgaattatacggtagttctatttttagcttattgaggaccctccatgcagttttccgtagtggataagctattttacattcccaccggccaggcgtggtggctcacgctggtaatcccagctctttgggaggctgaggcgggagaataacgaggtcaagatatcaaaagcatcctggccaaaatggtgaaaccccatctctactaaaaacacaaaaaatagctgggcatggtggcaaacgcctgtagtcccagctactcgggaggctgaggcaggagaatgctggaacccgggaggcggaggttgcagtgagccgagatccgcgccatcgcactactccagcctgggcgacagagagagagactctgtctcaaaacaaacaaacaaaaaacattcccaccaagagtgtttgagtgctcctgtttctctgcgtccttgtcagcatttgttgttttctgactttttgatagtcgccattttagttgaggttagatgaaattttactgggttttgatgtgcacttctgtgatgattagtgatgttaagtttgcatatacctgttggccacttgtatgtcttctgttggaaaatagccattgagatcttttgccttttttttttttttttttgccaatgctgtcgtttattgcgcggagtgggggcgtgggggttagtggggcgtgggggtcgtgatgggggcactgctgcctcggttcgtcagtacattaatcacagcggcgggactccagcctttgcagcctcgcccacgcgccctgcgcagccag

SEQ ID NO: 28308 - DNA, 1217 bp, Artificial sequence
  DNA replication origin
atttaaccctgagtggacacagcatatgtttcagagagcacggggttgggggtaaggttatagattaacagcatcccaaggcagaagaatttttcttagtacagaacaaaatggagtctcctatgtctacttctttctacacacgcacagtaacaatctgatctctctctcttttccccacatttctcccttttctatttgacaaaaccgccatcgtcatcatggcccattctcaatgagctgttgggtacacctcccagacggggtggcggccgggcagaggggctcctcacctcccagatggggcggccgggcagaggtgcccacctcccggacggggtggcggctgcgtgagggctgccccccacctccctcccggacggggcggctggcctggagggggcttacccccacctccctcccggacagggtggctgccgggcggaggggctcctcacttctcagacggcgcggtcgccaggcagagggtctcctcacttctcagacggggcggccgggcagagacgctcctcacctcccagacggggtcgcggccgggcagaggcactccccacatctcagacgatgggcggcctggcagagacgctcctcacctcccagatgggatggcggccgggcagagacgctcctcactttccagactgggcagccaggcagaggggctcctcacatcccagacgatgggtggccaggcagagacgctcctcacttcccagacggggtggcggccgggcagaggctgcaatctcggcactttgggaggccaaggcaggcggttgggaggtggaggttgtagcgagccgagatcacggcactgcactccagcctgggcaccattgagcactgagtgaacgagactccgtctgcaatcccagcacctcgggaggccgaggctggtggatcactagcggttaggagctggagaccggcccggccaacacagcgaaaccccgtctccaccaaaaaaatacgaaaaccagtcaggcgtggcggcgcgcgcctgcaatcacaggcactcggcaggctgagacaggagaatgaggcagggaggttgcagtgagccaagatggcagcagtacagtccagcttcggctcggcatcagagggagaccgtggaaagagggggagagggagactgtggggagggagagggagagggagagcctgtttctaataaatatacaaaatcagcaagg

SEQ ID NO: 28309 - DNA, 907 bp, Artificial sequence
  DNA replication origin
gaagtgaggagcgtctctgcctggccacccatcgtctgggatgtgaggagcccctctgcctggctgcccagtctggaaagtgaggagcgtctctgcccggccgccatcccatctgggaggtgaggagcgtctctgccaggccgcccatcgtctgagatgtggggagtgcctctgcccggccgcgaccccgtctgggaggtgaggagcgtctctgcccggccgccccgtctgagaagtgaggagaccctctgcctggcgaccgcgccgtctgagaagtgaggagcccctccgcccggcagccaccctgtccgggagggaggtgggggtaagccccctccaggccagccgccccgtccgggagggaggtggggggcagccctcacgcagccgccaccccgtccgggaggtgggcacctctgcccggccgccccatctgggaggtgaggagcccctctgcccggccgccaccccgtctgggaggtgtacccaacagctcattgagaatgggccatgatgacgatggcggttttgtcaaatagaaaagggagaaatgtggggaaaagagagagagatcagattgttactgtgcgtgtgtagaaagaagtagacataggagactccattttgttctgtactaagaaaaattcttctgccttgggatgctgttaatctataaccttacccccaaccccgtgctctctgaaacatatgctgtgtccactcagggttaaatggattaagggcggtgcaagatgtgctttgttaaacagatgcttgaaggcagcatgctcgttaagagtcatcaccactccctaatctcaagtacccagggatacaaacgctgcggaaggccgcagggccctctgcctaggaaaaccagagacccttgttcacgtttatctgctga

SEQ ID NO: 28310 - DNA, 931 bp, Artificial sequence
  DNA replication origin
ccaacgcgcggtaggattcgcgacgcctgcagccaaggtctcagcgcccggttccctcaggcttgtccccgcccccttatggcgcgaaggccactgggagttgtagtctcccagtgtagttagtcggcgcttcccggaagtgacgcgaggacccgccttctctctcggcgtttccgctgtcagggccctgcggtgtgactcgcgggctcagctggttggtattttttgggcctcgtgcttcgtggtgggagacccaggtcgaggtccgggtggggccggtgaggggttgggcgtcgggaggtgttggctcgggcctcttcgcgtggccggtgacgccttggctcccccgcaggtccggccgtagcacctccgcgccgtcgccatgtcgcggtttttcaccaccggttcggacagcgagtccgagtcgtccttgtccggggaggagctcgtcaccaaacctgtcggaggcaactatggcaaacagtgagttgcgggggctgtggctgtgaccattctgggagtgcggggttaggcaggctgtggaacgcagtgcacatgggaggggatggaggtgagggcggggagagtgggtttggacaatgaccagagtttgcaggatcggagcggtgttggagagagacagccttagagggctgtgatagccggtagccacccaccaggcacaagggatagaatcacagaggtttcccaagccagatctgttgcatcagcttcttaactggccttaagtctacagcctctacctgtctcctctcattttaccgccgagaagtccttagtgacttctcactgctcacagaaggaaatgcaaaatgcttgattggtatctgggagccccctgatgcgactctgaagtctggtcacctgctgtgtacgcaggtgcttaaacattttatatgcctgttcacct

SEQ ID NO: 28311 - DNA, 1347 bp, Artificial sequence
  DNA replication origin
caacacagcgaaaccccgtctccaccaaaaccagtcaggcgtggcggcgcgtgcctgcaatcgcaggcactcggcaggctgaggcaggagaatcaggcagggaggttgcagtgagccgagatggcagcactacagtccagcttcggctccgcatgagagggagaccgtggggagagggagacggagatggagacggagacggagagggagagggagagggagagggagagggagaggaagagggagagggagagggagagggcatgaaaataggaaatgtgaatcctccaactttttttttttggagacggagtctcgctctgttgctcagactggagtgcagtggcactatctcagctcactgcaaactccatcttccaggttcaagtgattctcctgcctcagcctaccaagtatctgggactacaggcaggtgccaccatgcccggctaatttttgtatttttagtagagatggggtttcaccatgttggccaggctggtcttcaacttctgacctcaagtgatccaccctcctcagcctcccagcgtgctgggattacgggtgtgagccacctcatccagcctctttttttttcttttaatatctaaaatcctttttagaacatcattgctgtttgccaaatagaagacacagacagcagatgaacagtggaaacagaacccggtgacctgagccacctagtggctggggaccctcccctctacctggcggaccagcctggcgacctctgcccctccccgggcccctgggcctttggcatgatgctgatggggcgctgtgggcagtgaagtcccttgactcaaagcagagacttgaatgggtgctggagagtggggacagtggagagggcggggagggggagagggcagggaaggcctggcaggcccccagggctagggggagcagcggaagtggaggaagccaggagctggggagatggtgtctatttttgttttctgaaaaggggcgcctaggggcttgcacacaggtggcagctgcagctggggtgggtcacgcactgacatccccgcctgtcttgggaacagcttccagcagccggtccctgaacactcctcctctccctccttggcctcgctgacctcagagttggggacccggaggccggcgtcgatacactgttgcatggggaacttggccttggtggggtccatcttgctgcatttgcgcgtccttcgcattgaagcccttttggagttcctcagggggaactcgtcacctccacgggttccaggccaccagggccaagctgcttcttgagctcctcctcctagtactcctgcaccacctgctttctagacgcgc

SEQ ID NO: 28312 - DNA, 1326 bp, Artificial sequence
  DNA replication origin
gaccccccccacctccctcccggacggggcggctggccgggcggggggctgaccccccaacctccctcccggaccgggcggctggccgggcagaggggctcctcacttcccagtaggggcggccgggcagaggcgccctcacctcccgggcggggcggctggccgggcggggggggctgaccccccccacctccctcccggacggggcggctggccgggcagagcggctcctcacttcccagtaggggcggccgggcagaggcgcccctcacctcccagacggggcggctggccgggcgggggggctgaccccccccacctccctcccggacggggcggctggccgggcagaggggctcctcacttcccagtaggggcggccgggcagaggcgcccctcacctcccggacggggcggctggccgggtgggggggctgaccccccccacctccctcccggacggggtggctgccgggcggagacgctcctcacttcccagatggggtggctgccgggcggagacgctcctcacttctcagacggggcggctgccgggcggaggggctcctcacttctcagacggggtggttgccaggcagagggtctcctcacttctcagacggggcggccgggcagagacgctcctcacctcccagacggggtctcggccgggcagaggcgctcctcacatcccagatggggcggcggggcagaggcgctccccacatctcagacgatgggcggccgggcagagacgctcctcacttcctagatgtgatggcggctgggaagaggcgctcctcacttcctagatgggatggcggccgggcggagacgctcctcactttccagactgggcagccaggcagaggggctcctcatatcccagacgatgggcggccaggcagagacactcctcacttcccagacggggtggcggccgggcagaggctgcaatctcggcactttgggaggccaaggcaggcggctgggaggtgtaggttgtagtgagccgagatcacgccactgcactccagcctgggcaccattgagcactgagtgaacgagactccgtctgcaatcccggcacctcgggaggccgaggttggcggatcactcgcggttaggggctggagaccggcccggccaacacagcgaaaccccgtctccaccaaaaccagtcaggcgtggcggcgcgtgcctgcaatcgcaggcactcggcaggctgaggcaggagaatcaggcagggaggttgcagtgagccgagatggcagcactacagtccagcttcggctccgcatgagagggagaccgtggggagaggga

SEQ ID NO: 28313 - DNA, 1002 bp, Artificial sequence
  DNA replication origin
ccacccggccagccgccccgtccgggaggtgaggggcgcctctgcccggccgcccctactgggaagtgaggagcccctctgcccggccagccgccccgtccgggagggaggtggggggggtcagcccccccgcccggccagccgccccgtctgggaggtgaggggcgcctctgcccggccgcccctactgggaagtgaggagccgctctgcccggccagccgccccgtccgggagggaggtggggggggtcagccccccccgcccggccagccgccccgcccgggaggtgagggcgcctctgcccggccgcccctactgggaagtgaggagcccctctgcccggccagccgcccggtccgggagggaggttggggggtcagccccccgcccggccagccgccccgtccgggagggaggtggggggggtcagcccccctgcccggcgagccgccccatccgggaagtgaggggcgcctctgcccggccgcccctactgggaagtgaggagcccctctgaccggccaccaccccgtctgggaggtgtgcccaacagctcattgagaacgggccaggatgacaatggcggctttgtggaatagaaaggcgggaaaggtggggaaaagattgagaaatcggatggttgccgtgtctgtgtagaaagaagtagacatgggagacttttcattttgttctgcactaagaaaaattcctctgccttgggatcctgttgatctgtgaccttacccccaaccctgtgctctctgaaacatgtgctgtgtccactcagggttaaatggattaagggcggtgcaagatgtgctttgttaaacagatgcttgaaggcagcatgctcgttaagagtcatcaccaatccctaatctcaagtaatcagggacacaaacactgcggaaggccgcagggtcctctgcctaggaaaaccagagacctttgttcacttgtttatctgctgaccttccctccactattgtcccatgaccctg

SEQ ID NO: 28314 - DNA, 1060 bp, Artificial sequence
  DNA replication origin
cccgtctccaccaaaaaacacagacggcgcgtgcctgcaatcccaggcacttggcaggctgaggcaggagaatgaggcagggaggttgcagtgagccgagatggtggcagtacagtccagcctcggctcggcatcagagggagactgtggaaagtgagagaggaagggggagggggagggagaggacaaaaaattaaaatttagccggacatggttgtgtgtgccagtagtccaagctgctggggagactgaggcaggaggatcacttgagcccaggaacttaaggtctatttaagtaaagggtacagtgagctgtgattataccactgcactccagcctggggaatagagcaagaccctgtctctaaaaaaaggtaacaaaataacatgaatggattccattttaagagaatgaagcatcattgtgtaagactatgaaattggaagcaaagagcatgaagcccaaaaaaaaaaaaaaaaccatctgaagtcagggtgcctggggtcagaggtggggggaggattgaagaggtgcagatgtaaaaaactgaagctactgtgaccagtggattcgggagttgaaggagtcaagaatgacacattctcctgactggaggataaacaaatatgactgttttcaagaaatagctggaatattctttgtgttcagaagtacaagaacagcacatatggagggcggactgatactgaagttgaagagaagccttctgatgtgcactaactagattctagactcagcttctgtcacaaggagccccaaacagtgactcagcaaaatagcttatttctcatgtgacagttcagaggtgattggtccagggttagggttagacaacaaccgttatgcaaaatcatctagggacccagggctgcgctgtcatgttgctcttgcatccccaaggttgtcatctgtgtggttaaagcggctcaccagccccaagtcctcgttcaagcccatgtaaaaggaagcggaaatacagggcctggaaattacactgatcccattggccagaacttagtctcaccttcttaccaccct

SEQ ID NO: 28315 - DNA, 1275 bp, Artificial sequence
  DNA replication origin
gaagaatttttcttactacagaacaaaatgaaaagtctcccatgtctacttccttctacacagacacggcaaccatccgatttctcaatcttttccccacctttcccccctttctattacacaaaaccgccactgtcatcatggcccgttctcaatgagctgttgggcacacctcccagccggggtggcggccgggcagaggggctcctcacttcccagtaggggtggccgggcagagtcgcccctcacctcccggacagggcggctggccgggttgggggctgacccccccacctccctcccgggtggggcggctggttgggcgggggactgatccccccacctccctcccgggtggggcggctggccgggcgggggggctgactcccccacctccctcccggacggggcggctggccgggcgggggggctgacccccacctccctcccggacggggtggctgccgggcggagacactcttcacttcccagacggggtggctgccgggcggaggggctcctcacttctcagacgaggcggctgccgggcggaggggctcctcacttctcagacggggcggtcgccaggcagagggtctcctcacttctcagacgctcctcacctcccagacggggtcgcggccgggcagaggcactccccacatctcagacgatgggcagcctggcagagacactcctcacctaccagatgggatggcggccgggaagaggcgctcctcacttcctagatgggatggcggccgggcagagaggctcctcactttccagactgggcagccaggcagaggggctcctcacatcccagatgatgggcggccaggcagagacgctcctcacttcccagacggggtggcggccgggcagaggctgcaatctcggcactttgggaggccaaggcaggcggttgagaggtggaggttgtagcgagccgagatcatgccactgcactccagcctgggcaccattgagcactgagtgaacgagactccgtctgcaatcccagcacctcgggaggccgaggctggcggatcactagcggtcaggagctggagaccagcccggccaacacggcgaaaccccgtctccaccaaaaaacacagacggcgcgtgcctgcaatcccaggcacttggcaggctgaggcaggagaatgaggcagggaggttgcagtgagccgagatggtggcagtacagtccagcctcggctcggcatcagagggagactgtggaaagtgagagaggaagggggaggggga

SEQ ID NO: 28316 - DNA, 885 bp, Artificial sequence
  DNA replication origin
gcgtctgagaagtgaggagaccctctgcctggcgaccgccccgtctgagaagtgaggagcccctccgcccggcagccgcctcgtctgagaagtgaggagcccctccgcccggcagccaccccgtctgggaagtgaagagtgtctccgcccggcagccaccccgtccgggagggaggtgggggtcagcccccccgcccggccagccgccccgtccgggagggaggtgggggagtcagcccccccgcccggccagccgccccacccgggagggaggtggggggatcagtcccccgcccaaccagccgccccacccgggagggaggtgggggggtcagcccccaacccggccagccgccctgtccgggaggtgaggggcgactctgcccggccacccctactgggaagtgaggagcccctctgcccggccgccaccccggctgggaggtgtgcccaacagctcattgagaacgggccatgatgacagtggcggttttgtgtaatagaaaggggggaaaggtggggaaaagattgagaaatcggatggttgccgtgtctgtgtagaaggaagtagacatgggagacttttcattttgttctgtagtaagaaaaattcttctgccttgggatcctgttgatctgtgaccttaccccaaccctgtgctctctgaaacatgtgctgtgtccactcagggttaaacggattaagggtggtgcaagatgtgctttgttaaacagatgcttgaaggcagcatgctcgttaagagtcatcaccactccctaatctcaagtacccagggacacaaacactgcggaaggccgcagggtcctctgcctaggaaaaccagagacctttgttcacttgtttatctgctgaccttccctccg

SEQ ID NO: 28317 - DNA, 1190 bp, Artificial sequence
  DNA replication origin
cctggggcctcacttccgggcacctcccctggggcctcacctttcccctcctccttctgatctcctcaaactggagattgctttctcaggttcaggcagactcctggcctaatattttctgaatttcagtccccacctccaaccatgcgtcctcgtacccctaatcgatgccccttctggctccttctgcaaatcctcttcttctcctttcagatcccagtaccctcttccttaacctgggctcctccagccagggcccccagggaaagggctgggactctcctcaatgactctcccctctctctctcttttttcctaggattccctcggcacctttgtctcctacctcctgggagatgcagtccccactgtagagcgggaggcgcaggcggctgaggaactgggggtggtggcggtgggaaagacagggaagattgtagaggaggaagcccaggaggacctggagggccttagaggcagccaaaacgagggggctggaaggctgagagggcctggagatgacagaagacatgaagtggggagctcagctgtagaacagacctggggctggggagatggcagctcccatgggtcccaagcagagaggcaggacagtggggctggggagacagccaaggctgccaggtgccaggagccaagcgcccacttggaggccagaaagaaatccaaggcagggtctggggcttgccaagacaggagcggccaagcccaggagaggcaggagtcccatgagcaggaagtgaacagagaagagaggctgagaagctgggaacaggaggaggaggaggaagaggtcagggcaagagagccagggatggccagaggggcggagtcagagtggacctggcatggggagacggaggggaaggctggtgctgttgggccaaaggcggcaggggacaaccgggagatggagcagggggtcagggaggcagatgcaggggaaactgaggagcctggggccgaaggggctgggaaaggagaagaggtggtagtggtggagaaggcctgtgaaagcactagggcatgggggacgtggggcccaggggcagagcctgaggactggggaatcttaggcagagaggaggccaggacaaccccaggtagggaagaggccagggcaattttagatggggaggaagccaggacaatctcaggcggggaggagg

SEQ ID NO: 28318 - DNA, 1077 bp, Artificial sequence
  DNA replication origin
gacctggcatggggagacggaggggaaggctggtgctgttgggccaaaggcggcaggggacaaccgggagatggagcagggggtcagggaggcagatgcaggggaaactgaggagcctggggccgaaggggctgggaaaggagaagaggtggtagtggtggagaaggcctgtgaaagcactagggcatgggggacgtggggcccaggggcagagcctgaggactggggaatcttaggcagagaggaggccaggacaaccccaggtagggaagaggccagggcaattttagatggggaggaagccaggacaatctcaggcggggaggaggctgagacagcctcaggcggggaggaggctgaaacagcctcaggcggggaggaggccgggacagcctcgggaggggaggaggccgggatagcctcaggcggggaggctgggacagcctcaggaggggaggaggccgggacagcctcaggaggggaggaggccgggacagcctcaggaggggacgaggcctggacaacctcaggcaaagaggaggctgacctgctgggagtcagacagacagaatatggagcagtcccaggagaaaggctcctagaggctactggaaaagtctgggtcctagaggaggagggggatgaggagagagaggctgaggtgagccctttccccaaacagccccaggtcctgggcactgaaagaacagaagaggctgctgagagccagaccgcagggagggaagctgtgggaggccaggaggcaggggagagctttgagggccaggtagacctgcgtggtaaggaggctgagatgaggcaggacttggggatcagggccgaccgggccaggatggaagagctggtacaggcagaggaggcccaggaggagagagggagcagcagggatccagtggctgagctgccctcagatggagaggctgaaggcactgccgacttggaggcaactccagaggccaggcctgaggaggagctcacaggggaggagagtgaggcggcccagactagctgtggcctactgggcgtggaatggggtggcctcacacacagcgtcac

SEQ ID NO: 28319 - DNA, 1313 bp, Artificial sequence
  DNA replication origin
gcccaggaggagagagggagcagcagggatccagtggctgagctgccctcagatggagaggctgaaggcactgccgacttggaggcaactccagaggccaggcctgaggaggagctcacaggggaggagagtgaggcggcccagactagctgtggcctactgggcgtggaatggggtggcctcacacacagcgtcaccaaaggccaaggacctgagctgatggggggcgcccagaccccaactaagcaacccgaggaaagggaggcaggggaggtggagctcatgggagttctggccctgagcaaagaggagcaggagaggagcctggaggcaggtcccaggcacgcggggtctgtaaagcctgaggcctccgaggccttcccaggagcctgggaaaaccgcacgagaaaggacatggagagaggaaatactcaggaggatgcggccgatggcgagcagcgggaggaggaggagactgcgggaggccagaccctggcggctgaggctgaaggagaccgagagtctgaactatcagaagtcccagaggcaggcggggaggggctgacaacccaggacgcgggatgtggaactgaggagggagaggcatctgtctcagagaaccaggagctggacggaagcacaggggcagacgcagggccttgcccgtcactgggagaggcctatgccagagaaactgaggatgaggaggcggaggctgacagaacatccagaagaggctggaggctgcaagcggtggctgtgggcctcccggaccgtgaggatgcacagactggctctgtggctgctgggattatggggggtgatgtggtcccacacatcagcgctgctggcgctggtgaagctttggaaggggtgcttgggcaaggctgggactcgaaagaaaaggaagaggcagcagcaggagagcatgcaggtgggcaagaatttggtctggagggctcagcagaggaagaggtgactggcagaggcagccaagtagaggcttttgagtccagggagggaggaccttggggagggcgggtagaggccgaggaatctgcaggcgcagaggacagctgtgggctggatcccgcgggctcccagacagcgagggcagaggggatgggagccatggtggaggctggggggcttctagaaaagtggacgctgttggaagaagaggctgttggatggcaggagagagaacagagggaagacagtgaggggcggtgtggggactaccaccctgagggagaggcaccaaggctccttgatgcagagggtctcatggtgaccgggggccggagggcaga

SEQ ID NO: 28320 - DNA, 1293 bp, Artificial sequence
  DNA replication origin
catggaggaaggatggagttggggttaggaatgggaatgaggctgaagatgggatggaaacacatgggcaggaggtatgatgggatggtggaggagggaagggaacagggctgtggatggagagtgcttcagggactgagagggggtgggttagagaagatcattggcataggagtgaaagggaggctggaaaaggagatgggacaaatgtcccagacagtggagatggaaggaatggggacacagctgggctgaggtgggggaagagctacagggatggactggaggctggagcgtggaatgggaaggagacccggatagggagggggtgggtgtgatatggccatccttggcctgtggacctttcctgaccatctccctccccttcaggacccggagcgtctctgcttcatctccaccacgcttcagcccttccatgccctgctgggagggctggggacccagggccgctggaccaacatggagaggatgcagctgtgggccatgaggctggacctccgcgatctgcagcggcacctccgcttccaggtagagcccggccaccctccaccaccccagaccacgtgggaaagaagactcgctggctcattcagtgatcccatgctctgagtgtgtgtgagtgtgagagtgtgagtgtgactgagtgtccatgagtgtgtgggttcatgagtgtgagagtgactgtgtgggtccgtaagtgtgggagagtgagtgtgactgtgtgggtccatgagtgtgacagtgtgactgtgagagtgtgtgagtgtgggtctgtgagtgtgagagtgtgtgggagtgactgtgagtgcatgtgggtctgtatgagtgtgagcatgactgtgtgtgagggtgtgggtccgtgagtgtgagagtgagtgtgtgggtctgtgtgagtgtacctgactgtgagagtgtgtgggtgtgactgtgagtgtgtgtgtgggggggctgtatgagtgtgagcatgactgtgtgtatgtgcgtccgtgtgtgagtgtgactgtgagtgtgtgggtctgagtgtgaaagtgtgtggctgtgagtgtgtgagtgtgtgggtgtgactgtgagtgtgtgtgggtctgtatgagtgtgagcgtgaccgtgtgtgtgtaggtccatgagtgtgagactgtgagtgtatgggactgtgagtgtaagagtgtgggagtgtgtgggtgggtgtgtgaatgtgagtgttgtgagtgtgaaagtgaggtgtgtgggtgagagtttgggtataggtatgtcagtgtgtgaggatgagtgtga

SEQ ID NO: 28321 - DNA, 1218 bp, Artificial sequence
  DNA replication origin
agttatgatcctggactccaggatggagaacagagggaaaccctgtctcagaaaaataaataaactgccaggcgtggtggctcatgcctgtaatcccagcacgttgggaggctgaggagcacggatcacctgaggtcaagagttcaagaccagcctggccaacatggcgaaaccccatctctactaaaaaatacaaaaattagctgagcgcagtggctcacgactgtaatcccagcactgtgggaggctgatgtgggtggatcacctgaggtcaggagttcgagaccagcctgaccaacatgaagaaaccccacctctactaaaaataccaaattagccgggtatggtgctgtgcgcctgtaatcccagctactcgggaggctgaggcaggagaattacttgaacccaggaggtggaggttgcagtgagatgagatcgcgccactgcactccagcctgggcaacagagcgagactccatctcaaaacaaaccaacaataaagatgaagctggaataaggaagtggggttgggaagaggtaagagtggagctaggcatggaacgcggcaggcatgggactggaatgaggctggagacagatcacagcagcatggagggtgggtggaggtggcactgggggtgagaatgcggatagttagagatgagaaggtgatgatgagggtgaacgttaagcatgggatggagaagggatggggattgctggtggggaagggaatggaatagggttaggaatgaggttggagatgggatggaaagatggaaagagtgagtctgggcacatggaggaaggatggagttggggttaggaatgggaatgaggctgaagatgggatggaaacacatgggcaggaggtatgatgggatggtggaggagggaagggaacagggctgtggatggagagtgcttcagggactgagagggggtgggttagagaagatcattggcataggagtgaaagggaggctggaaaaggagatgggacaaatgtcccagacagtggagatggaaggaatggggacacagctgggctgaggtgggggaagagctacagggatggactggaggctggagcgtggaatgggaaggagacccggatagggagggggtgggtgtgatatggccatccttggcctgtggacctttcctgaccatctccctccccttcaggacccggagcgtctctgcttcatctccacc

SEQ ID NO: 28322 - DNA, 988 bp, Artificial sequence
  DNA replication origin
gacattgaggacagggctggacgtgggagcttagcagtgagtctggagcttggatgtcccgaaaccccagcttcccgtcaccccccatcatacctcccaccccctccgggaagggaaattacatttccccattttagcaaggggtggcgagagggaagaatgagtgaacacaaagctgaaagtacaagcaggacggaaagtgaaaccgggcacagcccccagtataagaccccccctacccaggagatggctgaccaaagaggctgggccccgccatgggccagacggcaggcgaccttggctggcgtgagtttgaagccaggggtggggggcttggttgagtttgggcagagaatggacgagcttggctggtgcagatggggggtcgagagctgagagcagcaacttggccaagactgaggattcggctggctgctgcatgggaagggaggctggcatgactgggtgggggcctggggcagtggggtggtggtctgacccagggctgggcagaggatgagaaggaggccttggctagtgggaatggggagggttggaccagcaatttgacaaggaccaggtctaggcagataaatgaagagtttggagtgaataagcagaagccaaacagcttggctaagactgagaatggggccggctggaggaagagcagaacgaggtgctggcacaagtggagcactgggaccaagatgtcagcagcctcactgggtcaaaggtctttagtttgatgttggaaagaggtccaatctgcggctggtggctgcagaactcaggggctagaaccagagcagtaggcagtggagaaggtaacatgccacgtagggcaggtagggaccaaaggctggaggatggagacagagccttcaaaggccagagccaatgacccaggatcagctgcagagggtaaggagggggtctggggtctccagaggtcaggttggagatggcacagctcacttacggttgg

SEQ ID NO: 28323 - DNA, 1206 bp, Artificial sequence
  DNA replication origin
ataatagtgtcacccaatccatcacaataaatctcttttaaaatagctatacagttgaccctcaaacaatgcaggttttaattgtgcaggtccacttatatgtggattttcttccacctctagaactcttttttgagacagggtcttgctctgtcacccaggctagagtgcagtggcacgatcttggctcactgcagcatccacctcctgggtttaagtgattattgtgcctcagcctcccaagtagctgggattacaggcgtgcaccaccacgcccggctaattttttaatttttttttttttttttagaagagactggatttcaccacgttgctcgggctggtctcaaacccctgagctcaggcagtctgcccacctcggcctcccaaagtgctaggattacacgcatgagccaccgcgcctggccagtatttacatttaaaatgtgaaactgggattgcggtggctcatgcctgtaattccagcatttggggaggctttggttaggaggactgcttaagcccaagagtttgaggctgcagtgagctgtaataacaccactgttctccagtctgagcaacagagaacgtgtctctaataaaaacaaaaatgtgagatgatgcctaggttagaatcagcagaggagaagccagagagagcagaggcaaaggaagagaacgttcagcaagccaaatgaaaacagtgtttcaaggaggggcagtgatccacagcatcaaatgctgaacaggactgagacctaacttaacaatgcatttggccacctagagatcactggtggctttgacaagaagcctttttagtggagtggtggagaccaaagcctgactagaggctcaagggttcaagacttggaggagaaaaggcattagtgagggtagactaaggcctttggctgcaaaccggagccgaggaggaggtaactggaggatagcgagggtgaaggaggctgttttgttgttcttaagacgggcattttttggccgggcgcgggggctcacgcctatactccccacactttgggaggccgaggcgggaggttgagcctcctgggcaaacgacgagctgttagtgtatcttgttaagaactatatatatatacaaaatttttgtgcaaatcataaaataagtgctggagttcggggcccatcctctgtccgcatcttcgtgacccgggtccgagtacc

SEQ ID NO: 28324 - DNA, 1100 bp, Artificial sequence
  DNA replication origin
gctggggccgggggactgcactcagctagggcattggccctctaggggcagaagctgccctggttcttccggaaggaactcctctcacaggcagatcacgtgggctcttagccaacagccagggttggggcaacacaagggccccgcttcatcctgtcccaggcagcaggcaggtaagagacaaggagggagaggcagctggcagcaacccctctatgcagcaggcactgttccgggcattacacagctccatcccgtgaggcagaggtgactgttatttgcatcttacagatgaggaaatggaggtgggggtttaaaatccttgcccctgggactaagctggtgcaggtcctgggagcatcagcagtgattgattgagtcacagcctcaccactgcagccagacctgaacttcctcacagctcagcaacacccagcaggtcactgaatgtccccagggcaagtcctctactcactcactattagcgggtgctcagtagaaggcacccgttttccattattttattaactatttcttggctatcgtctctgtgcaggactttgttctacagcagtgacaagagctgccctcgggcaatgtagtgcaaaggttggggtgggagagactaacgagagtcataaagcacctagccggtgagatagtaagtattcaggtaaagaagcagacggggaagtacacaagaggtgcaattttattttatatttttagagacagtttcttgctcttttgcccaggctatagtgcagtggagcgatcagagctcactgcagcctccaactcctgggaccaagcgatcctcccacctcagcctccccccgtagctgggactacaggcatatgccaccatgcccggcttctcagagctgcaattttaaatcgggagatagagaagacctccctgtggaggtggcaggttatcaagataggtgtagagaagaaccttccagtcaaagggaaaaggcaggtcctgctgtgctcaggaatggccagaaatactatcatccccatcttagagacggggacagggccgcaaaagtgtcagggcgtttcctggctcctcaacaaacagctggatccga

SEQ ID NO: 28325 - DNA, 1081 bp, Artificial sequence
  DNA replication origin
ggctcagctacagatgggcgagaccgcagcatagtgggcgcccagcgggaagaaccagggagggacaaagtgagtttgcaggtgctggagaggctctcttcttgatgtcggtgctgaaccagaagtgtgtttaaggagaatttcctaaaattcaaagagttccacgggagtcgcggctaggccggggcgcttcttcagcatctacctgctctaaggcctgaacccccgtcatcagggccacgtttatatggggttcactgtcagccctgcttgtcaggtccagcagcacaatggggaccacacaaaaggcagggcccaggcctggcgcggtggctcaagcctgtaaacccaacacattgggaggccaaagcggttggatcacttgaggtcaggagttcgagaccagcctgaccaacatggtgaaaccccgtctgtaatagaaatacaaaaattagtcgggcatggtggcacgtgcctgtaattacagctactcgaaaggctgaggcgggagaattgcttgaaagatggggcagggggcagcggcagaggttgcagtgagccaaatcgggccattgcactcctggtgagaccggaagggtctctgtgccaggaggaaggcttcctggaggaggcggaccccgctgggcacaagcctgatgagagggaggggcatgcctgtgacatgggtggggagtccagggtggggacgggactgtcacagaggaggagcatgacggggagacagtgccctgggaatcttggcggtggaactccggggaggagctggctggggcggaggtgatgatccaggatgcgggccagcgtaggggtcttggtgggcatgctggggtcggatggagcgcaggagggagaggaggggggacaggtgggtacctgggctggaggcgcggcctgaggtgggcaggttcagggggcgtgacttcatttaggggcagggcctggggctaggctgaagccggcagtgaggaccccgctctcgggtggaattggaggggacccgcggttgggcgcggcagggctcacagggacacccccgttctcctccccagggagaaagtgc

SEQ ID NO: 28326 - DNA, 1200 bp, Artificial sequence
  DNA replication origin
agacgagtggagggggaatgtgtttaatcccagcacatcctttgctgtcctgccctgtgtcgttggtggatggcgagtccgccaggcagcgtcactttttcttgggctccttacaagccaccacctacctctgggccacgccgaggggaggggaatgcttgaagacactcaagcataggagtgtcttcaaacaggaccaagtagtcatcctggggctgtggggcaggcagacaggaggggctgctcagagatccccaggccatgacaggcacccccttcccccagcctagaccacaggaggctctgggccgtggactttcagccactcctgccattgttcactctggggtcaagaagtcttggcccagtccctgctgctatggagctcttttctcagtggctggaggcccagagcagtgaaaaaggtggagagaggaagaggtgctgactccttccccagtggggccatagctagagggtctgctgcctttcagggactctgtgttcagaggaccgagggcagcccagatggtggcaggcagggatcctggcctcaggtggcttgtgtcccatgtcaccaggagcatgagggggcaggagccgtgggttcagggcaggagcttcctgtctcagagctggttctcctggggctgcagaagggaagccgctgacttggggcttgccaaggctgccagggctggcaaggggacggtagcctttggggctggagtggaagagggagggctgctggcaggtcccattagctcgggagatgaggacaagggggacagagcaggaagaggacccctagcttctctgatcagcctgttcctggtgtcaccaatgacctctcccctggaggctgctttacccgctgtaggggcgcatggatcagggcacggtagaagcaggtggtctggggttacagggccaacatgagctgctccttctggaacaaggccttggggtccatctgggggttggccttccactgatgccatgactgccagctcatggtgtgtctcctggcaggttgtgtcaatctgtctggggacactctgtgatacctgggttctcgtcctcttgggttaaaataaattaagtaggcggtgcgcagtggctcacacctgtaatcccagcactttgggaagctgagaggggtggattacctgatgtcaagagttcaagaccagcctggcc

SEQ ID NO: 28327 - DNA, 1024 bp, Artificial sequence
  DNA replication origin
aggaactcctctcacaggcagatcacgtgggctcttagccaacagccagggttggggcaacacaagggccccgcttcatcctgtcccaggcagcaggcaggtaagagacaaggagggagaggcagctggcagcaacccctctatgcagcaggcactgttccgggcattacacagctccatcccgtgaggcagaggtgactgttatttgcatcttacagatgaggaaatggaggtgggggtttaaaatccttgcccctgggactaagctggtgcaggtcctgggagcatcagcagtgattgattgagtcacagcctcaccactgcagccagacctgaacttcctcacagctcagcaacacccagcaggtcactgaatgtccccagggcaagtcctctactcactcactattagcgggtgctcagtagaaggcacccgttttccattattttattaactatttcttggctatcgtctctgtgcaggactttgttctacagcagtgacaagagctgccctcgggcaatgtagtgcaaaggttggggtgggagagactaacgagagtcataaagcacctagccggtgagatagtaagtattcaggtaaagaagcagacggggaagtacacaagaggtgcaattttattttatatttttagagacagtttcttgctcttttgcccaggctatagtgcagtggagcgatcagagctcactgcagcctccaactcctgggaccaagcgatcctcccacctcagcctccccccgtagctgggactacaggcatatgccaccatgcccggcttctcagagctgcaattttaaatcgggagatagagaagacctccctgtggaggtggcaggttatcaagataggtgtagagaagaaccttccagtcaaagggaaaaggcaggtcctgctgtgctcaggaatggccagaaatactatcatccccatcttagagacggggacagggccgcaaaagtgtcagggcgtttcctggctcctcaacaaacagctggatc

SEQ ID NO: 28328 - DNA, 1175 bp, Artificial sequence
  DNA replication origin
aggagcccctgggagcctccatctcccgagtgagcccagcaggactgtgacccgttcggccaggtgtcctacaggggctgctgggctcagctacagatgggcgagaccgcagcatagtgggcgcccagcgggaagaaccagggagggacaaagtgagtttgcaggtggtggagaggctctcttcttgatgtcggtgctgaaccagaagtgtgtttaaggagaatttcctaaaattcaaagagttccacgggagtcgcggctaggccggggcgcttcttcagcatctacctgctctacggcctgaacccccgtcatcagggccacgtttatatggggttcactgtcagccctgcttgtcaggtccagcagcacaatgggggccacacaaaaggcagggcccaggcctggcgcggtggctcaagcctgtaaacccaacacattgggaggccaaagcggttggatcacttgaggtcaggagttcgagaccagcctgaccaacatggtgaaaccccgtctgtaatagaaatacaaaaattagtcgggcatggtggcacgtgcctgtaattacagctactcaaaaggctgaggcgggagaattgcttgaaagatggggcagggggcagcggcagaggttgcagtgagccaaatcgggccattgcactcctggtgagaccggaagggtctctgtgccaggaggaaggcttcctggaggaggcggaccccgctgggcacaagcctgatgagagggaagggcatgcctgtgacatgggtggggagtccagggtggggacgggactgtcacagaggaggagcatgacggggagacagtgccctgggaatcttggcggtggaactccggggaggagctggctggggcggaggtgatgatccaggatgcgggccagcgtaggggtcttggtgggcatgctggggtcggatggagcgcaggagagagaagaggggggacaggtgggtacctgggctggaggcgcggcctgaggtgggcaggtgcagggggcgtgacttcatttaggggcagggcctggggctaggctgaagccggcagtgaggaccccgctctcgggtggaattggaggggacccgcggttgggcgcggcagggctcacagggacacccccgttctcctccccagggagaaagtgctcgtcgtgcac

SEQ ID NO: 28329 - DNA, 1790 bp, Artificial sequence
  DNA replication origin
cagtagctgctggaggctggcgaggcccggaggcggtgcaggaagcctccgaccacgcgggctcctgatcgcgggcgcccacagcgcggacatggcgggctggtggccggcgttgtcgcgcacggcccggcgccacccgtggcccaccaacgtgctgctctacgttgctcgagcaacgtagctctacgctctacgagcgtgccgtagctcgctcgtctccgccggggacgtgctgcagcaacggctgcagggccgctaggccgactggcgccagacgcggcgcgtggccacgttggtggtgaccttccacgccaacttcaactacgtgtggctgggcctgctggagcgcgcgctcccgggccgagcgccgcgcgccatgctggccaagttgctgtgcgaccaggtggtcggtgcgcccatcgcggtctcggccttctacgccggtgaggggccggggggggaacctggggggtgggaccagtattgggggactggaggcagggacttggggatcaagcggctggagggagggcgctgcaggagcctggggacccgggcaggagccggggctctgagaccggagctgcttcagaggcctgaagggccagggcaaaggctggaggctggggtgtttgattgcgagaagttgcaggaggcactggctggggagccgagaaattggggagccagaggtacagcaggtcaggaatttagaggactagggtcggggctcagactctggggttgggtgtaggccaaggctggaggtaggcagggctgcggaggtctttgccccctgaaaaaggcccacgggaaaataaaggagatcccagttcaaggccatagcagctgcaatgaccgtgaaccaatcgtgggacagggaaggaaccgacctgctgttcagaaaatccacgcctggggccccggggccaacacaggaacaaaatgcaaggggacccgtgaccctggggggcagagcaggtggaatctgaggttgggcctggatcttcagcaaattcatgcccaggggcctagtcctgctttggtaacaagattttcccctggggtctcacggaaaacatcaagggaccttggatccttgccatagaggactatatacctgtgagggttcagggaaccctctccttagaaaatccgacccgggcctggggtgtgggggacaggggcttgactgtggaaaccttctctactgcgtacaataagaacaatggaaatgttacctgaaaaataccggggttcattcccttaacgagtcacaaatgactccaccaagaggcgggttttgatcaatgggagttttacttggcacaagaaaggaagacactgggcatattctcccaagtagtgtgtcccccagagaaagagacaggagggttttatggggtgatggagaaaggagagggtgcatgattgcatgtagagtaggggtcccagtgagtcatgatgctagcgcataggttgcataggttatagtcatgaagctatagcttctcccggggtgaagactttagcatggtaatgaggagagttaacttgggttcatctgtaagtaacctggggtcatttaggagctgatttaaacaaacagggtgacctcattccacccagggctggggaagaacaggttgaggtcaggaggctgtaaaacaggctgatcactcaagttggttaaattcttgtaatctttggagatcctccatctgctcacaggagggtccctgtggcctctatcatcattgcaatttctatagccttgaaggggatggggt

SEQ ID NO: 28330 - DNA, 1116 bp, Artificial sequence
  DNA replication origin
ggaaggtcaccaccaacgtggccacgcgccgcgtctggcgccagtcggcctagcggccctgcagccgttgctgcagcacgtccccggcggagacgagcgagctacggcacgctcgtagagcgtagagctacgttgctcgagcaacgtagagcagcacgttggtgggccacgggtggcgccgggccgtgcgcgacaacgccggccaccagcccgccatgtccgcgctgtgggcgcccgcgatcaggagcccgcgtggtcggaggcttcctgcaccgcctccgggcctcgccagcctccagcagctactgcgctgcagcagccggcacctgcacctgcctcctccaggagctcctgagcggttgggcgccccgcgcacacccagctcgtgccgtccaatccggaggccacgggccgtcgtgggggctgaacgtttgaaaggtgcccggcccacccccatgcatgggtccgttgacacaaaatacccagaataggcaaagccacagaggcagaaggcatggggttatttatttatttatttattttatttttattaattaattagatatttttgagacggagtctcgctctgtcgcccaggctggagtgcagtggggcgatctgggctcactgcaacctccgcctcccgggttcaagcgattctcctgcctcagcctcccgagcagctgggactacacgcgtgcgccatcacgcccgactaatttttgtatttttagtggagacggggtttcaatatgttggccaggctggtctcgagtgatctgcccgccgcggcctcccatatggggttattttttggagtgatgaaaacattttgaaattagataggtgtgatggttccatgactttgtgaatatattaaaaaccattgaattgtacacttgaaaaaaggaggtgcatttggccgggtgcggtggcacatgcctgtaatcccagcactttgagagaattagacaggaggatcctttgagggcaggagttccagattagcctggacaaaataggaagaccccatctctacgaaaaaaaaaagaaaaagaaaaagaaaaaagtattgtaattactcagacttggtggtgcgcactgatagtctcagct

SEQ ID NO: 28331 - DNA, 970 bp, Artificial sequence
  DNA replication origin
gccgccatcccatctgggaggtgaggagtgtctctgccaggctgcccatcgtctgagatgtggggagtgcctctgcccggccgcgaccccgtctgggaggtgaggagcgtctgagaagtgaggagaccctctgcctggcgaccgccccgtctgagaagtgaggagcccctccgcccggcagccaccccgtctgggaagtgaagagcgtctccgcccggcagccaccccgtccgggagggaggtgggggtcagcccccccgcccggccagccgccccgtccgggagggaggtgggggagtcagcccccccgcccggccagccgccccacccgggagggaggtggggggatcagtcccccgcccaaccagccgccccacccgggagggaggtgggggggtcagcccccaacccggccagccgccctgtccgggaggtgaggggctactctgcccggccacccctactgggaagtgaggagcccctctgcccggccaccaccccggctgggaggtgtgcccaacagctcattgagaacgggccaggatgacaatggcggttttgtggaatagaaaggggggaaaggtggggaaaagattgagaaatcggatggttgccgtgtctgtgtagaaggaagtagacatgggagacttttcattttgttctgtagtaagaaaaattcttctgccttgggatcctgttgatctgtgaccttaccccaaccctgtgctctctgaaacatgtgctgtgtccactcagggttaaacggattaagggtggtgcaagatgtgctttgttaaacagatgcttgaaggcagcatgctcgttaagagtcatcaccactccctaatctcaagtacccagggacacaaacactgcagaaggccgcagggtcctctgcctaggaaaaccagagacctttgttcacttgtttatctgctgaccttccctccgctattgtcctatgaccctg

SEQ ID NO: 28332 - DNA, 1259 bp, Artificial sequence
  DNA replication origin
agatcaacaggatcccaaggcagaagaatttttcttactacagaacaaaatgaaaagtctcccatgtctacttccttctacacagacacggcaaccatccgatttctcaatcttttccccacctttcccccctttctattccacaaaaccgccattgtcatcctggcccgttctcaatgagctgttgggcacacctcccagccggggtggtggccgggcagaggggctcctcacttcccagtaggggtggccgggcagagtagcccctcacctcccggacagggcggctggccgggttgggggctgacccccccacctccctcccgggtggggcggctggttgggcgggggactgatccccccacctccctcccgggtggggcggctggccgggcgggggggctgactcccccacctccctcccggacggggcggctggccgggcgggggggctgacccccacctccctcccggacggggtggctgccgggcggagacgctcttcacttcccagacggggtggctgccgggcggaggggctcctcacttctcagacggggcggtcgccaggcagagggtctcctcacttctcagacgctcctcacctcccagacggggtcgcggccgggcagaggcactccccacatctcagacgatgggcagcctggcagagacactcctcacctcccagatgggatggcggccgggaagaggcgctcctcacttcctagatgggatggcggccgggcagagaggctcctcactttccagactgggcagccaggcagaggggctcctcacatcccagatgatgggcggccaggcagagacgctcctcacttcccagacggggtggcggccgggcagaggctgcaatctcggcactttgggaggccaaggcaggcggttgagaggtggaggttgtagcgagccgagatcatgccactgcactccagcctgggcaccattgagcactgagtgaacgagactccgtctgcaatcccagcacctcgggaggccgaggctggcggatcactagcggtcaggagctggagaccagcccggccaacacggcgaaaccccgtctccaccaaaaaacacagacggcgcgtgcctgcaatcccaggcacttggcaggctgaggcaggagaatgaggcagggaggttgcagtgagccgagatggtggcagtacagtccagcctcggctcggcatcagagggagactgtggaaagtgggagaggaagggggagggggagg

SEQ ID NO: 28333 - DNA, 929 bp, Artificial sequence
  DNA replication origin
ggcagggaggttgcagtgagccgagatggtggcagtacagtccagcctcggctcggcatcagagggagactgtggaaagtgggagaggaagggggagggggagggagaggacaaaaaattaaaatttagccggacatggttgtgtgtgccagtagtccaagctgctggggagactgaggcaggaggatcacttgagcccaggaacttaaggtctatttaagtaaagggtacagtgagctgtgattataccactgcactccagcctggggaatagagcaagaccctgtctctaaaaaaaggtaacaaaataacatgaatggattccattttaagagaatgaagcatcattgtgtaagactatgaaattggaagcaaagagcatgaagcccaaaaaaaaaaaaaaaaaccatctgaagtcagggtgcctggggtcagaggtagggggaggattgaagaggtgcagatgtaaaaaactgaagctactgtgaccagtggattcgggagttgaaggagtcaagaatgacacattctcctgactggaggataaacaaatatgactgttttcaagaaatagctggaatattctttgtgttcagaagtacaagaacagcacatatggagggcggactgatactgaagttgaagagaagccttctgacgtgcactaactagattctagactcagcttctgtcacaaggagccccaaacagtgactcagcaaaatagcttatttctcatgtgacagttcagaggtgattggtccagggttagggttagacaacaaccgttatgcaaaatcatctagggacccagggctgcgctgtcatgttgctcttgcatccccaaggttgtcatctgtgtggttaaagcggctcaccagccccaagtcctcgttcaagcccatgtaaaaggaagcggaaatacaggg

SEQ ID NO: 28334 - DNA, 954 bp, Artificial sequence
  DNA replication origin
ctgcccggccgcccctactgggaagtgaggagcccctctgcccggccagccgccccgtccgggagggaggtggggggggtcagcccccccgcccggccagccgccccgtccgggaggtgaggggcgcctctgcccggccgcccctactgggaagtgaggagccgctctgcccggccagccgccccgtccgggagggaggtggggggggtcagcccccccgcccggccagccgccccgcccgggaggtgaggggcgcctctgcccggccgcccctactgggaagtgaggagcccctctgcccggccagccgccccgtccgggagggaggttggggggtcagccccccgcccggccagccgccccgtccgggagggaggtggggggggtcagcccccctgcccggcgagccgccccatccgggaggtgaggggcgcctctgcccggccacccctactgggaagtgaggagcccctctgaccggccaccaccccgtctgggaggtgtgcccaacagctcattgagaacgggccaggatgacaatggcggctttgtggaatagaaaggcgggaaaggtggggaaaagattgagaaatcggatggttgccgtgtctgtgtagaaagaagtagacatgggagacttttcattttgttctgcactaagaaaaattcctctgccttgggatcctgttgatctgtgaccttacccccaaccctgtgctctctgaaacatgtgctgtgtccactcagggttaaatggattaagggcggtgcaagatgtgctttgttaaacagatgcttgaaggcagcatgctcgttaagagtcatcaccaatccctaatctcaagtaatcagggacacaaacactgcggaaggccgcagggtcctctgcctaggaaaaccagagacctttgttcacttgtttatctgctgaccttccctccactattgtcccat

SEQ ID NO: 28335 - DNA, 1334 bp, Artificial sequence
  DNA replication origin
ccccacctccctcccggacggggcggctggccgggcagaggggctcctcacttcccagtaggggcggccgggcagaggcgcccctcacctcccggacggggcggctggccgggtgggggggctgacccccccatctccctcccggacggggtggctggccaggctgaggggctcctcacttcccagtaggggcggccgggcagaggcgcccctcacctcccggacggggcggctggccgggtggggggctgaccctcccacctccctcccggacggcatggctggccaggcggggggctgacccccccacctccctcccggatggcacggctggccaggcggaggggctgaccccccacctccctcccggatggggcggctggctgggcggggggctgaccccccccacctccctcccggacggggtggctgccgggcggagacgctcctcacttcccagatggggtggctgccgggcggagacactcctcacttcccagatggggtggctgccgggcggagaggctcctcacttctcagacggggcagctgccgggcggaggggctcctcacttctcagacggggtggttgccaggcagagggtctcctcacttctcagacggggcggccgggcagagacgctcctcacctcccagacggggtctcggccgggcagaggcgctcctcacatcccagatggggcggcggggcagaggcgctccccacatctcagacgatgggcggccgggcagagacgctcctcacttcctagatgtgatggcggctgggaagaggcgctcctcacttcctagatgggatggcggccgggcggagacgctcctcactttccagactgggcagccaggcagaggggctcctcatatcccagacgatgggcggccaggcagagacactcctcacttcccagacggggtggcggccgggcagaggctgcaatctcggcactttgggaggccaaggcaggcggctgggaggtgtaggttgtagtgagccgagatcacgccactgcactccagcctgggcaccattgagcactgagtgaacgagactccgtctgcaatcccggcacctcgggaggccgaggttggcggatcactcgcggttaggggctggagaccggcccggccaacacagcgaaaccccgtctccaccaaaaccagtcaggcgtggcggcgcgtgcctgcaatcgcaggcactcggcaggctgaggcaggagaatcaggcagggaggttgcagtgagccgagatggcagcactacagtccagcttcggctccgcatgagagggagaccgtggggagagggagacggag

SEQ ID NO: 28336 - DNA, 1142 bp, Artificial sequence
  DNA replication origin
aaagtagctgagcgtggtggtgggcgcctgtaatcccagctgctcgggaggctgaggcaggagaatcgcttgaacccgggaggcggaggctgcagtgagccaagatcatgccattgcacaccagcctgggcgacagagcaagactccgtctcaaaaaaaaaaaagaaaagacggctttagcaggagcatggtgaacaccaagcctgatgagaagatggtcaactacctggtcatctggtgtgctgatctagaggtgcaggagaaatgcgccctcatggagcaggtggtccactaggcaattgtcacgcagttcaacctggtgttggtcaggagccggaaggggtcccccgggtctgcttctggcagttcttcactgagattcagacggctgactgctagtgcatggagagcttcaaggacgagctggaagcctccacggagcctgtgcggggctgcgccaagctgcgcgtctagaaagcaggtggagcaggagtactaggaggaggagctcaagaagcagcttggccctgatggcctggaacccgtggaggtgacgagttcccccctgaggaactccaaaagggcttcaatgcgaaggacgcgcaaatgcagcaagatggaccccaccaaggccaagttccccatgcagcagtgtatcgacgccggcctccgggtccccaactctgaggtcagcgaggccaaggagggagaggaggagtgttcagggaccggctgctggaagctgttcccaagacaggcggggatgtcagtgcgtgacccaccccagctgcagctgccacctgtgtgcaagcccctaggcgccccttttcagaaaacaaaaatagacaccatctccccagctcctggcttcctccacttccgctgctccccctagccctgggggcctgccaggccttccctgccctctccccctccccgccctctccactgtccccactctccagcacccattcaagtctctgctttgagtcaagggacttcactgcccacagcgccccatcagcatcatgccaaaggcccaggggcccggggaggggcagaggtcgccaggctggtccgccaggtagaggggagggtccccagccactaggtggctcaggtcaccgggttctgtttccact

SEQ ID NO: 28337 - DNA, 970 bp, Artificial sequence
  DNA replication origin
ttacacgcgtgagccactgcgccccgccgatcttcgtgttttaaatcccgacaccaacgcgcggtaggattcgcgacgcctgcagccaaggtctcagcgcccggttccctcaggcttgtccccgcccccttatggcgcgaaggccactgggagttgtagtctcccagtgtagttagtcggcgcttcccggaagtgacgcgaggacccgccttctctctcggcgtttccgctgtcagggccctgcggtgtgactcgcgggctcagctggttggtattttttgggcctcgtgcttcgtggtgggagacccaggtcgaggtccgggtggggccggtgaggggttgggcgtcgggaggtgttggctcgggcctcttcgcgtggccggtgacgccttggctcccccgcaggtccggccgtagcacctccgcgccgtcgccatgtcgcggtttttcaccaccggttcggacagcgagtccgagtcgtccttgtccggggaggagctcgtcaccaaacctgtcggaggcaactatggcaaacagtgagttgcgggggctgtggctgtgaccattctgggagtgcggggttaggcaggctgtggaacgcagtgcacatgggaggggatggaggtgagggcggggagagtgggtttggacaatgaccagagtttgcaggatcggagcggtgttggagagagacagccttagagggctgtgatagccggtagccacccaccaggcacaagggatagaatcacagaggtttcccaagccagatctgttgcatcagcttcttaactggccttaagtctacagcctctacctgtctcctctcattttaccgccgagaagtccttagtgacttctcactgctcacagaaggaaatgcaaaatgcttgattggtatctgggagccccctgatgcgactctgaagtctggtcacctgctgtgtacgcaggtgcttaaacattttct

SEQ ID NO: 28338 - DNA, 823 bp, Artificial sequence
  DNA replication origin
accccgtctgggaagtgaggagcgtctctgcctggccgcccatcgtctgggatgtgaggagcgtctctgccaggccgcccatcgtctgagatgtggggagtgcctctgcccggccgcgaccccgtctgggaggtgaggagcgtctctgcccggccgccccgtctgagaagtgaggagaccctctgcctggcgaccgccccgtctgagaagtgaggagcccctccgcccggcagccaccctgtccgggagggaggtgggggtaagccccctccaggccagccgccccgtccgggagggaggtgggggggtcagcccccccgcccggccagccgccccgtccgggagggaggtggggggcagccctcacgcagccgccaccccgtccgggaggtgggcacctctgcccggccgccccatctgggaggtgaggagcccctctgcccggccgccaccccgtctgggaggtgtacccaacagctcattgagaatgggccatgatgacgatggcggttttgtcaaatagaaaagggagaaatgtggggaaaagagagagagatcagattgttactgtgcgtgtgtagaaagaagtagacataggagactccattttgttctgtactaagaaaaattcttctgccttgggatgctgttaatctataaccttacccccaaccccgtgctctctgaaacatatgctgtgtccactcagggttaaatggattaagggcggtgcaagatgtgctttgttaaacagatgcttgaaggcagcatgctcgttaagagtcatcaccactccctaatctcaagtacccagggatacaaa

SEQ ID NO: 28339 - DNA, 1688 bp, Artificial sequence
  DNA replication origin
acagcatatgtttcagagagcacggggttgggggtaaggttatagattaacagcatcccaaggcagaagaatttttcttagtacagaacaaaatggagtctcctatgtctacttctttctacacacgcacagtaacaatctgatctctctctcttttccccacatttctcccttttctatttgacaaaaccgccatcgtcatcatggcccattctcaatgagctgttgggtacacctcccagacggggtggcggccgggcagaggggctcctcacctcccagatggggcggccgggcagaggtgcccacctcccggacggggtggcggctgcgtgagggctgccccccacctccctcccggacggggcggctggccgggcgggggggctgacccccccacctccctcccggacggggcggctggcctggagggggcttacccccacctccctcccggacagggtggctgccgggcggaggggctcctcacttctcagacggggcggtcgccaggcagagggtctcctcacttctcagacggggcggccgggcagagacgctcctcacctcccagacggggtcgcggccgggcagaggcactccccacatctcagacgatgggcggcctggcagagacgctcctcacatcccagacgatgggcggccaggcagagacgctcctcacttcccagacggggtggcggccgggcagaggctgcaatctcggcactttgggaggccaaggcaggcggttgggaggtggaggttgtagcgagccgagatcacggcactgcactccagcctgggcaccattgagcactgagtgaacgagactccgtctgcaatcccagcacctcgggaggccgaggctggtggatcactagcggttaggagctggagaccggcccggccaacacagcgaaaccccgtctccaccaaaaaaatacgaaaaccagtcaggcgtggcggcgcgcgcctgcaatcacaggcactcggcaggctgaggcaggagaatgaggcagggaggttgcagtgagccaagatggcagcagtacagtccagcttcggctcggcatcagagggagaccgtggaaagagggggagagggagactgtggggagggagagggagagggagagcctgtttctaataaatatacaaaatcagcaaggcatggtggcacgcacctataatcccagctacttgggagggtgcagcaggagaatcgcttgaacccaggaggcagaggttgcagtgagctgagatcgtgctattgcactccagcctgggcaacgagagtgaaactccatctcaaaaaaaaaaaaaaaaaaacacgaaaataaaacggcatttagagttgaaagcttcgccttcctctctggatggtgagtcctcactctcccagcagcccacacctctgcctcaaacctccatagctcccaagagtctggataaagctaaggagtctcaacgcaccccaagtcctgggggtagtcaacccctctcacccctccctcatcctctcacacaagagttgtttactgttcctccagttatgcctggtcacgcagacactctgctgctcaagtgccctcaccccatcctcagcctgctcccaggccacctccctccagaatccaccctgcctgccaggtggccatagggaccctcgccatactgtctgcttg

SEQ ID NO: 28340 - DNA, 1095 bp, Artificial sequence
  DNA replication origin
cgccggctgctggggaagcggcgggcgcccagtgcctggaggtcgctccctcgcctcctctggctgcgggaacggagaggcggcggcggccggagcagggtgggcggcctgagccgagagcccggccggcccccgcgaggaatatggcgacctgcggcgaccggagcagcagcggcgtcagttgctgcaccgccgacttcttggagcagcgaaagcgactcgcgagaagacgccgccaagtggaacccgggccctgcggccctgggagggggcagcagcgacacagccatgaagccccgggcgcggcgctgggcgccaacgagagccacggcaacctccagacggcgccacagcaacctctaggcagtgcccacaccagcctacaggtggcgcccctcgcactgcacctgccgcggccgccccgggtgtgaactgcgctgtcagcagggccgcgctgacacgggtggcccaggcccgcagcagccgaggagcccaggggcactgcccggggtgacgagaaggagaagacggtgccccagaaaaaggcaagagctcagagctcgggtccccgtgccaggaatggccaggagcagaagatggagaggtggagatggagaaggagaagcagcaggtgggaaggagcggcgctccaccggtggggtcaacatgcgctggctgagcttagagtatgaagaggatgaagcaagtcagaaagagcggaaacgagaaggtgcaatgacacagcagagcacaatgcagaatccagccctaggactccaataaaggctgggtttaattccaactcacaccctcccacccctaatcagagaggatcacaggagagagaggacccaaggaacactggaacctgaaggacaggaatctgaggccaagactgattgctggaaattgtgggaatcaggaaaggagaaactgaggcagaatggggggatggagggtggtggtggggggcagtgagctgggttaggaaggattagaaatcagaaccctaggaaggatccagaaaggaactgtccttaagaaggtgcatgctgcggctgggtactgtggctcacgcctgtaatcccagcacct

SEQ ID NO: 28341 - DNA, 916 bp, Artificial sequence
  DNA replication origin
gtctgagatgtggggagtgcctctgcccggccgcgaccccgtctgggaggtgaggagcgtctgagaagtgaggagaccctctgcctggcgaccgccccgtctgagaagtgaggagcccctccgcccggcagccgcctcgtctgagaagtgaggagcccctccgcccggcagccaccccgtctgggaagtgaagagtgtctccgcccggcagccaccccgtccgggagggaggtgggggtcagcccccccgcccggccagccgccccgtccgggagggaggtgggggagtcagcccccccgcccggccagccgccccacccgggagggaggtggggggatcagtcccccgcccaaccagccgccccacccgggagggaggtgggggggtcagcccccaacccggccagccgccctgtccgggaggtgaggggtgactctgcccggccacccctactgggaagtgaggagcccctctgcccggccgccaccccggctgggaggtgtgcccaacagctcattgagaacgggccatgatgacagtggcggttttgtggaatagaaaggggggaaaggtggggaaaagattgagaaatcggatggttgccgtgtctgtgtagaaggaagtagacatgggagacttttcattttgttctgtagtaagaaaaattcttctgccttgggatcctgttgatctgtgaccttaccccaaccctgtgctctctgaaacatgtgctgtgtccactcagggttaaacggattaagggtggtgcaagatgtgctttgttaaacagatgcttgaaggcagcatgctcgttaagagtcatcaccactccctaatctcaagtacccagggacacaaacactgcggaaggccgcagggtcctctgcctaggaaaaccagagacctttgttcact

SEQ ID NO: 28342 - DNA, 1248 bp, Artificial sequence
  DNA replication origin
tttttcttactacagaacaaaatgaaaagtctcccatgtctacttccttctacacagacacggcaaccatccgatttctcaatcttttccccacctttcccccctttctattccacaaaaccgccactgtcatcatggcccgttctcaatgagctgttgggcacacctcccagccggggtggcggccgggcagaggggctcctcacttcccagtaggggtggccgggcagagtcacccctcacctcccggacagggcggctggccgggttgggggctgacccccccacctccctcccgggtggggcggctggttgggcgggggactgatccccccacctccctcccgggtggggcggctggccgggcgggggggctgactcccccacctccctcccggacggggcggctggccgggcgggggggctgacccccacctccctcccggacggggtggctgccgggcggagacactcttcacttcccagacggggtggctgccgggcggaggggctcctcacttctcagacgaggcggctgccgggcggaggggctcctcacttctcagacggggcggtcgccaggcagagggtctcctcacttctcagacgctcctcacctcccagacggggtcgcggccgggcagaggcactccccacatctcagacgatgggcagcctggcagagacactcctcacctaccagatgggatggcggccgggaagaggcgctcctcacttcctagatgggatggcggccgggcagagaggctcctcactttccagactgggcagccaggcagaggggctcctcacatcccagatgatgggcggccaggcagagacgctcctcacttcccagacggggtggcggccgggcagaggctgcaatctcggcactttgggaggccaaggcaggcggttgagaggtggaggttgtagcgagccgagatcatgccactgcactccagcctgggcaccattgagcactgagtgaacgagactccgtctgcaatcccagcacctcgggaggccgaggctggcggatcactagcggtcaggagctggagaccagcccggccaacacggcgaaaccccgtctccaccaaaaaacacagacggcgcgtgcctgcaatcccaggcacttggcaggctgaggcaggagaatgaggcagggaggttgcagtgagccgagatggtggcagtacagtccagcctcggctcggcatcagagggagactgtggaaagtg

SEQ ID NO: 28343 - DNA, 1002 bp, Artificial sequence
  DNA replication origin
gcgtgcctgcaatcccaggcacttggcaggctgaggcaggagaatgaggcagggaggttgcagtgagccgagatggtggcagtacagtccagcctcggctcggcatcagagggagactgtggaaagtgagagaggaagggggagggggagggagaggacaaaaaattaaaatttagccggacatggttgtgtgtgccagtagtccaagctgctggggagactgaggcaggaggatcacttgagcccaggaacttaaggtctatttaagtaaagggtacagtgagctgtgattataccactgcactccagcctggggaatagagcaagaccctgtctctaaaaaaaggtaacaaaataacatgaatggattccattttaagagaatgaagcatcattgtgtaagactatgaaattggaagcaaagagcatgaagcccaaaaaaaaaaaaaaaaccatctgaagtcagggtgcctggggtcagaggtggggggaggattgaagaggtgcagatgtaaaaaactgaagctactgtgaccagtggattcgggagttgaaggagtcaagaatgacacattctcctgactggaggataaacaaatatgactgttttcaagaaatagctggaatattctttgtgttcagaagtacaagaacagcacatatggagggcggactgatactgaagttgaagagaagccttctgatgtgcactaactagattctagactcagcttctgtcacaaggagccccaaacagtgactcagcaaaatagcttatttctcatgtgacagttcagaggtgattggtccagggttagggttagacaacaaccgttatgcaaaatcatctagggacccagggctgcgctgtcatgttgctcttgcatccccaaggttgtcatctgtgtggttaaagcggctcaccagccccaagtcctcgttcaagcccatgtaaaaggaagcggaaatacagggcctggaaattacactgatcccattggc

SEQ ID NO: 28344 - DNA, 1548 bp, Artificial sequence
  DNA replication origin
gccggggcccgccgtgggcgggcggggggagccccgcggtgtcgggggtggagagagaagaccgcggcgcgaggaagcgccgcgaggcggaaggggagggggtctcgcggctggaggaaagcgagagggcgcgagccgggctggcgcgcgtgcgcgtcgccggggagcggagagggaggagcgcgcgggtgggagctcccggggggggggggggggggggggggccaggagcgagcagtggcgcgaggtgccgcgcacaccggcgcggttagctcccggcgggaaagtgggagagaatcaagtcggtgaacctcgcacccctagccctgggagtgggtaaggagcggcgcgggcgctcacgcgcgccaaggatttagggtcttaaggtctcaaaccgccttagaagccggcggccgctgtcgcttcacaatgagcgtgtgaggcgcagggggaggagccgaaggcgccagaggaagggccggcctctccgcccacgccgtcgctgcgtcgcgatgcctccgcgggagtgtgaggcggcacgtcgtgcgtgaggctcttccgccacttggcggcccgtgggcagagccttaagtgccaagaaagtctccgggactggaccacccgagccactgcgcttttaggcaggtggtaggtttcgcaaggagctaccctccaccttgtttgctttaagtaaaagactgatgagcattagtgattcgtttgagcgtgttgatctttgcagataaatttacgcctcgtcctaaattatttcagatttttgtgattttgacctaaattgttcctccatgcccgagaatgaatctttaaactgtaataacaaagactgaaggccaaagttccgagttcaaaatcctccacccgaccctgcaatgaaggcagcttcattcattcaaaatgagttgggcattggagtattcagttagttgttttggacacaaggataattaaactgcttcctgctctggaggagttcatgctagtggtgaattcagagaatttgacgagatctagtaggtgaagcacagaggactacaagagcaaatgggagtgacacctaatcttaatccagttttgggagacccagataagggacaggagggccgggcgcagtggctcatacctgtaatcctaacattttgggagtccgaggcagaaggatcgtttaaggccaggagtttgagaccagcctaggcaacaaagtgagactttgtctctacaaaaaaaaaaaaatttaaattataaaaaaaaactgataagagggcagggggagatgggtttctaggcagggaaataggatatgacaaactaagaaaaactcagcttgtcctaagcataaaattaaaggggggaagaggtagctaatctgggatcaggttttaaaggctcccaagtcttgtaagagacacggacattatcctcaaagcagtggggagcttatttaagaaagtgaaaagaggctgggcatggtctgtaatcccagtactttgggaggtttgaggtcaggagtttgagatcagcctggccaac

SEQ ID NO: 28345 - DNA, 1494 bp, Artificial sequence
  DNA replication origin
cgctgccgggagcgggctccgccggggagccgaaggcatcttggcgccgcagccgccgccgccgcagcaacaccaggagaggccgggggcagccgccatcggcagcgccaggtgagaagggtgggctccgggcgagggagccgcggccacccagaggctgtggctcggttccggtggggcggaccccgacccggcaccgtcaggggcaccggctgggtggggagtccccgtgaagctgggggagggccccctcaggtccgaacaggtcggacggaaagggtccccgggcggccaccggagcactgaggggccgcgctcggctctcggggcctagtcagggctcgcagccccggccttcaggggaggcggggcgcatcccgccggcgccgtcggaacggggagttgggggggggcaaggagctgatcggggtccccggttccattaccacgaagggtctcgcggtccccggcttcagccaatggggagtctgctgcgggaaggggtccccggccgtagccaatggaggggggcgcgcggcccacagtttggccaatggggagggagggacttgggagcgggttgctgcctcccccttcccggtctggccagtaggaggggagcgaggtgggcggggggacggaaggagggatgactgggaggactgcgggccgggagcctctggcgcgcgcgcccccttcccgtacgtgcgcgtggatgctcggtctcatgacccgggcattcgcgcgccccgggaacacctagggcagggactagttcgtggaggggctcgtctggtggcagtgcatgagtagtggaggccctgctcagtttttcctgtgcgagtgtgtgtgtgttaatggaattaagagtggcagcacacgcaggcgcagtgggctctgatcgctggaggtgggggttcggaaagtcccgtgggttttagtgcgcaggcgcagaccgggcgaggcctcccggtggatggcttttgcggctgcgctgtcccccagccccgccagcggccccctcttcgccctcaaccgccggttacatcagccagcgacgagcagggttacctggcgattggtgatccccgcagagtgggtaacgggctgaatgagtcatgaggtcgaggggatggggtgtggaggggatacccctcctcccacagttttgaggcgtcaggctgctgaaaatgattgtcttttctgtttgggaggtaatgtacctgagctaggtagttccaaagctgcactcctggagcttttgccctcacagctggcgtggctttttggttaatactgtagcattgatctgttggtagcctgcagccctagcccctttctcgttggttcttagagcaattgacaaccattgttgattgagatctttttgctggcatttggaggaaatgtgtttgctggcttattaatgtctatttttttcttcctctacaaggtgacagtttgaaaatcttatttattggccgggcgcagtgg

SEQ ID NO: 28346 - DNA, 712 bp, Artificial sequence
  DNA replication origin
tgatgctgctggggaggggaaggttgagtgccacacaggccagcaactcgctggcccccagtcctcgccactcagaaatgacccctagctctatcccttcttctggccacccattcctgcaccaggaccactcagcaccccccatggcaggcacctggacaggactgggggccgcatgctgggactgcggctggcttccagtaggcgtggtagccggctgcggctggtgggcatggagctgtgtggcatggtgtgggtaggactggtgaacagtggctgcagcaggaaagagggagaaccagtgctgagcacaccagagggggctggcacacagcccagagcagagggaccaggcgcaggactcaccataaagggcttggggggtaggctgctctgcagaagggtactgaggggtagaggatgacacgatggcctggggatggctgcccgacgtcagcatgcgtgggttgctctgaagcatgggggcaaacaccggctggcgggacagagagaggagtggttggcacagccgccagctgggaaggtgtcctcctgccagtcactgcgtgcacagcaccgcttgggcctcctcacaatcaccctattgattcaacattcataacgatcccacccagcagacactattttctctacacttcagagatacagatgtccaatgccttgttacaggtaccaccagagccagggctca

SEQ ID NO: 28347 - DNA, 648 bp, Artificial sequence
  DNA replication origin
gacagctgggctcttacctgggtaacatgggccatgttggtgaagccgtggggcagctgctggtggtggatggcatacacagcggctggctgggggaagctgctctgaggggactgggcagaaggtcccggtggcagagagggcggcgtgcctgtcagggcccctgggtggtacagattctgctgtggctgtccactgcccaagtgtggggcctgccccgcctgatgctgctggggaggggaaggttgagtgccacacaggccagcaactcgctggcccccagtcctcgccactcagaaatgacccctagctctatcccttcttctggccacccattcctgcaccaggaccactcagcaccccccatggcaggcacctggacaggactgggggccgcatgctgggactgcggctggcttccagtaggcgtggtagccggctgcggctggtgggcatggagctgtgtggcatggtgtgggtaggactggtgaacagtggctgcagcaggaaagagggagaaccagtgctgagcacaccagagggggctggcacacagcccagagcagagggaccaggcgcaggactcaccataaagggcttggggggtaggctgctctgcagaagggtactgaggggtagaggatgaca

SEQ ID NO: 28348 - DNA, 1120 bp, Artificial sequence
  DNA replication origin
caaaagactgacagctgtcaccccactctagtctccaaggaggaaactccaggcaggttaagttagtttaaaattttattttttttatttattttttaatatttttatgtaataaaaagtaaaagtccttgtccagccatcctcgtggggcatctgtctgtctctcacacaggtcactcaagttaatgggaaagaaagaacagggggcccaagtctgaagttataaataatagaaaataaaagatcttccgtctccagcgggggaatagatgagaggatgggagggcaagactgggtggggacgggcaggggcagagcaggaaccccccacccctgctggaccctggccctgccctctgtgaggcccctcccattcaaggtgcttggcaggaattccccagctcccctggggaacggggggatggggggctgggagtggtccgagctgctgggggaagagacatagatcactcttccctccactcatggaggtctcaggtcgcggccaggacaatcttcagttccccggggggtggaaggggagctgctgggagggatgagattgaactggttggaggggaaagagaagagagcaggagcattagaacccaagcagctgtcccttcctccaatgccgtccagtgggggcgtgggggtgtgtctgggaaggagcggcctcctcaaggtgtctcgggggctgtcagaagcacaggtcaatcgctgtttcccagtaagccagagccctcactcatgtgcccagctcagccccccacaccccagtctggccctgtctgctgcactgaccttacctcggctaagtcaggagacagtcggggtcactgagagctggggaggcagtggggaggggggctgctggatcacaactgagcgaggacggagggaagcaaaggacagagccaggagcaagcccctggcggcggcgactgtggcttctgcccaccctacatacttcacagacaggtgcaggtcggcgggcgccctgtgggacagccctgcctccaagacccctcactccccacccagaacccgtgcatcctgccccacctgcagcccctcagctcttccatgccaaattcccccagctaatgagaactcacga

SEQ ID NO: 28349 - DNA, 1757 bp, Artificial sequence
  DNA replication origin
tttcctccgggaggacgctctggtgggatccaagcacttcccccgctgcgtctgtggtcgcttttaggtgcaactggagaaggcactgaagccctacgagattcacaccgtcttcggtctcctggggtcggcgccgagtgggaggatggcggaagtaagtatgaaggtgcccttccctcccgccgctgttctctatggtctcttccttcagcgacgggaaagggggtcctgacgcctgcgcggaaccgggctgggcgctcgtcgcgtagtgggtgggggcgcagggagcgggagccgccgccgccgccgccgccgccggagctaacctcggggaccgagatgcaggtgggaccggaaccggaacccccctcttcaagtaccttttccctctccgcgacccggccctggcgcccgagaggattcctgggtgggggtgggcgtggagggccgggggctggagaggcactcggccccggagagtgcagcagacagggctggtcccgaggtggatgcggccccggaaaatgggcggctggggggtgtccagggagtagggtcggatcggagtatatggaccaccgggcccggagggtccgagccgagagcggagcctgcaccctccacctcccgcccttcgggaaatatcagaactgagccaggaggcaggtgcaccgggaaaatgtgtctgagtcctgcttggcagaagagaaactgagtcaccagcttaggagtcgcagggtcagcgggcctgaagggggctgggtctgtctgcggtgcggaggattgggtgggcctgtgtgagccgaggtggccgctggctggagattggtttgcacttcttggctgggttcccccgtgctccatgactcctgcatctcctgattgtttctcgttggtttggagttgtccctgcggttggagccatctgagcttgtagggtcgaggcccaggaggaaggggagggttcaccgacttacagcctggctgtaggtttgaacaggagtctgaggtcgctgagggtttggggaggctttcctgagctgctctggccccagtcctggggctgtcaccttccagtattgcgtggcgggaggagcgctaacaagagccaagggttgtaaattccacacccagctctgccactttctagttgtaagaccttgagagggctcctcctttctctaatttctattttagaaaattggaacaataatattcttctcccacatgaagatagtaacaatggcagtcgttcagcggatgcttactttgcgttcagcgctgacataccccattccatgtaattctctcaacatttcgaggggagggatcattagctttgtttaacagatagaaaaacggaggctcagagaggacgtggaatttgttcaagataacatcgctcataaggtggctggactgggtgctcataaggtggtttgagccctggtctgactcaagtccatggccttaaccagaaggctaacctgcctttagggcatactccccagtgggagaagaggaaggtgaaaaatcctagggccccagctctccctgtgatgttttgtttacgtgaggccagcaaagacttgacctgagccaacccagtttctcctctggggcccctgcggcctctggccccagactgaagggataccaaagaagtgggctgtagctatttcacatctccttcacgcagtgcgtgggtgctggactctggggtcagctttcaagacaattactgttttggtccatca

SEQ ID NO: 28350 - DNA, 914 bp, Artificial sequence
  DNA replication origin
ggactgagcctcggacagagcgacccactgaacgcagggaaaagcgcttcttgagcttcggcttggaggaggttgtagaggaggaagagactgaggaagggagggggccggccaggtcctcagatgatcgagaagggcccagcacagccaggggcccacccaccctgcagctctcaagggacaggtcatgtggcgaaatctccgcaccagggctcaggggagccaggatgggtggcgacagggagccagaggcccgggccacctcggcttcaaagtgctgcaggaagagctcagcaaaacggcgggagaaggcagcctcggccccgggccccgcatattgggggtgggaggccaggtagaggcgaaaacggcgggcaaagtccagagccgcagcccgggcgtgggactcacagaactcccgccaactagggggcgggggtgggggcagcgggggagacgagggggaggccccgtcctctggggaaggggcaccattcatgatgggccccaggaggtggagagggggagcctgtggggcacaaagagggaggcagccagaagacgaggggtgggcggcagcagctgcgaaaggaagagagaggcacacacgagggtcactgctgagggcgcaccggaggctgcatcccacccccagccagagacgtccgaccctacttcagactccgcagagagcaatggggaagggagcccaacacctcccttccctctcccagatcctggcaccctgcaggccccagccaactggctccccagcgtctaacctgccccgagcctgccacatttgcccccactttccttagctttggatccagcagtagagggctttggagcaccttccccctaaaaaagggaacttttccagatcaccccccctctacatcggatcctccaat

SEQ ID NO: 28351 - DNA, 1621 bp, Artificial sequence
  DNA replication origin
tccatccccggcctcacctgtccctttcctcacaccccccttcctgcctcatctgcccggagcctgtttccattgccgcagtctccttcctcctcaccccatttgctgaagcagtggcagagataccccaagcctttgggggactgatgaagggagaacatcttttgggggctagaggaagtgagtggctcctagagggacaaggggaagtgaggggagagagtcaaggggacagggccgaagatggtaaccctaccctagggaggggttgccacagccatcaacaagggatttagtgtccaggccctggtgagcaaagccagcactgcctgtctctccccaaaactgcccccccccttccccatcgctctaactcagcctctgggaacagagccctgagggcccccccatcctggatagggaatccccaccccacccccaagaaaatgggacaccaaggcagccaagtaacccaagaggctacagaatgtgctgatggcagagggggaggggtaactgtctcaggatgggggcaggggtcaccccaagtcgtgcactgagggtcacctcatcccacactgtgctctaaccaacggggtttctgtggccagccccagaggcctgtggtctgcgctgcactctgccctgctgcatctgtccacgaggggaacaggatcaggcccatgctgtgtgcgtgcaggagctaggcagaccccacagaaaggtgtcggggcctggggaagctggaccaagcaggggctccagaccaaaggaatggggaagggtggacttctggggacaggtctgggggaaataaggacagatgtctagacctagggggaaagggagcagagacacagagccaccagggtcagagggaagtccgagcagcagtggggaagagggacagcagggagccaggtgggcggggaccccggcgctgggtgcaaagccacaagttgttgctgaatgctggccttggtgtcagcttcctcagagaagcagctgctctgagctgcccctccccacccctgctccaggatgggggcgtctcttggttaccaccagggcagctgctggaggagccgagggagggtaccaggggtgcaggaaggggaggacaggcaggcagaaaggctggatgagagtcagggtgaaaggtcagtgaggggaaggggcctggtgccctgggctcaagtccgtcctctgtctaggcctgtttcctgaaatgagcagaggcatgtggacttcctaagtgtggcttcttaaggctgctttccattctggggctcaaactccgaagcagaggacagaataggagacagcagagcaaagaaaagggaggcccccacttttggggagggggatggcagcaggggtggatggaacttgagggttcagcctcccagatgcatcccttctgcctggacttgggtgaggcgcggcctcctgggtgagttgaggacaaggtgctccttcctgcctccttttcacagttccaacaaacccctcccctgaagcagaatcctgctgtgacctgaggggagtgggggacagtgggctgaattgggggtgcaggagagcattagcagcctctcttccaagagacacagcccccggc

SEQ ID NO: 28352 - DNA, 1007 bp, Artificial sequence
  DNA replication origin
tagacatctgtccttatttcccccagacctgtccccagaagtccacccttccccattcctttggtctggagcccctgcttggtccagcttccccaggccccgacacctttctgtggggtctgcctagctcctgcacgcacacagcatgggcctgatcctgttcccctcgtggacagatgcagcagggcagagtgcagcgcagaccacaggcctctggggctggccacagaaaccccgttggttagagcacagtgtgggatgaggtgaccctcagtgcacgacttggggtgacccctgcccccatcctgagacagttacccctccccctctgccatcagcacattctgtagcctcttgggttacttggctgccttggtgtcccattttcttgggggtggggtggggattccctatccaggatgggggggccctcagggctctgttcccagaggctgagttagagcgatggggaagggggggggcagttttggggagagacaggcagtgctggctttgctcaccagggcctggacactaaatcccttgttgatggctgtggcaacccctccctagggtagggttaccatcttcggccctgtccccttgactctctcccctcacttccccttgtccctctaggagccactcacttcctctagcccccaaaagatgttctcccttcatcagtcccccaaaggcttggggtatctctgccactgcttcagcaaatggggtgaggaggaaggagactgcggcaatggaaacaggctccgggcagatgaggcaggaaggggggtgtgaggaaagggacaggtgaggccggggatggaagagggctccgggaagaactggggggatgagtttggaatgggaaattcaatgcagctggggaagtcgaggcaatgggggggcagggtcagtagcagatgacagaaagtgaagtctctccctaccccacttccctggggctggggctacctttgcgtccctcatgagtgacatctcag

SEQ ID NO: 28353 - DNA, 840 bp, Artificial sequence
  DNA replication origin
caaaggcttggggtatctctgccactgcttcagcaaatggggtgaggaggaaggagactgcggcaatggaaacaggctccgggcagatgaggcaggaaggggggtgtgaggaaagggacaggtgaggccggggatggaagagggctccgggaagaactggggggatgagtttggaatgggaaattcaatgcagctggggaagtcgaggcaatgggggggcagggtcagtagcagatgacagaaagtgaagtctctccctaccccacttccctggggctggggctacctttgcgtccctcatgagtgacatctcaggctgcagccccactgttccccctctgtcagcagaaatatctctcttttctgaccacctcctgctggagtctcagccagccaatccctgatctggtggaggggggagcccggcctccccctgctccctcataaggaccagctgggggccggggggtggccggctgctcaagtgggacgggggtcagagctttgtggagggaagaaaaacctggagggggcaggagagtaaaaagaagaaacccaggcagacaggcagttggacacactgaggaagaccccccacgagtgggaaccccctggaaggaacacaccggccccggcccccaggaagggagcacaatggaggccgctcatgctaaaaccacggaggaatgtttggcctattttggggtgagtgagaccacgggcctcaccccggaccaagttaagcggaatctggagaaatacggcctcaatggtaagtgtcccttggaagagcggctggtaattaatgccctcctgcacccccaaaacacacgcacacgc

SEQ ID NO: 28354 - DNA, 1379 bp, Artificial sequence
  DNA replication origin
cgttgcctccagagtccccagcgaggctcacatgctgcggaagaacccgcgacatgcagatggaccgcgggatggggagtagcccccagggcgggagaggaggcagagccctggagatgccctgcgggggtgggggtgcctagggagcgcggggaagggctaaggccaggctgggcgggtaatgagggatgccagtgccctccctgaccgggcgccgggctccttggagtcatcatcacaccgccgcgctttcccgccactaggagcgagtcctcccctcgaccaatcagcgtcaggaggctggggagggcggggcaggggcgccgacgggcgcggggattggtggagcggccgtccgcccggcgcatgccgggagtggcagtggccccccgcgccgcagccggcatcgcggcgggacccggagcccggagttcgggtgggtaacccgagctctccaagctcttgaagccgcgagggtggcttagcttcggtgttttggctgagaacacccttaaagcttaaaataaaacctgcctctggggtgcaggggaggagagaggaggacgcgaatcacacccgctgctgcgcgccagcccgccccgtctgtacaatgggatgctcgggactcggacgggaggatccagtgactgcgagccccgcattcgcccgatcccagcctcacacccccagccagcccccagagaccctcccacacttacgaaggaaatgcatgcggccaggaggagaatccgcaccaggaggtcttcaaactgctctatcaccagctcccacagggtcttccctgggggaggaggcaaggggagggccccgggttaaggtctagtgggtgaaggtctgggatggagcgccctggactccggcctgcagtggggaggctctagggtggtgggcagacagcttggtgcccagagaagggctaagaagctcgcctggagtccagaaacagactcggcaaagtggggggcagttcaagggttggctgcttcaaggagaaagcgcctgggagacttctgccccggacaggactctaacctttagggagggagatttgccttttgggaagggatatttgctcaaagaatctaaagaggcagggaggagggagtgggacagggcggggtggggggtggtcatttatgagagttcagggattccagtaacttaccttcctcagcagggagctctacccaggaaaaagaagaaaaggacagattcatttggggttcagcctcatgccccccacacccaagactttgtggctaagagaatcaggccaccttgaggttcatcaagttcatcccattaaaacctcccaaaactctggatctcgggactctgttttctcagtatcttcttcc

SEQ ID NO: 28355 - DNA, 986 bp, Artificial sequence
  DNA replication origin
ccggtcagggagggcactggcatccctcattacccgcccagcctggccttagcccttccccgcgctccctaggcacccccacccccgcagggcatctccagggctctgcctcctctcccgccctgggggctactccccatcccgcggtccatctgcatgtcgcgggttcttccgcagcatgtgagcctcgctggggactctggaggcaacgaaagcctccctgtgccttggtctccgaacgcaggccccgtcgcgttaagcacaagctggcagggcctctcctctcccttctcagatttgctccttgacatttgcctgctgcctggcggtggcaacagctggggcggggcgcgcgcaggaggccccgtaaccctatccccgctccggctccctcgtgaaaccggagcttccctgccttggccgagggggagggctgcgggggccagaccgcctgcgaagaccacagggtttttcctctcgggttttggctcccgtgggatggatgtggctgtgcggggggttggcctgagcttcgcttctaagccagcagcttggtcagggaaacctgaaagcattcccagctaatcccccaagtggtgcaagtctgtgcgcgcccatcccgctgagtaaggcggtggcaggacctgcagtggatggacagaccctcagacggatgtggggccacagcgccccgacggtgcccggccctcctgctggctcctgcactctcctgcacagttctcccctttgcagtggtccacttcctttctccatctgttttggggcctcattacctgtcattctcctttcccctgctccccaggtgctggcctggtttgaggaaggtgaagagaccatcactgcctttgttgaaccctttgtcatcctcttgatcctcattgccaatgccatcgtgggggtttggcaggttagcgttgacccttccttaccccttcatgtcccaacagtgaagaagaggccaaccc

SEQ ID NO: 28356 - DNA, 1107 bp, Artificial sequence
  DNA replication origin
gtgatggggcgctggggtcttcagcctgccctcactccctctgcccaagctccctggggtggtgattcggatgtctgctacagggaaggaggcctctgaagagccattccccctggcaggggcctggagcttcgggaaggcctgctcagggcaaacataaaaaccgctgaagggggcagaatcccagtaatcttagccacccggcccccacccctccctggccaggcattaagtgtcccttgccgcgggcggggccctccttgagctccctcctccccggtcgcgtgctctgtgccaggcctgagtttcccttacatggtcgggggctcgagccttcggcctccctcctcccttctgccctcgctccttcccctttgagaggcctcaagggcacagagaggtcaagactgaaagctgaccaagcttggggtgggtggaaggagggggaagccaggcccgggagggggtggagacggggccattggcagggaccgggttccacctgttgcctgcgagtgcaagtgcagggtgagaggatggggagcagggggtctgcctgcagcctcagggacaggactggctgttcctgctgagactccgctggggagggggggatgtggccggagtggcctgggatgaccttctgaggagtcggaaagagaagcagactccgtcatcctcctggacacctggatccgagcctgaccagcccccggcatctcctaggcctcagccccaaggcctcccatcctggaccagccgtccctgtcactcaccagccacctccacgatgtccccagggacgatgtcccgagccttgatcctttgcactgacttgcggtcagcccggtagaccttccccatctctggctcatactccttcagggcctcgatggcgttctctgcgttccgctcctgaggagacagggtggaggaggcagggttatacacaggaggcagagttatggagttgtggctcctggcacgggggaggcaacaaaaccccacacaggcaggggtgtgtgtatgttgaggaaactgtcacctacaggtgaaaacaggtgagagggttttggggagggaacaaagaagaatcaaagaaaatca

SEQ ID NO: 28357 - DNA, 896 bp, Artificial sequence
  DNA replication origin
tggatggtggtcagagtgagctgtctggctggggcacaagggtcctctctgatcccgttcatggcagacaggatggcgttctactgccctttgagcattttgcaggcccagatgagaagccagcagtgatgaagggagacctctatctttggagggcccatttaacccccacaggcagccttctgactgagcgcgctgcccacactgctcctgaccttgcagacagacatctggttggtggtgagggtgcctgtcttgtcggaacagatgacagaggtgcagcccagggtctctacggagggcaagcttcttacaatggcattcttctttgccatccgacgggtacccagggccaggcaggtggtgatgactgcaggaagacctgtggggagggagggagggtgtgagggaacctgcaaggggagggtgtgagggaacctgcaaggggctaaatagtagcccccagctgggcacgttggtgcacacctataatcctagcactttgggaggctgaggcgggaggatcacttgaggccaggagtttgagaccagcctggaaaacacagtgagactcctctgaaaatatttaaaaattagctgggtgtggtggtgattgcctgtggtaccagttacccaggaggctgggacaagaggattgtttgaatccaggagttcgagattacagtgagttatgattgtgctaccacactccagcctgggcaacaagagtgagactctgtctctattaaacaaacaaacaataatggtccgcaaagataccagatcctaatccctggagcctgtaaatgttaccttacttggaaaaggggtctttgggccaggcgtggtggctcacacctgtaaccccagcactttgggaggccgaggcgggtgga

SEQ ID NO: 28358 - DNA, 888 bp, Artificial sequence
  DNA replication origin
cagtggaggatgtgggcagtggcctcaggggagggtggtgggtgtagctggggggcccccacctgttcagtgcattgcacatctcgatggtcaccagcacggacagggccatggtcatgggctcgggggcctcgaagacctcacagtctatgccctcaaagtgggtgttgtcctcggtgcactgcatgaagtgagtctgcagggaaggtacgggagactgaggtccagggccacctccatgccaccctcctggtaccctcctgcatccccacaccctcctggtcccctcctttgtggcctccccctaccagctggctgtagttgacatgaggcccatcctcagcgtacaggaaccaccaggcagctgctcccacggtggctgcacccacatagcctgtggtggagagaggggagtcgggggtcagggctggggagatagggggcatcgagggttgagggcctcatgtggccatggacaggctggccaaggaagaagaccctctcagcacctgcatgggggagctggtgtcccagagagggggttagtcccaaggggtggggaggatcgaggaacccctccagctcacccccgattgccatgtagcggaagaagagccagccactgatgaggggctccttggggctccggggggggcggtccatgatgtccaggtctggtgggttgaagcccagggctgtggctgggagcccgtcggtcaccaagttcacccatagcagctgcaccgggatcagggcctcaggcagccccagggcagcggtcaggaagatactgtgggaaggaggtggtcacacctctgtcctgcctcccagacctgcagccaccccaccctaaccccggcttcctcctggacgcccacccagctgctc

SEQ ID NO: 28359 - DNA, 1024 bp, Artificial sequence
  DNA replication origin
ggggctgtgggggctgaggaggcagtggggctgccccggagatgtggcccctgcaggcgcagggggaacggggcggacacaggtcctgccagggctgagaaacttaccacctgcaaagtacggggcggggcgggggcggcgtcatggggaaggggctgtggtggggccagggcttgggacagagagggcactccttaccctctaggtagttccgagcaacgaacttgaggatttcgtcgagcccaatgactggcagtgagatcttgaggaccatgagccactgggtgaggtccagggcccggagcttgaagatcatctggggcaggggacaagcgccctctcaggagggggtggggagggagccagagaccagcactgcccagcccactcccaccagcctcccacatcggcgcccctggtgggagtggtcatgggcccgccgtgggctccccagtgctggggtgggcggccctgggcggaagaaacctcaccggcagggggtcaacatagaggatgaggaagtgcagggacatggagaggcagatggagcccagcagccagatgttcacccagggtggcatccgcagcagggactggttctcggacaggctgcagaggggaaggggagggagaaggcacagtgaggaggaaggaggtgggcggcacagtggaggatgtgggcagtggcctcaggggagggtggtgggtgtagctggggggcccccacctgttcagtgcattgcacatctcgatggtcaccagcacggacagggccatggtcatgggctcgggggcctcgaagacctcacagtctatgccctcaaagtgggtgttgtcctcggtgcactgcatgaagtgagtctgcagggaaggtacgggagactgaggtccagggccacctccatgccaccctcctggtaccctcctgcatccccacaccctcctggtcccctcctttgtggcctccccctaccagctggctgtagttgacatgaggcccatcctcagcgtacaggaaccacca

SEQ ID NO: 28360 - DNA, 1064 bp, Artificial sequence
  DNA replication origin
acatgacacgggtgtgggggacaggacgggggtctgtgccacagctctgcctgaagatgtgtcactatcggggtggggaggacagagcaaaaggatgctcacttccttctttcatcttctggatctggaaggggaaagagaagggatgaggcaggcggcaggagggcagcgaggtccctcccaggtgcatctcccaggcacgcacttacctggaggctcagaagcttaccaccctgccagtttctcccctactcacctgcgtccccagacaccccgcccccccccactgcagccccacagcaaagacagcccagcacacagccagcgcaacgcagcgcagcagacgggcccagaggctggcactgcccagggcctgggagccaaactgacgcccagtgggaggccagcggcccaccctgactggaagcgcagcagcagcagtggcaacggctccaggtggagctgcgagcacaagtgaccttggatgcgacgcgcaaggggctgagggggcgcgggtggcaggggcacagcagctgggctgagggcaagaagggggtgatacctgtgacacgggctcagagatggaggagggggaacagttatcctatggccagagaggacaagaggcactgttatcaaggcagggaggtggcatgggggctataggggctgtgggggctgaggaggcagtggggctgccccggagatgtggcccctgcaggcgcagggggaacggggcggacacaggtcctgccagggctgagaaacttaccacctgcaaagtacggggcggggcgggggcggcgtcatggggaaggggctgtggtggggccagggcttgggacagagagggcactccttaccctctaggtagttccgagcaacgaacttgaggatttcgtcgagcccaatgactggcagtgagatcttgaggaccatgagccactgggtgaggtccagggcccggagcttgaagatcatctggggcaggggacaagcgccctctcaggagggggtggggagggagccagagaccagcactgcccagcccactcccaccagcc

SEQ ID NO: 28361 - DNA, 1007 bp, Artificial sequence
  DNA replication origin
tagagcggatccgccaggctgagaccctggagcaagtgcgcagcatcatggatgaggcgccactcacggacgtcagggacatcaaggacacctgaggggtcaggatatccccacccccaccctgggaaagacgcctttccccactcctgaaccatgaggcctcgctctggggtcttggatggcttttccaccgtccctgagactggggttgaggggactgacgggggccaccaccgccccgccctccagcgcctcctcccagggtggctgggcctcctgttctcagggatcacacctgggtgaggggcccaagcccctcccggaaccaaaggtgcaggctcaggcctgcggctttctggctgctgtgctgcctcctgggctccagccctcccctgcccccagcccgtcccctgcccagggcacagcggagccatgggggctgggagtccccatcagaggcagtgaggtgggccccggccctgggacaggcagctgccttctggtctgcatgacactaagacgcttgtccacagcggcgacccaggcctccaagcttgcacagaggcaaggccagacttttccgtcgtttattttcaataaataagcagctcagcgcagtcggtcgccttgtccctgcaagcccctcggggttgggaaggggaatttacaaggttgagagggaggcgggtggccgagggggaaggaaagggaaggggacatgtttataaacagacacatgacacgggtgtgggggacaggacgggggtctgtgccacagctctgcctgaagatgtgtcactatcggggtggggaggacagagcaaaaggatgctcacttccttctttcatcttctggatctggaaggggaaagagaagggatgaggcaggcggcaggagggcagcgaggtccctcccaggtgcatctcccaggcacgcacttacctggaggctcagaagcttaccaccctgccagtttctcccctactcacctgcgtccccagacacc

SEQ ID NO: 28362 - DNA, 1515 bp, Artificial sequence
  DNA replication origin
ctcctgggccggagcgcacctgtcctcctcccagatgatgggcattttgggctcttccccactttagccctttgcttccatcctcccttccttccccgttcctcccgacaatccccgtctggctggtggcccctgccctcctgccctcctgccccagcccagcaggtgactcctccgtcccttccaggagctgcagcagctgctgtgctgcacgcggcaagaggcgagggcccggctgcaggcccaggagcacggggccgagcgcctgcggatcgagatcgtgacgctgcgggaggctctggaggaggagacagtggccagggccagcctggaggggcagctgagggtgcagcgggaggagacaggtgaggggaggggcacaagcccccagccccgggcccagggcccctgtcggccttgcagggagccaccggggcccaggcgtgggcagcagcggggaggggagagaggctggccttgacctctctttctttccttcccacagaggtgctggagggtgagtgtgtgctggaggtgatcttggggatcgcccaccctggctgggctaggtggggaaagggagagggcatggccctgacgtctccccctgccctgacttcccagcctccctgtgcagcctgaggacagagatggagcgggtgcagcaggaacagagcaaggtgagggggagggcagggggactgggaggagagggacccagctgtggaaaagaccctcccccacccctcccgccctctgtgtctccctcaggccaggtggaggaagccctggggcaacggctggccatgcaccctcccatctggtccaggctgagccaggcccagctcagtgtggtgtctgtccccgcaggcccagctcccagacctcctctcagaacagagggccaaggtgctgcggctgcaggcagagctggagaccagtgagcaggtgcagagggatttcgtgcgactgtcccaggccctgcaggtatggcctgtcccagccccgccaggctggctggctccactccgggtgacctctcctgggtcttgcaaggacagttccctggttaggggagtcctttcttcctcctggggctggcatggtcctgtcctgagctgttactcaaaaaaccctgaaactctcatgtgagccttggtcagtcacctgaagccctcagtacagggcatggtggacgctcagggcatttgtggcatcagccccctagaggtggcccctgggtccactggtaccaggccccgcccttgggggctggcaggtggggtaggggctgcgtttccccacaagtgcactctgctcccctcgtccgatccggcaggtgcgcctagagcggatccgccaggctgagaccctggagcaagtgcgcagcatcatggatgaggcgccactcacggacgtcagggacatcaaggacacctgaggggtcaggatatccccacccccaccctgggaaagacgcctttccccactcctgaaccatgaggcctcgctctg

SEQ ID NO: 28363 - DNA, 930 bp, Artificial sequence
  DNA replication origin
acccgctccatctctgtcctcaggctgcacagggaggctgggaagtcagggcagggggagacgtcagggccatgccctctccctttccccacctagcccagccagggtgggcgatccccaagatcacctccagcacacactcaccctccagcacctctgtgggaaggaaagaaagagaggtcaaggccagcctctctcccctccccgctgctgcccacgcctgggccccggtggctccctgcaaggccgacaggggccctgggcccggggctgggggcttgtgcccctcccctcacctgtctcctcccgctgcaccctcagctgcccctccaggctggccctggccactgtctcctcctccagagcctcccgcagcgtcacgatctcgatccgcaggcgctcggccccgtgctcctgggcctgcagccgggccctcgcctcttgccgcgtgcagcacagcagctgctgcagctcctggaagggacggaggagtcacctgctgggctggggcaggagggcaggagggcaggggccaccagccagacggggattgtcgggaggaacggggaaggaagggaggatggaagcaaagggctaaagtggggaagagcccaaaatgcccatcatctgggaggaggacaggtgcgctccggcccaggagaggaagctcaggacacacgaccatgccccacaccgtggagagcgctcaggaagagtcccaaccataaagttcagcagattacctacagcaagagccccttgccgggcgcggtggctcacacctgcaatctcagtactttgggaggctgaggtgggaggatcacgtgaggtcaggagttcgagaccagcctggccaatatggtgaaactccgtttctactaaaaatacagaaaatagccaggcgtggtggtgcacgcctgtagtcccagc

SEQ ID NO: 28364 - DNA, 1271 bp, Artificial sequence
  DNA replication origin
gccttcaccaggaggggggcctctcttctccctgtggaagctccggctctagttctgggtctgaacacaggtggtgcgggggaagcatccagcagagagggggatggtacaccccgccaccctgcccacaacactcacctctgtctgcagctgctcccactgagtgtctgggacgagctggtagccaggagggggcaggtagatgccctcgggaaccagggtgcccgtagacaccagcgaggccgtctcttcctgttcagggctcaggccctggcggctttggggcagggaggagctgctgccgaccccaccgccaagggagaaggaggagatggaggcgctgtcatcgcagttgtgagcgaaggcctcagcggctggacccccatctccgctcagctcctccagaggctccagcgggggcgatggatcccgggacaggggcagcaactccgtggagccgtgcagggaaggggcatgccggggacgtctctagggaagggggcagggaagaggctggggggccagggtcctctggcacccctccttccccagcgccccctggccgtgccctcacctggatctcctgaatcagctcctcggccctcagcagcttcgccttcagctcctcgatctccttttccatgggcagtacgatctcccgcagcttctccgagtcctcgtgggcctggagggagcggggtgtggcagcaatagttccccctccaaagtgctgaagccccgggtctgttcagagcttcctctccaagcacatcagctctcctaatcctccctagaaggtgctgtccaccctcattccagagataagaacacagaggctctagaagcttccacgacttgccccaggacataagggcaaggatgaaggtcacgacttcttcctgtggtcccgtcactcaccatgtcttccttctccaacatccatttttttctttcgtcatagaactttacctttttttttttgagatggagtcttgctctatcacccaggctggagtgcagtggcacaatctcggctcgctgctacctccgcctcctgggttcaagccattctcctgcctcagcctcctgattagctgggactacaggcatgtgcaccaatgagctaatttttgtatttttttgtggagacaggatcttgctatgttgcccagactggttttgaactccaggcctcaagtgatcctcccacctcagcctcccaaggtgctggcattacaagtgtgattcccagcatctgggttgggattaca

SEQ ID NO: 28365 - DNA, 1646 bp, Artificial sequence
  DNA replication origin
tgggcgacagagtgaaactcttattgactcaagaaaaaaaaaaaaagctagctattgttattatttaggacacacctggcttttcttatatagtagatataacaagtttcccttaataaatgtatgtaaacttttaaaatgtggatctatttaaagaacaaatattaagtaaacagcacagtaagttgtacaaggatgtgtctacattgcacaggcaggtggatcctgaaatgtgggaaatacagccccagagaagtctccagccaccagcagctgttagaaagggaaatcgcatgttgggaagggaattttaggaagtttactctggaagccaatgtcaaggccacactatagaggaagatctgtgagaaggttgggacaaaagtccaggagagagttgacgagagccccaccgcagcaggggcatagcagcgggggcagctctgacatctgtttcagagtctctggcttctgctagaggaaggagagtagaaaacaggatcagcagctggggcgtctggggccagaggaccaagtacaaagaacgtggggcggaggtggggaagctggtgcatggcgtggggtggaggggggagtgtctggggaaggctagagagcagagcattagactcacagagactgggccagggctgattctatttcccagaagtccagactaaaatgaggttggtttggggaactgagaagtttctcgcccatcttcagggttgatcaatcatcagtgagggacaagaaatgacatgggacaaggcaacagatagaagctgggagctaaacttagctataactgacagagctgctgctatcacatggagggcctctatgcaaattttaaaagggcggcccttcctctgggccataggcatgccctgtgccaggcagccctgctaacctatcccatagcttatctgtgcccccaatccctttctcgtcatgcactccccagtatggggttgatggggagtctaggtgagtcccgcgtctcacctttcaggatggcctgcagcgaggccacctcctcttggcactgccgctgcaccgcagccacagcctcggccttcgtgctctcgctcacctctgccacagccttcatggtttccatttctgccagggcgcctgccagctcagcccgaagccggctgagctcacctgactcggcctcaccatttgccccttcctgggaccgggagtcctccagtgctgtgggggacagggatcagcctctcttcccatctcttaccccaggccacctaccggcttagcaagtcctgcaacctagtactgttgccttcatctggggcctccttcacctgggcccgcccggctcacctggccccgcccctgccccgcccccttcccactcgctctgccgggtgctgcctacactccatctcttcgcggtggccagtttcactcagtcctctcttcggtcccacctggccccgccctcctagtggccgcgccccttcctcaccgggccccacttcgcacctgtcactggccctaccccttcaatggccgggccacgcccccttttgcctgtggctgtaggccccgccccctttcccgacggcgtggccccgccccttcctccatcatccctctccaccccccatccgcaggtg

SEQ ID NO: 28366 - DNA, 1049 bp, Artificial sequence
  DNA replication origin
acccactcccggcgggctccgggaccccaaggctccatccgcctggacgtcgctgctcgggtttccataagacggggcagtgccccccaggcctgcggcccaacgctgggcgcgtcctggtgagaggggcattgtaagacggggtcagaagagatgggggcggtcaaggctaagggtccgcgcggcggggcacgggaagaggatgttttgggctctgcgaatggactctgggtctaggaacccggccttgaaccctggggcggaatctaaatctagggccgaggccttcagttctggggcgaagttctgctcttgattacgacttcaggctctgggtcctgggggcgtggctctgagccctggaggcggggtctggttctagaggcggggctcatagctgggcgggactccccgccccgggggcggagttccgagctccagaaggcttggcgcacagcggattggagggatgaggagagtgggggtggagccccggatctggggcggagctataggctggaggggcggtgcctcttaccgaggcctgaggtgggtgtggggagagacagcacgttcccgtactggttctggggcccgcttcctgggggaggcgtcactttgaagaatctggcgggagaagaggaagtgcacggtgagggccgacttggaatggaatggcggacccactcaagattctgtccaggccttcagaagttaaacgtgatcacttgtgctgggacagccaatagaggagtctgagatgatcatttccaaggagttcttcacagaggaggtagctttggagctgggctttgaggttgggcagtatttgaaacagtagagacggagcaaagaacccctgggcagaggaaacagtaagtgcaaggcataaagtgaaggtggagggtgttaccgcggggtgcactggttgcattacctcctggtggggtcagtcattcgctttcttttcctcctcaggaccagggctggtgggagttaaagggcgtgatcagaggaggggctgcttggcagggtgaggatttgtgggg

SEQ ID NO: 28367 - DNA, 807 bp, Artificial sequence
  DNA replication origin
gcctggcaacagagcgagactccgtctcaaacaaaaacaaaaacaaaaaacagagatgaggtctcgctatgtgtgcccaggctagccttgagctcctggactcaagcaatcttcccatctcaagcattcctagtagctgggacttacaggtgcactttcagctcttgagcaaggtttggggaaaggagacttgaaaattttagactctcagggccacctcctgcttgcggtttgcagtggtttcccgggagcgcccaagactggcctgccgcctggctacagagagaggctgaaggcctcctggggctgggaagtcggtggagtccaggagcctccgtttcctggaaaacagctccacctgctggctgttgtgcgcctgcagtcctgaccttggcggagtctgcacggggaagggaaatgcatgctggtccagcggggggcgcctgcaggggacatcggtgccgcggttgggatggaggcgtatgggatgagactagggcagaggtggacatgccgttctgcgtggatgtatgaggcgcgagttttgtgagcaccgtgggtgtgagcagcatgtggtattgggtgtgtgcggtgtgggtatcctgagcgacgtgtggcgtgggacgtaagtgtgaggcggcaggtggttatacggttggaggcaaagtgggaagagtgaagtgttgaaggggcgtgtttgtgttgtgttgggatatatgttgtgcaggagttgccaacgctgtggatgtgtggagggcgtgtagtctctgaggtgcacaatattgttggtaggaggtgttggcgagt

SEQ ID NO: 28368 - DNA, 820 bp, Artificial sequence
  DNA replication origin
aacttctgacctcgtgattcgcctgcctcggcctcccaaagtgctgggattacaggcgtgagccaccgcgcgcggccagccttattatttctttaaagcatttttgagacagggtctcgccctgtcacccaggctggggtgcagtggtgcgatctccgcctcccgggctccagcgaaactcccacctcagcctcctgagtagttgggaccacagaggggtgccaccacgcccgggtaatttttgcattcttagtagagacgcggtttcgccacattggccaggctggtctcaaactcctgagctcaaccaatctgcccgcctcagcctttcaaagtgccaggattacgggcgtgaggcaccgcgcctggttaaatccgcggtttccacagggaattccaggcccgccttccttctcccggaaaccttaccgctcgaggactacatttcccaggatgccctgcgactaaccaagccggaagacggttgtcttggttgggcgggtccgggagaggctcgtctgtggagaggtggcccagccaatgggtgaggccgactgaatcgaaagctacggtgattgtgccgaggtgattggaatctttggcgccttggtttcagaggtgggcgcatgatgagcgggtacagagaccaatgaaaaggcgggaaggcggatcccgcgcgtggggcgcgaagagttgctgacgagcaggctgtttgtccaatgcaaggcgaaagtcgctgaagggggcggggcgaggcgagaggaggcgggcgtgtgttgtggaggaaagtgtgccatggcggagcctgtggggaagcggg

SEQ ID NO: 28369 - DNA, 1189 bp, Artificial sequence
  DNA replication origin
gggcggggcgaggcgagaggaggcgggcgtgtgttgtggaggaaagtgtgccatggcggagcctgtggggaagcggggccgctggtccggaggtagcggtgccggccgagggggtcggggcggctggggcggtcggggccggcgtcctcgggcccagcggtctccatcccggggcacgctggacgtagtgtctgtggacttggtcaccgacagcgatgaggaaattctggaggtcgccaccgctcgcggtgccgcggacgaggttgaggtggagcccccggagcccccggggccggtcgcgtcccgggataacagcaacagtgacagcgaaggggaggacaggcggcccgcaggacccccgcgggagccggtcaggcggcggcggcggctggtgctggatccgggggaggcgccgctggttccggtgtactcggggaaggtgcgcccggtcccggggaggggaccggcggaagggccaagggcttggcctccagggaggggccggcgttcggggagggtagggctataggggtgttgaggctggcgttctggggctggtcctcgggcgttagggtgttggaggcagggagaggcagggctccgggactttctgcagactggggtggtgaaggagggtgggatgcgttggaagtttaggattcctaggagctagagtcttgggggcacagggaggctgaagagctgggattcctgagattttggagagggactgggaggacctggggccgttggattttgaggttggggtccatggcaaatgaagccagggagctgcagtattgggggttggggtccatgcgggttcagagaggactgggcggctccagaggctggggtcccccgatggtcgtgtgagcaatgggctgagagtccctaagagtcaggggtagaggggcggctagtaacctagttaaaaagggcaaggaagcatacatttcagagtgtcttaggcagatggaggaaagggtgaagggtacttccattctgaatcctggggaagctggacttctaggttgccaggagagggccaaggtgtccacgatcttagggaggatttgggagctgggtgtcagggaagaattacccccaattttttctttcggtaggggaaggacttgggcctgacccctctcccttctttgtctttgcaggttaaaagcagccttcg

SEQ ID NO: 28370 - DNA, 2475 bp, Artificial sequence
  DNA replication origin
caggcccagatcctgggagccagaaccacctctgcacggtgttgtgaccttactaaaataagccaggaagggagaagagaggtcccctcctgcctcgacacctccgtggggtcttactctctccctcccaactatctgcagtcctagtttcgtcctgtcttccctgggcttcactgctgtggcctttgtcacgggctccctggctctgtgggctccggcattcctgctgcgttcccgcgtggtccttggggagaccccaccctgccttcccggagactcctgctcttcctctgacaggtgcccagatggggctatgctggggggcctgcgggtggcagggctggagtgaagagcatctgtggctcagacccaggcagggagtttgactcctgacttcacaagctgcctgctctcctggaatctccgtttcctggtctgggaaataagtgatgggatgatgtctgccactcagggctgtgccaaccatggggtgctgtgtctgtagggaccttggttgtgagggtggctaggatggacagcgtaggggccttggcaggcacagggacaaaccccccattcccttccctcacccctagtctcatctttggactcatcacctgcctgaccggagtcctgggtgtgggcctgggtgtggagatcagccgccggctccgccactccaacccccgggctgatcccctggtctgtgccactggcctcctgggctctgcacccttcctcttcctgtcccttgcctgcgcccgtggtagcatcgtggccacttatgtgagtagccagcaggtgtcaagggggatggcgtgggtccagggtggaggagcagtcagcgtaatggccactcgaggtggaatgcctggttttgaatcacagctctggctcttcccagctgtgtgacattggacaagtgacttaacctctctgtgctcagtttcatcatgtgtaaaatggggatattagtagcacctgtctcactggggtgtgatgaggattaaattagttaatagatgagctgggaacatggtcaactttccatgtgttagcccttactgtcatgaacccccgaccctctcttcccccagattttcatcttcattggagagaccctcctgtccatgaactgggccatcgtggccgacattctgctggtgagttgctgggcagctccagggtcagcgcagaggctgatgagagcagagttggggtcaggagtgttgcctctacccctcaaagcccagcctcaacctaccttctgcaataaataacatctgtagcagacccccggcctgccctgcgacctcaaccccaggcacacctctgaccccggcctaggcggatccttggtggtctcctggccccctgcctcctgccccctggagcccagagcatccactgagctccaccaactcctccacagtacgtggtgatccctacccgacgctccaccgccgaggccttccagatcgtgctgtcccacctgctgggtgatgctgggagcccctacctcattggcctggtgagcattatttcttggctggcatggggtggctggtgtcctgagcctgggctggatcagaaggcctggccctagtgaagtgtctgtgtcctgcgtgctgggcacttctcaccttccattgtcaactggaggagaaagattttgtctttgaatatttctaccagtaaggccagggacctcaccctggtggtccaaactcctcctttcttttctcttttcttttcttcctgagacaagacctcactctgttgcccaggctgcagtgtagtggcacgatcatggctcactgcagcctcgacctcctgggctcaagcgatcctcccacctcagcctcctgagtagctgggatgataggcatgagccactgcatctagctcaaacctccttccctttcctgggctccacttgtctttctccctggagctcaggggcgtgccctccctggttcatccatgaggctgactcccctggctttcctgtctcctctccctgcagatctctgaccgcctgcgccggaactggcccccctccttcttgtccgagttccgggctctgcagttctcgctcatgctctgcgcgtttgttggggcactgggcggcgcagccttcctgggcaccgccatcttcattgaggccgaccgccggcgggcacagctgcacgtgcagggtcagttaggagctgtgcccggcccagcttcttgatctgcctgtctgtctgtccatctgtctgcccactcctgtgcacctggcagctcagtccacagccctccccttgtttggcctccagtctgtctgcatccacccctggggtggctctgtggctgccccatccatttcccgctgcctgtttgcccttctctggctttgtctgtctgtccatccagctcaccctggctctgaccctcccccctcaggcctgctgcacgaagcagggtccacagacg

SEQ ID NO: 28371 - DNA, 881 bp, Artificial sequence
  DNA replication origin
ccaaaaaagtgaaggggtagagagtggagtttggagggggaggggctgagctttggaggggcaggggctgagcagctactcacgggatggggagcaggtctggctggctcaggggtgggtaggaggtgacaggtgggtaggcaggtggccagggggcaaccgtgtctgaggacacagaaccaagttgaaagaaggactccggacatcgtcaaggcctcaaagaacagactaagcccctgaaagccccacaccctggacaggcctgggggagccatctcccctctcccagctcaggtcaaggccatgtgggcagccccaaggtggcaggggaagtctgaaggttcacgctcactcccacaccaggggaccctctccctggcacccaaggtaggggaccctccttgtactcacgaggccgtttgaactggatgccccttggatacaaactggtaaaggagacacagcttggggatggggctggaagatggaggatggaagccccagccctgccccgccatggggtgtggagggagacccagggcggctggggcggactcacctatctgaggatgtgctgtcgtaggagcctgggaaagagagggctggtgaggcaggaacagggggtgcttagggcagaaggtgctgggatccagggactctcagaggcgctgggatcaggacggaggcagggacagagccaggacagacacaggggctgggagtggatgaggatcccgtcggtgtccctgggccctgggtacccccaccagtttcccactcacctggcagtctgtggcagtgcacacacagtgccatcaacatggccaggatgggcagcagcaggagccccagcacgcaggggaccaggatggcctcctcca

SEQ ID NO: 28372 - DNA, 821 bp, Artificial sequence
  DNA replication origin
aaggggggacgcacagcctcagccctcacctcccacctcccacctggccactcacaggtagcctgggttgtgatagtcgtcctcatcctcatccgcatcctcacaggctggttctgggggtaacgacacaggggtcagcctagtccaggacggaccccagactccccacccagcctgggcacctcggatcccagacgcaccctcgttctcgtagctcgccacactgttggcttcaaagagagggtgagagggagactaagtcagctcaggccaggcctatcttcttcccagcccccgccgcctgaacccttccccacacttaccaccatcagaatcccgccgggaagatggcgtccggtgggagcccccaaggggctgcggggatcttctgggagtcaaaggtcaggggtcatgcctgaggtggggctcagggggcaacagcagttgcaaaagggaaaggggcccccaatccaaaaaagtgaaggggtagagagtggagtttggagggggaggggctgagctttggaggggcaggggctgagcagctactcacgggatggggagcaggtctggctggctcaggggtgggtaggaggtgacaggtgggtaggcaggtggccagggggcaaccgtgtctgaggacacagaaccaagttgaaagaaggactccggacatcgtcaaggcctcaaagaacagactaagcccctgaaagccccacaccctggacaggcctgggggagccatctcccctctcccagctcaggtcaaggccatgtgggcagccccaaggtggcaggggaagtctgaaggttcacgctca

SEQ ID NO: 28373 - DNA, 1158 bp, Artificial sequence
  DNA replication origin
taacaggtacgcaccaccaggcccgactaatcttttttggaattttttgtagagatggggtttcgccatgatgccctggctagtcttcaactcctggactcaagtgatctgcccacctcggccccctaaagtgctgggattacaggcctgagctgtgtaatttcatgccgcgtgacacagcccagtaaaaaggaagaaaccccgcgggtccagcgtctactcacaggggtgggctgatggctgataaatcccagcaggagccaaatgaggagccaaaagcgcagccgcatgtcctggtcctttcagggcgccctgaggcggccaggacagaggtggaggtggcttagggcaggggggagggaaggggacggggaccggggcggatctgagttggggaggggcaggggagggggaggggaaggggagggggaggggaaggggaggggaaggggagggggaggggaaggggagggggaggggaagggaaaggagaagggggctgttgggcacctggaggaggtggaggaggaggaggagaagaagaaaggggtctgggaaaggatccggttcaaattaagttctcaagcgctggtggaaggtttagctacaggtcacggagaagatcagggaagcaacaggacacgcggggcaagggagcgtgaggcttaggagcaatcagagggagacaaaaaggttctgctatccgccaaaccttcttcggtctgggccctcccttagcaaacctggggctttatactccctctccaccaatccctgatgaccccggtggtgcctcacaatggacaatgccaagtagcgcccgcatcattccaatgacccctcccccatctcagtctcccacactcctcgcaaggacaggtcctctctggaaccttcacaaacctgatttctggtcctccccaaccagctccctgtccctgcttctgggcgctccttccttcctgagctcccagggttcctcaaggtcacttttggcgacaaaacataaaaaacaaatgatggcaggatggcaggaagaacctcatacccaagcagagtgccaggttttacagcctccgctcagccattcatatcctaagcaacaaaacatcagcaggatgcggaaggtcctgatagtaaaccatctccatcacatcc

SEQ ID NO: 28374 - DNA, 954 bp, Artificial sequence
  DNA replication origin
gccgccatcccatctaggaagtgaggagcgcctcttcccggccgcgaccccgtctgggaggtgaggagcgtctgagaagtgaggagaccctctgcctggcgaccgccccgtctgagaagtgaggagcccctccgcccggcagccgcctcgtctgagaagtgaggagcccctccgcccggcagccaccccgtctgggaagtgaagagcgtctccgcccggcagccaccccgtccgggagggaggtgggggtcagcccccccgcccggccagccgccccgtctgggagggaggtgggggagtcagcccccccgcccggccagccgccccacccgggagggaggtggggggatcagtcccccgcccaaccagccgccccacccgggagggaggtgggggggtcagccccccacccggccagccgccctgtccgggaggtgaggggcgactctgcccggccgcccctactgggaagtgaggagcccctctgcccggccgccaccccggctgggaggtgtgcccaacagctcattgagaacgggccatgatgacagtggcggttttgtggaatagaaaggggggaaaggtggggaaaagattgagaaatcggatggttgccgtgtctgtgtagaaggaagtagacatgggagacttttcattttgttctgtagtaagaaaaattcttctgccttgggatcctgttgatctgtgaccttaccccaaccctgtgctctctgaaacatgtgctgtgtccactcagggttaaatggattaagggtggtgcaagatgtgctttgttaaacagatgcttgaaggcagcatgctcgttaagagtcatcaccactccctaatctcaagtacccagggacacaaacactgcagaaggccgcagggtcctctgcctaggaaaaccagagacctttgttcacttgtttatctgctgaccttccctccgct

SEQ ID NO: 28375 - DNA, 1184 bp, Artificial sequence
  DNA replication origin
ttcttactacagaacaaaatgaaaagtctcccatgtctacttccttctacacagacacggcaaccatccgatttctcaatcttttccccacctttcccccctttctattccacaaaaccgccactgtcatcatggcccgttctcaatgagctgttgggcacacctcccagccggggtggcggccgggcagaggggctcctcacttcccagtaggggcggccgggcagagtcgcccctcacctcccggacagggcggctggccgggtggggggctgacccccccacctccctcccgggtggggcggctggttgggcgggggactgatccccccacctccctcccgggtggggcggctggccgggcgggggggctgactcccccacctccctcccagacggggcggctggccgggcgggggggctgacccccacctccctcccggacggggtggctgccgggcggagacgctcttcacttcccagacggggtggctgccgggcggaggggctcctcacttctcagacgaggcggctgccgggcggaggggctcctcacttctcagacggggcggtcgccaggcagagggtctcctcacttctcagacgctcctcacctcccagacggggtcgcggccgggaagaggcgctcctcacttcctagatgggatggcggccgggcagagaggctcctcactttccagactgggcagccaggcagaggggctcctcacatcccagatgatgggcggccaggcagagacgctccccacttccccgacggggtggcggctgggcagaggctgcaatctcggcactttgggaggccaaggcaggcggttgagaggtggaggttgtagcgagccgagatcatgccactgcactccagcctgggcaccattgagcactgagtgaaggagactccgtctgcaatcccagcacctcgggaggccgaggctggcggatcactagcggtcaggagctggagaccagcccggccaacacggcgaaaccccgtctccaccaaaaaacacagatggcgcgtgcctgcaatcccaggcacttggcaggctgaggcaggagaatgaggcagggaggttgcagtgagccgagatggtggcagtacagtccagcctcggctcggcatcagagggagactgtggaaagtgggagaggaagggggaggg

SEQ ID NO: 28376 - DNA, 961 bp, Artificial sequence
  DNA replication origin
cagatggcgcgtgcctgcaatcccaggcacttggcaggctgaggcaggagaatgaggcagggaggttgcagtgagccgagatggtggcagtacagtccagcctcggctcggcatcagagggagactgtggaaagtgggagaggaagggggagggggagggagaggacaaaaaattaaaatttagccggacatggttgtgtgtgccagtagtccaagctgctggggagactgaggcaggaggatcacttgagcccaggaacttaaggtctatttaagtaaagggtacagtgagctatgattataccactgcactccagcctggggaatagagcaagaccctgtctctaaaaaaaggtaacaaaataacatgaatggattccattttaagagaatgaagcatcattgtgtaagactatgaaattggaagcaaagagcatgaagcccaaaaaaaaaaaaaaaccatctgaagtcagggtgcctggggtcagaggtggggggaggattgaagaggtgcagatgtaaaaaactgaagctactgtgaccagtggattcgggagttgaaggagtcaagaatgacacattctcctgactggaggataaacaaatatgactgttttcaagaaatagctggaatattctttgtgttcagaagtacaagaacagcacatatggagggcggactgatactgaagttgaagagaagccttctgacgtgcactaactagattctagactcagcttctgtcacaaggagccccaaacagtgactcagcaaaatagcttatttctcatgtgacagttcagaggtgattggtccagggttagggttagacaacaaccgttatgcaaaatcatctagggacccagggctgcgctgtcatgttgctcttgcatccccaaggttgtcatctgtgtggttaaagcggctcaccagccccaagtcctcgttcaagcccatgca

SEQ ID NO: 28377 - DNA, 841 bp, Artificial sequence
  DNA replication origin
taggaactctggcagtcagtggtgcatatagacatatttctgggagctgtccatgagctcatggctctcctggcgacagcggcagcggctagggaagcagcctcctttctcccggcgccgccgctagaataagtccggcagctcgcactttcagagcacacgcgccgggcgcggcgctgggaaggggcagctgcttgcccagccccgcggccaaggtcgcgtccgaccccggcccgccgcggccccgagtccgccggccgggatgtaggtggcgcgggagggacttcggctgggcgagcagagggcacagccgccccttccactctgcggcgcaggagccggggcgggtccgcggggcgcggcggctgcggagactccgggcgggcgcgggccgcaggcccgacgcggaggagaccgaggagacgcgggagacccgggcgtgacaggaggaagaaacccggagccgcaggaagatggcttctcccacctccccggccccggaaggcggggcctccaccccgccgaacccgccgcggattcgtcagactggagtaaagtggtgcgatctcggctcgctgcaacctctgtccccctggattcaagtgattctcctgcatcagcctcccgagtagctgggattacaggtgtgtgccaccacacctggctgatttttttatttttagtagagacggcatttcaccacatttcccaactggtcttgaactcttgaactcaggtaatccacccacctcggcctcccaaagtgctgggattacaggcgtgagccactgcacccggcccaaactatttaataaattttctaggacaattcatttggtaa

SEQ ID NO: 28378 - DNA, 798 bp, Artificial sequence
  DNA replication origin
cctgggagaattggccagctccagcctgggcacggaaaacaccagaggcttgtaggagatcacgaccctccagggctacgaggccatgtctgagcactcaggagcctgcttgatgtggagggtggggggggggggggtggtgggagctgacagtgccaggagatggcctggggcacaagcggccccacagctcaggctcagacaagcagctggaagcctggtgcgcgtggatgtccccatggctttaaaggacgccccacagaacacggattaatcataatagagagaaaggacagcgttgcaggggaggctgcagacacggcatcaattaaaccgtcagcgttcacgtcaccagagaccgcccagggtgagattttacacctgccgccaggacacctgcagaagcgcagcctcaccccctgctgtccccgcccacccaggatctcatcaccaggaatccaaaggcaaagcagtccgagtgcccacagcacggaggggccaggagcctgcacaggctgacagagatggaggagagacggcggcttggggaagggcgtgacaccatcagactctgctctcagaaactcgtggggacagtggtcaggctgcagtggggccttgcagggacctgtccattccctgattctgacgatgctgagggcttgtgaatgtccttgtgtgcaggaaacacaccaaagagcctggctgtgtggaccacggtgcagcccagctgcgcacactgcgtttcctgtaccatactcggcactccggccttgcctgcgcactgcctgagtctgc

SEQ ID NO: 28379 - DNA, 1267 bp, Artificial sequence
  DNA replication origin
gcttcctaactgtctgggactatacacacgcaccaccacccctggctaattttttaaaattgtttcttgtagagatagggtctcactgtattgcccaggctggtctcaaactcctggactcaagtgatcctcctgcctcagcctctcaaagtgctgggattacagacatgagccactgctgcacccggccaaaattccccttaatacccaagtagtttcctctccaggaaaaaaataaccagaggtccacacactgatagtgaaacgcaggcctgaaggaagtctagctggaggcctccaggtgtaagaaaaagggaggggtggggagcacattttatcaggctgtggggacaggcagaaaacaggatcacagaaggataggagtgtccacactggctggagccaatgaagctgaagtttctaacctttctttaggaatctttgtaggctcagacaagaacatctggggtggtgctggctgcgtggacaggcccccggaatgtgacgctgagcaagggagacactcccaaagggccacgcattgtgtgacccgcgcatgggacaggaccagagctgacgactcctagactgaagcagagtgtggctggcggggtcagcgagaggctggggacttaacgtccggggtaatgaaaggggcaggcaagaggctgggggggcttcagtctagggtaatgaaaggggccggcgagaggctgggggcttctgtctgcggtaatgaaaatttccaagttgatagtggttgtgtgtgcacatctctctgcagtctaaacggaattgcattttgatgggtgaactctatggtatgtgaagtgtatctcaataaatcccttgtctttttttttttttttaagataccgtctgggaggcagatgacgtccccatcggacagtcctggtgcaggcaaggcccggaagcttccctgccaggtggccctggccagtgtcttaacctctctgatgtcccagtttttcagccatgaaaagagttgaacactgtttgccttgcggggctgtgtgggctttggcaaggagtaaaaaccaccctacaaaccacctggggcagagcagacgcaggcaactcccattcctcaaacagcagccctggcgactgtcacacgcactgcagctaagagtgacgaatgcggtgaccatcctcgtgccacggaggattataccgccgacccctcgtgccacagaggattataccactgccccctcgtgccacggaggattattccaccgccccc

SEQ ID NO: 28380 - DNA, 960 bp, Artificial sequence
  DNA replication origin
tcgtggtgtaggcacagggcctggacctccattgctggcaggaatgcaaatggcatggccactctaaacaccagcttgacagtttcacccaaaagtaaacacccgactaatgtacaaccccacaatgacactcttggggtgtttattccaaagaaatgaagacgtatcttcatgccaaaaactgtgcagctgcatttgtaacaggcagaacgtagagacaacccgagcgtccttcagtggacacacgaacggccgcaccgcggaacgctactcagccatgaaaacaaacagaccagctgcacacagcaacttggaccatctccagagaattctgccgagtgggaaaagctgacctcaaaaagcctgtacatgccatgacgctgtttatggaactggcatcatcaaaccagagaccgagaacaggttggtggtttgccagggctggggatggtgggtggggggagtaggggccgcaggggggcagctggaggcagcctgtgatgaggggaacagttagtgctttggtggtggtggcagttacacgaatctacacgtgtgataaaatggccttgcctgaagtgagtgcacgcgcgcgcacacacacacacacacaccagggcatgcagagctacgagagtctgaacgggccctgtgggtcatgccaggctgatggcttggcgtgctgctgtgttggcacgcctgatgctctgaagggtgtggctgggtgggagtgagagtcagggatgcgtgagggccggggatatgtgagagctggggacgtgtgagaactgggggcatgtgagggccggggatgtgtgagagctgggggtgtgtgagggccggggacacgtgagagctggggtcatgtgagagccggggacgtgtgagagccgggggcatgtgagggctggggatgcgtgagagccaggacagatgcgtgtggctctctctgcctttctc

SEQ ID NO: 28381 - DNA, 1757 bp, Artificial sequence
  DNA replication origin
ttagcaaaaataaataaataaaagtgatagccaacaaagaggcaatttgagtatcaaaaatataacaattgcagctggacccaatggcgggcatctgtagtcccagctatttgggaggctgaggcaggaggatcacttgaacccaggaggacaaggctgcagtaagctatgattgcaccactgcactccagcctgggggacagagtgagatgccatctctaaaatatatatttatatacacacacacacatatatacagagagttaagcatataaacacatatatacacacatatatatacacagagctaagaatatatacctaaagtatatttatgtacacacacataaaactgtggcagactaaagcatacaaatacgtgtacaaatcctccagctcctgaccaaactgactgtgtttgccttttggaggttgccggctcacacagggtaaatgtttgaccttcttattttattgaccaagtatccaagtggctgccgtggccatagtgagtgacagagtgccatctgagtggctgccgtggccatagcaagtgatggagtgtgatctgagtggccgccgtgggcatagcgagtgacgggaatgcaatcagagtggctgccatggctgtagtgagtgacgggatgtgatccgagtgactgctgtggccgtagtgggtgacgggatgtgatccgagtgactgctgtggccgtagtgggtgatggagtgtgatccgagtggccaccgtggccacaccaagtgacagagtgtgatccaaggggccatcgtggccatagcaagtgatggggtgtgatcagagtggctgctgtggctgtagcaagtgacaggttgcgatcacagtggctgccgtggccctattgagtgacgggatgcaatccgagtggtcgccgccgtggccataccgagtgacggggtgtgatctgagtggccactgtggccacagtgagtgacggagtgtgatccgagtggccgccgtggccgtagcgagtgacggagtgtctacactgtttatttggcttctgtggaagtttggcaaaagggagaggaatcactttgatgagaggacagggatgtaccatctctgtacgcgttaccacgagcctctgttctagtggccagtgagtaaaaaagaagcatattttgacaaataaattcctaatcataaacagtaaacttcagcaaacccaggacctagtgggcgagtatttgcacagttacatgagaactctgcagtgcggcctgcaaccgcctggccaatttaggattaggaaggcagggattaaaagttactgaacaacagacaaaatgatatatgattccttaggtcattggaataaattatagataagcttaaatatgtatggaattttgcctactcaactctcacagcggcccagggccggatttcagcctgtgagccggggttgtgacgtgacagccagacttcaagggcccatctggccaaggctgagctctcttcaaggtcagttttgtttctttgcgaacaattctttttggaagttcactgagccagcccctccgatggccagaatcgatactgaaatgttcggctcatgacacggcgctggcgacagcggcttagtttctctctttaactctctgagtatgtttttatgtttggttggtttttgtttcgagttttaataatagggtgaactcctcggagggtttggacaaggaccaaagtcagtgtaaggagagcaccaagtacagcg

SEQ ID NO: 28382 - DNA, 2287 bp, Artificial sequence
  DNA replication origin
aaaaagcatttatcttaacaattctttttagtgccccccccacttttattctcagtgtcttggtttgcttggcagattcccttgccaccctggcagtgtgtcatacatcacatttgtggaatgattattttgttcacctttcttgccctttatataaaggtacaagtgatatcttaattatttttatgttaattattcactcaattcagctatccaaaaaatacttagtgcctactttaagctgggtattagaactttgtaaactcagcatgtagcaagagtacagcaacacaaggccctttaaagttggatggatggtgggggagggagggagtaggtgttggatggatgggtgggtggatgaatgggtagacggatgtgtggattgatgggtggctggatgaatggatgtgtgggtgggtagatggatggatggatgggttgatggatgcatgactgggtgggtgggtggatgtatgagtggcataagtggatgaatagatgggtagataggtgggcagttgtgtggatgggtagatggatggatggatagatagaaggatggatgggttgatggatgcatgactgggtgggtgggtggatgtatgagtggcataagtggatgaataaatgggtagataggtgggcagttgtgtggatgggtagatggctggatggctggatagatagatagaaggatggatgggttgatggatgcatgactgggtgggtgggtggatgtatgagtggcataagtggatgaatagatgggtagataggtgggcagttgtgtggatgggtagatggatggatggatagatagatagaaggatggacagagaaggatggatggatggatggatggattggtaagtgggcagatgagtgggtaagtggatgaatagtagggtagatggatgggcagatatgtggattggtagatggatggatggatggatggacggatggatggatggggatggatgaatagttgggtagatgggtgggcagatatatgggtgggtagatggatgaatgggtgggtggatgtatgacggatgcgtgagtgaatgggtgggtggatgtatgatggatgggtgagtgaatggatgggtggatagatgcatgagaggatgggtaagtggatgaatggatgggtggatagatgcatgaaagggtgggtaagttgatgagtggatgggtggctggatgcagggatggtagaggtacagacggatgagtggatggataggtaggtaagtggatgaatggatgggtagatgaatggagggatggatggatggatgagtgggtggatggatgaatggctgggtgggtggctggatgagcggggtaagtggatgaatggttgggtagatgggtgggtggatatgtggatgggtagatggatgaatggatggatggatgaatggataagtgggtggatggatgaatggatgggttggtgggtgggtggatgaacggggtaagtgggtgaatagttgggtagatggatgggtagatggatgaatggatgggtacatagatgaatggatggatggatgagtgggtggatggatgaatggatgggtgggtgagtggatgggtgggataagtggatgaatagttgggtagataggtgggcagatatgtcgatgggtagatggatgaatggatgggtggatggatgcagggatgatagatatacagatggatgggtggatgtataaatgggtaagtggacgaatggatgggtggacggatgcaggaatggtagatgtacagatggatgggtggatggataggtaggtaagtggatgaatggatgcgtggatggatggatagatgggtggccagatgcatgaatgagtagatggatgtttggatgggcagatgaatgtgtgggtggatggacagatggggtgggtatgttgcctgaacctcgttgttgatgagggcactgttgatactctgagttttttccctttctgtgtttggtgtggattctggttcatgacagcacaatgccttcactggccagatgatttcacagtgctttatggctctgccagtggggatcacagggcctggccatcagggcagtggtgagaaagcaggatgaggtcagaataaagcccttaaatcttcacagggaagcagctgggccttgggtttctgggtggtgggtctgcagtatcccctgtgactgaagagtgcatgagtccattggaggcaggaccagcacgggacacttcccgtggggttggatcacagtctacactgagcg

SEQ ID NO: 28383 - DNA, 974 bp, Artificial sequence
  DNA replication origin
gtgtgagtgtgcaaatgcgagtgtgtctgtaggtctgggcacgtgtatgcgtgtgtgtgcgagtactatattcgcatgtgtgagtgtgcgaatgtgtgtgtctgtgggtctgggcacacgagtgtgtatgcgtgtgtgtgcatgtactatattcacgtgtgtgagtgtgcgaatgtgtctgtgggtctgggcacatgagtgtgtgcatatactatattcacgtgtgtgagtgtgcaaatgtgtgtctgtaggtctgggcacatgtgtatgcgtgtgtgtgcgagtactatattcacgtgtgtgtgagtgcgaatgtgagtgggtgtgggtctggtcacatgtatgtatgcatgtgtgcatgtattatagtcatgtgagtgtgcaaatgtgtgtgtgggtctgggcacacaagtgtgtatgcatgtgtttctattgtattcatgtgagtataagtgcaaatgtgtgagtgtgtgttctctgcacacacaagtgtataggtatgtgtttgtgtgtgcatgcactgtattcatgtgagtgtatgtgaatgtgtgactgtgagagtttgagtgtgcctgggtgtctggctatactagtgcatgtctgtgttcgtgtgcatcagtctgggtgtgcccgtgtgtgaatgtgtctatgcgtgggtgtcccaatatgtgtgtgcctgtgtatccatgtctgggtgtgcctgtgagtgtgagtgtgcgcatgggtgtctggatatgtgagtgcttgtgactacctgtgtgtgtatccatgtctaggtgtgcccgtgggtgtgagtgtgtctgtgcgtgggtgtctggatacgtgtgtgcctgtatgagtgtgtatccatgtctgggtgtgcccacgggtgtgagtgtgaatatgtaagtcttgcgtgtgcatgagtgtgttcacatgagtgtgagggtctgtgcataagagcctattgtgagtgcatgtggattgcatttatg

SEQ ID NO: 28384 - DNA, 709 bp, Artificial sequence
  DNA replication origin
cgggggccgggagacagggagaaggggagacggggagatggggagatggggagatggggagacagggagacagggagacggggagacagggagaagctgagggagggactggaggccggtgtcggcctcccaggctaggagccaggagacagagagaaggggtgggggcagcctgaggccaggcacggctgagtggcggttgacgggtcctcccggcctccttccatcctccttcctcccccttccccgcttcctctctcttcctgtgttagaattgttcccggccctggggagacagtgggaacaagactagtcaggtgcccgcccttatgtatccccacgacgggcaaggggctttcagacacagaggcagcaagctctggccgcagggatccctgcagtggctgcaaagtatggaggccccggcgtggaggaggcacgggtggaaacgcgcaggccccggcgtggaggaggcacgggtggaaacgcgcaggccctggcgtggaggaggcacgggtggaaacgtgcagggcatatcttgggaatccttcccgggtggaacacagggggctagaatttaaacgtgcagactgtggtgcgtgatttcccacacgccctttgctttggaacccacacttcttaactcagaggtgaagtacgcaggttgcaaataagacggtgaaaccactaaaggcaggaagggaggagg

SEQ ID NO: 28385 - DNA, 1190 bp, Artificial sequence
  DNA replication origin
gatggatgggtgcatggatggatggttggatgcatgggtggatgagtggataggtgaactgatggagactggctggatgcatatatatatatatatatatatatatatatatataaaaatgtatgtgtggatggatggatgagtcaatgggtgaatggatggatgtacatatgggtgagtgcatggatcatgggtggatgggtgaatggatggatggataggtagatggctgaatgggtgggtgggtggatggatggatggatgggtgcatgcgtggatgggtggatgtgtggatgaacagacagataggtgggtaggtggatggatgggtggatacatgcatttatgcatgcatggatgggtgggtgggggtttgggagggtgaatgcatggatggatgggtgaatggatggatggatgaatgactggatgggtgggtggatggatggatgggtggatgagtgggtgagtggatgggtgaatgggtggatggatggatgggtggatgggtgaaagcatgggtggatggatggatggatggatggatggatggatggatggataggtggatagatggatggatgggtggaaggatgggtgggtggatacattgatgagtgggtggatgcatgtattcatggatggttggatcagtgaattgatggatgggcaggtgcatggctggatgggtggatggatgcatggatggatggatggatggatgtgtgggtgtctaggtagatggatgtataagtgaaaggatgggtgagtagatgcatgaatgcatggattagtagatgggtgggtaaatgggtttatggatggatagatgaattgatgggtggatgggtaagtggatgagtgggtgaatggatggttggatggatgagtgggtggatgggtagctaaacagagggatggctgggtaagcataaaacagtcacctaagtttgacaactggtgcatattatatgcccagtggcatggctcagaaagtttatgatttaggaaagcagaaaaacttatggtccccaggagatgtggaacttggtgccaatgactagaagagaccctctgaagtagtgcacaaccctgggacaccaatatatcactgctaaaaggaagaccatgaactgatcagaagacccatcagaagactaggccttgtcctacagccccagcactcctga

SEQ ID NO: 28386 - DNA, 845 bp, Artificial sequence
  DNA replication origin
gtcacccctggaggaggagggagctgaagcagccggtgactcactcacacgagacagtgggcggtggccagggcagagcgggactccccattgctggctaaaatccagacagcgccttggcccgaggtgtccctgacaggacgagggtggagtggcagctgctgaaacctgaactcctctgccctgcccccgtcccttgacctcacgcatctagtaggtcagcgccagaggaaatcctcgaagaaaatgggcgtctcccttgctgagcacagaaccgcagtcagtcctgtgtgcccgctccctggatgaggacaggaaggacgtgggggagaggccacagtcaccctcaggagcccccagacccactggaaagcagcccagtgagcatctgagaagtactgcctgtgcctggtgtgagggtgcaaggcggggggccgtgtggccaggcagcctagggttgcgccaaagcccagcaggtatgggacgagcaggaccagactgggaggggctcgggggagcggcgacctgtgctgagcttgagttgtggctgggctgggaggccggacaaaggtgtgtttcctctggccatgcaggggtcaggcggtggtgctggggaggacgatgtgggaggaagatggggctgggatgaggggccagggctgagctcagcaggtattgggaggtgccatggggctgtgaacatgcataggtggggaggctggggcgggggcagagcaggggacagtcctggagccagcagacaggaggaggcatctctacagcaccccaggcttggagacagggctggctcacctcaaagggggccatgggagagaggaaggtgg

SEQ ID NO: 28387 - DNA, 1975 bp, Artificial sequence
  DNA replication origin
gggtggatggatggtgggtgggtgggtagatggatgaattgtggataaatgggtgggtggatggatatatgaatgagtgagtggatggacagatggatggatgggcgtatggctagatgagtgggtggatggatgaattgtggataaatgggtaggtgcatggatagatgagtggttgggtagttgaatgggtggacagaccagatggatggatttatgagtgggtgaatgaatgaattggggataaataggtgggtagatggataggtaaatgggtggatggatgaatagatgagtgggtagatggatgaattttgggtaaatgggtaggtggatggatagacgagtgggtgggtagatggatgggtgggtggatgaattgcgggttgttagatggatggataaatggatgtgtggatgagtagatggatggatgagaagtaatgaatggatatgtggatagacgaatgggtgggtggatggatgggtgggtgggtgggaggatggatgcatgctgggtggttagatgggtggatgaatgagtgggttgatgtagatggatggatgggtgggtaggtggatggatggtgactggatggatgaatggtggataaatggtgtggatggttgtatgctgggtggtgagatagatgaatgaacaggggggtgtatggatagatgagtggatagatgaatgaacaggtgggtgtatggatggacgagtggatagatgaatgaacaggtgggtgtatgggtagacgagtggacagatgaatgaacgggtgggtgtatggatagacgagtggacggatggatgaacgggtgggtgtgtggatagacgagtggacggatggatgaacgggtgggtgtgtggatagacgagtggacggatggatgaacgggtgggtgtgtggatagacgagtggacgggtggatgaatgggtgggtgtgtggatagacgagtggacggatggatgaacgggtgggtgtgtggatagacgagtggacggatggatgaacgggtgtgtgtgtggatagacgagtggacggatggatgaacgggtgggtgtgtggatagacgagtggacggatggatgaacgggtgggtgtgtggatagacgagtggacgggtggatgaacgggtgggtgtgtggatagacgagtggacggatggatgaacgggtgggtgtgtggatagacgagtggacggatggatgaacgggtgggtgtgtggatagatgagtggacggatggatgaacgggtgggtgtgtggatagacgagtggacggatggatgaatgggtaggtgtgtggatagacgagtggacggatggatgaatgggtgggtgtatggacagacgagtggatagatggatgaacagtggataaatgggtggatggatagatagactggtgggtaggtggacaggcaggcacatggctggatgagtgagtgggtggatggatagctggatagatggatggatgggtgagtgaatggatacatgaatgaagttgccagttgaagccacttgctgcaatcctgtgtggtgttatgctaggaaaagaatgaccttcagaggaaaacagtcatggttctgtccctcacaaccacattactctgcagtagttcctcaataatatccatccaacaaaggatttttatatagaacttattttacaaagtcgtgcacatgaaaagacgcacaatatcactaatcattgggaaatgcaaatcaaaaccacactgacataccacctcacgcccattaagataattaccataaaacacaaagctaaaccagaaaataacatgtgttggcaaggacgtagggacgctggaaccctcctgcacggttggtgggaatgtaaatggcaccgcatctgtggaagacggtatggaagttcctgaaaaaattaaaactatgtctgctttatgattcagccgtcccacttttgtgtacatacccaaatg

SEQ ID NO: 28388 - DNA, 1310 bp, Artificial sequence
  DNA replication origin
ccagactcccacacccgggctgggctcaggccaaggtgacaccctcagatgccatccaatgtgaaccggggccgcgggaatcagcctcgatcccacacagatgctgctcaatgtgggctcccagcccgggccagccaggcctcctggcagcactggtacagagccccaggtaaaggagcacgaatggagtgaaagccgctgaggcgctagaagagcacctgagtacctgagtccctgcggcagctgcctggtagctcctggagcgcgagaccttggccccgctcctcctgactcccaagtgccagggacagtggcctgcaagcgaacagggagacaggcaggggtagagctgacctcagacgagaatgggtgaccccaagcagggaagcgggaaggagccacccaggggaagaactccagagaacattccagagtgggaagcaggaccagcctgggccaggaggggccacatgctccaggaaggtaagggaaccagcgtggccagagcagggaacgtaaggcagacgagggacaggggagggtggagaactgagcagggcccggtcacctgggcagaaagcaggcacccacgcccagcgtggtccaagctgaactggcacaggcagaggggactggcagagggacgggcagagggcacgagctgagggggcacaggcagagggcacaggcagggaggcacaggcagagggcatgggcagagggatggacagaagagatgggcagagggcacaagatgagggggcataggcagagggcatgggcagagggatggacagaggagacgggcagagggcatgagctgaaggggcacagggtgagggcacaagcagagggatgggcagagggagcacgggcagaggacacaggcagaggggatgggcagagggcacgagctaagggagcataggcagagggacgggcagagggatgggcagaggggacaggcagaggagacgggcagagggcatgagctgagggggcacgggcagagggacaggcagagggatgggcagaggggacgggcagagggcacgagctgagggggcacaggcagagggacaggcagaggggacaggcagagggcatgagctgaggggacacgggcagagggatgggcagaggggacaggcagagggcatgagctgagggggcatgggcagagggacgggcagagggggtgagcagctgattacagagctgctcagtaatccaggaatagccaagggcctggtgtcagtagggctcacaatgaggcccactgtctttaaacttcccagggttcccagcac

SEQ ID NO: 28389 - DNA, 957 bp, Artificial sequence
  DNA replication origin
tggcccgtgagcctctgtcaagagcagtgggggagtggaagggctcagctgttccgtagctgctgtgaaaatggggtctgagtaagactggggtgtcatgctgactgcaggtttttctggaagctgctgagaggtgggtccaggtcccacccacgtgtgtgtgagcaggtcatggcatcttcccatgtgccatgtcttgttccaggcgtgtgtcccagctgtcagacactggcgggcacccatcctggaccctgagggtagtctcagataactgcctgggagaccacatgtggggcctcctcacagcttctcagcggtggagtaaagcaggtcacgaggatcagagggtcatggggcaggggtcacccgcagccttctgaagggccacatggcagatgtttcaggctttgcaggccctggggtctctcttcaactgctcagctctgaaagcagccacagacgaggtgtcacaggagtgtcaggctgggctacaggttggaggcgcagcctggacagagaggagcgggtgatctttggagaggatggtggcatgtgggatgagcgtgctgtgctgtgtggggcagtggcattcagggctgggccctgttcccaggtgaggagtccctgctcctccagggagatgacaggggccttggatgtgaagctggaggccggctggctctgctttggagacagtgccttggtatgtcaggctaaggattcgggctttcagggcattggctgcgattggtctttttattaatcgagcacagggaatgttccagtgaggtgacaggggcatggcagggcgatagagcagagcccatggcggtggggtggctgtgtctgtattcagcgagtccgtgtggggtggtggaaggcactgcgtggggcagaatggggcaggccccgattccctgcatgttgtggctatgagttgaccttccctgctgagct

SEQ ID NO: 28390 - DNA, 1153 bp, Artificial sequence
  DNA replication origin
tccagtaactgggataacaggtacgcaccaccaggcccgactaatcttttttggaattttttgtagagatggggtttcgccatgatgccctggctagtcttcaacgcctggactcaagtgatctgcccacctcggccccctaaagtgctgggattacaggcctgagctgtgtaatttcatgccgcgtgacacagcccagtaaaaaggaagaaaccccgagggtccagcgtctactcacacggatgcactgatggctgataaattccagcaggagcccaaagaggagccaaaagagcatccaccgcccccgcatgtcctggtcctttcagggcgccctgaggcgtccaggacagaggtggaggtggcttagggcaggggggagggaaggggacggggaccgggcccggatctgagttggggagggggaggggagggggagggggaagggaaggggaggggaaggggggaagtaagggaagggaaaggaggagaagggggctgttgggcacctggaggaggagaagaagaaaggggtctgggaaaggatccggttcaaattaagttctcaagcgctggtggaaggtttagctacaggtcacggagaagatcagggaagcaacaggacacgcggggcaagggagcgtgaggcttaggagcaattagagggagacaaaaaggttctgctatccgccaaaccttcttcggtctgggccctcccttagcaaacctggggctttatactccctctccaccaatccctgatgaccccggtggtgcctcacaatggacaatgccaagtagcgcccgcatcattccaatgacccctcccccatctcagtctcccacactcctcgcaaggacaggtcctctctggaaccttcacaaacctgatttctggtcctccccaaccagctccctgtccctgcttctgggcgctccttccttcctgagctcccagggttcctcaaggtcacttttggcgacaaaacataaaaaacaaatgatggcaggatggcaggaagaacctcatacccaagcagagtgccaggttttacagcctccgctcagccattcatatcctaagcaacaaaacatcagcagggtgcggaaggtcccgatagtaaaccatctccatcacatccatgtagccatc

SEQ ID NO: 28391 - DNA, 1881 bp, Artificial sequence
  DNA replication origin
agaccctgtctcaaacaacaaaaaacaaataaaacaaacaaggtcctagcaaccctactaacctgttatgaagactgatacaggggcatcacctgccccaattttctgactcaggtcagccttatattcctactctaatctcacccctatccccgtcccacacccactattcttaaaacctccatggtcctccgggggcagctgtagacacattaagcccagggctatggggccactggaaccttctccagtgggtctgaaaacatcagcattccaggagttgatgagcccctacctgggcaccactccctcttgggcctgagaaggccggggggaacctgcaaggaatatgtggaattctatatggtgcctctgatactgcggtaatgtcagggagaggtttgttcaactggtcagggccctgaaaccccgatcactttctcatctctgcatcttgaaggctagcagagaggaggaaccctgagctctctaggaggtgggtaggtggtggcagtacagactcctagatgtctaaacggagttgcagagagaaggctttctcggtagaccctggaagggacttttacggtagaactttcattttacaagcagggatagaggcctagatggggacagagacgtgtccaaggtaaaacaatggacggaggcagggcagggagaggccaggtcctagactcggcctcagcacccctcccacacacacatcgacacagaagctggtccagatttataatttaatggctgtgcagatcccagtccctcatttctgtcgctcacgtgcccactggtctggggtcagggttttctgttcaaaggcatggatgtgcgggagctcttctgctaggcacgcgttcaccagcctggggcgagagatggggttaggaaaaggccagcggtgatcgcacaccccgaggctagggtgacccaagagactggtgtccccaaggttgtagtccccaggccgtgggaacacgtacttggagagagggtctacatcgaaatactcgaagcaggggtcacgaaggcgggatcctcaaggtccctgagccacgccagggggagtgcgggagtcaggttgcaggggtagggggagtggctggggttgtggtacaggagctaggcaaggtgctcccagggccttacctgtgtctctgaagcagcggtttcccctcgaacttggccgacaccaccaggactcggaagctacaggagcaacggttgagggtcgtgtcctccacctcctaccgagcggaagaatatgaatggtgccgaacccgccccccgagctcttttccccttgtccggcggctcaactcaccacatgctccgcctccaggtcccgctgcagcttctcgcggaggtattcggcgctgagttccatggcggcagtccagctggaacggcagcccagcagggacacaaccccagctcgggcgccggccacgctaccttgctgccttacaggagccacttccgctggaaaactcacttccgcccttactaaggcgtacgtcaacgcagtacttccgccctcaagcagccgggctttccagcggtccaggcttttcgcgcttgccatgtgtcagccaatcagagcctgaggaaggtgggactcgggcggagccgatgctgaatggtacgcgctcgccgactggacagcagtctggcttccgcggtcggacttctacacccgcctccagacaggagaggggcacgtaccggcgctacggcttcctgcaggctgcctccggatagtccccgagagcttgttccgaagcaagcaccctgcagccctagcgatccagccctcccctggaccctaggtcacggcaatcaaccccctgctgtggttcccgaacc

SEQ ID NO: 28392 - DNA, 990 bp, Artificial sequence
  DNA replication origin
tacttccgccctcaagcagccgggctttccagcggtccaggcttttcgcgcttgccatgtgtcagccaatcagagcctgaggaaggtgggactcgggcggagccgatgctgaatggtacgcgctcgccgactggacagcagtctggcttccgcggtcggacttctacacccgcctccagacaggagaggggcacgtaccggcgctacggcttcctgcaggctgcctccggatagtccccgagagcttgttccgaagcaagcaccctgcagccctagcgatccagccctcccctggaccctaggtcacggcaatcaaccccctgctgtggttcccgaaccccaaggcccgatgggtcccgcgggggtcgcggcgaggccagggcgctttttcggcgtctacctgctctactgcctgaacccccggtaccggggccgcgtctacgtggggttcactgtcaacactgctcgtcgggtccagcagcacaatgggggccgcaaaaaaggcggggcctggcggaccagcgggcgagggccctggtgagagggggaggccttctgtgccgggaggaaggcgtcccagaggaggcggaccccgcggggcacaggcctgttgagaaggaccggccaggactgtgacagaggcggggcgtctgtggtggggacggggcctgtcgcaggggaggagcgtgacggggaggcggtgcccggggcatctccgcggcggaactcagggaaggagctagctggggcgggggtgatgatccaggctgggttccagcatagggctcttggtgggcacgctggggtcgggtggaatgcaggagagagaggaggtgggacaggtgggtacctgggctggaggcagggcctgaggtgggcaggtgcagagggctgcacttctcggctgaagccgggaatgaggaccccgctctcgggtgggattggaggggacccgcggctgaggcgctgggctgcgacagggacatcacg

SEQ ID NO: 28393 - DNA, 815 bp, Artificial sequence
  DNA replication origin
aggaccccgctctcgggtgggattggaggggacccgcggctgaggcgctgggctgcgacagggacatcacggttctcctcctcagggagatggtgctcgtcgtgcacggcttcccgtcctccgtggccgcccttcgggtaaggaaggagaccgggcagcggcggccgggtgagggcttgggttccgcccctcgctccgagccgccctgatgcccctgtacgccgcccgcagtttgagtgggcttggcagcacccgcacgcctcgcgccgcctggcgcacgtggggcctcgcctgcgaggagagacagccttcgctttccacctgcgcgtgctggcgcacatgctgcgcgcaccgccctgggctcgcctcccgctcacgctgcgctgggtgcgcccagacctccgccaggacctctgcctcccgccgccgccgcacgtgcctctggccttcgggcctccaccgccccaggccccggccccaaggcgccgcgcaggtccctttgatgacgcggagcctgagccagaccagggggatccaggggcctgctgctccctgtgcgcccagaccatccaggtgaggtccccccgaggaatggatggctctagagtccagacgacttcggatccagctctttcttgagggaaacccactgacacgctttggccaccctatccccatctctaagatgctgatgctataggacttacggccattcctgagcaaagcaggccctgctcagggccttcaccatttccccttcaaagaaaaggttcttccctaggccatcagtactccgctgcactccagtgtggtcg

SEQ ID NO: 28394 - DNA, 1377 bp, Artificial sequence
  DNA replication origin
gccaggatccactgctcatccccatccacggccttcacccgggcagccaccttgtctccaggtctggccacgtagtctcctgaggcagggatggccccacagaggggtgggggcctgtgagtggaacaaaggatcagtcccagcccctgggcaccagccccttcctcgcagctgctgccctcacttgtcaccaggcttcccaatccacaggggcagggtcatggccgactgctgcagcagggtcatcagcacccctctgcgcatggtcttccggggtggctccaagtcattgtagagacccgcgatcttggccactgtgggaagaaagggaggcctgaggccccagggacaggggctggccctgaccccccagcatgctgaactgagctgctggaggagcacctgggagcccccagctcccgagtgagcccgagggcacagcaggactgtgacctgatctgccaggtgtcctacaggggctgctgcgctcaactacatatgggtgagacggcagcacaccaggcacccaggggaaggaaccagggagggacaaagcgggttctgaggtgctggtgaggttctcttcttgatgtcggtgctgacacagaagtgtgtttcgttagtgaaaagttcctaaaattcgaagggtcccgcgggaatcggggcgaggccgggtgcctcttcagcgtccagctgctctactgcctgaatccctggtacccgggccctgtctacgtggggctcactgtcaaccctgttcgtccagcagcacaatggtggccgcaaaaaaggcggggcttggcggaccattggccgaggtccctgttaagagggggagggtctctgtgcccggaggaaggctccctggaggaggcggaaccggggggcacaagcctgctgagagggacccactaggtctgtgacgtgcgcgggacgtcccgggcgaggcctgttggtggggggaggctgtcgcaggggaggagcctaacggggaggcggtgccctgggaatctcggcgttagaactccggagagcagctggctgaggcgagggtgatgatccaggctggggtccagcgcaggggtcttggggggcacgctggggtcgggtggagcgcaggagggagaggaatgagaacaggtgggtacctgggctggaggcgggacctgaggtgggcaggtgcagggggcgtgccttcaggcagttgcggggccagggctcggctgaagctgggagtgaggaccccgttctccggtgggataggaggggacccgcgatgctgggctgcgctggcggtagggcgcggcggggctcacaggaacattcctgttgtcctccccatggagattgtgctcgtcgtgcacggcttcccatccg

SEQ ID NO: 28395 - DNA, 1089 bp, Artificial sequence
  DNA replication origin
gagaagctgctcacatgctagggccacaggcccctcctccctcctctggaagccccttgactggcaggaccacaggcaactagctctgcctccgccctcagcaaccaacagaaggcacccttgactcagactttgtattgcattccagtaaaaagccccagacccgcagtggatggcatagaaaaaaggtgggaggggggttacacagctcaatcctgtgaggcaggggcgacgattattcacatcttagagatgaggaaatggaggtgggggggggggggtaaaatccttgcccccagggactaagctggccagtgtcctgtgagcatgggcagtgattgactgagtcacagcctcacccctgcagccagatctgaacttcctcatagctcagcaacccccgccagatcactgaatctctgcagggcaagccctttactcactcacagtagaggccaggaccatcgtctgttattttattaactgtttcttggccattggctctatgtgggactttgttctacagcagtgatgagagctgcccccaggcagtttagtacacaggttcggaaggggtttaatgagatgcataaaatttgtagtatggcagaaaataataagggttcaggaaaggggggcgggcagggaagtgcacaagaaagagccgcaattttattgtattttatttttttagagacagggtcttgctgtttcccccaggctggagtgcaatggagtgatcatagctcacttcagcctccaactcctgggctcaagcgatcctcccacctcagcctcccccgtagctgggactacaggcatatgccaccatgcccggcttctcagagctgcaattttaaattgggagccagggaagacctccctgtggaggtggcaggttatcaagactgaagatgtagagaagaaccttccagtcaaagggaaaaggcaggtcctgctgtgctcaggaatggccagaagtactatcatccatccccatcttagagatgtggacagggccgcaacagtgtcagggcgtttcctggctcctcaacagcaggatccgaagtcgtctggaggatgtgccgc

SEQ ID NO: 28396 - DNA, 1073 bp, Artificial sequence
  DNA replication origin
ctcctcctcctcctcctcctcctccttctcttcctcctcctcggcttcctcctcagccccgggccggagcggggtgtcggcagcggccggttcgggcggcgactcgcgcttctctgggcggcggcgcttggccatgtcgtgtcggggaaggtaatgagccgcagagccccggggtctcggctgagcagcggcggcaccaactattcgcggagctggaatgactggcaacccaggtgggtgaccggcccgggaccccgccccgacctcccgggctccgcctcgggcgggccgaggcctagggccgcggggctgggaggcgcggcctaggccctccacccaccggagccgggcgcggcttcctggttctcctccgccccggctgggggaggaaggccacggggaggcgaggcctaagtgcctctcccctccctgcatgttcagcctggggctgaagccgagacccggggctcccggcggtggcactggcctagggtcgggaccaggaggtgagaaagaggcgggggtggtgggggggcattccacttaccgcctccccctgaccccgagttgggagatcctgagagtccaggaccctccctgttactcattcactttctcggttccccagtctttcagccgccacgtgagagctcttgtaacctctgttccctttctgtgacccccacgtggtaatattgaaaaaaccaaaacaaaactccagccaaggcattgctctgactttaggcagaacattcattagtggagcatgagatgagattgtgtgactgttgatgggatcgacccactctggtcttgggcgatggaagttttccctaagtgcaaggccggttactctggtgaatcgtaattcatacctggacacttgagtgaactctttgggcacccacttagaagtctagagaatttcctcttttatggaggatttgatctcagaccgttttggggcttagttagatttgaatatattaggaacattaactttttaaataaatgtaatttcctgtctttttgatcaatggggggagggcagctgtgcctaatttaggattgat

SEQ ID NO: 28397 - DNA, 1335 bp, Artificial sequence
  DNA replication origin
tcgccgcccgaaccggccgctgccgacaccccgctccggcccggggctgaggaggaagccgaggaggaggaagagaaggaggaggaggaggaggaggaggaggaggcggcggcggagggcggggtaagaggacggccgttccgggttccgcctgagcccgcaacgcagaatgaggaggcgggagcggcgcggtgagagagaggcggatgaaggggcgccgacttctcttccagggccatgcgcggcccacgacgccggggccccggaggacgaggacgacgaggagcaggcggtggcggcagctccccacgctcacaaggccactgcttccccgcctcccggctccgcccgccgcgccgccactgtcgcacggcatgctgggagcgagaggcggggtcggccccgccgggcctggggagagaggcgggtcctgtcggcggggcggggccgagagaggcggggccgatagcaggccgccccgccccccacggccccaggctcttggacggcgaagaggtctgggcgtagtagtgacgaatcctaagacaagggatctccactactgcggccacacacttttctcccaaacgcttcccggaaagcaccggagggctgggcagtcaggtgtaaacaggcgtccaatcaaggacctgcagtgtgggtggtgggggctggtgccctggggtgcgagcgcacacaggcgtgcccttggtttcacgtgcgccagttttcccactttctacgggggggagtggaaagtgaaaatagtaagatcgagaggtggatatccaccttcccaacctccacctgaaatgtgcccatcgagtcctagcaccttttaccatttcttcccaatgaaaaaaactaaacgatgtaagggaagggagtacccacgaccaccaaaccctgtcctctgcaatgtgaaatgtgctttgaagtcctctcaccctgaggcttgcccgccttctgctggtgaaagaagctgggggctaggcgcggtgggtcacgcctgtaatcccagcactttgggaggccgaggtgggcggatcatctgaggtgaggagttccagaccagcctggccaacatggagaaaccccgcctctactaaaaatacaaaaattagccgggcatggtggaggacgcctgtaatcccagctacttgggaggctgaggcaggggaatcgcttgaacccagtaggccggggttgcagtgagccgagatcagaccattgcagtccagcctggacaacaagagtgaaactctgtctcaaaaaaataaaagagagagagagaaagcagggagggaagaaaaaggaaggaaggaaaggagggag

SEQ ID NO: 28398 - DNA, 1049 bp, Artificial sequence
  DNA replication origin
gtggcaggtgtcggtaatcccagctactgaggcaggaggctgaggcagggggcaggagaatcacttgatccccggaggcagaggctgcagctactcgggaggtagaggtgagagaatggcttgaactcaggaggtggaggttgcagtgagccaagatcgcaccattgcactccagcctgggcgacaagagcgagactttgtctcaaaaaaaaaaaaaaaaaaaaaaaaaaaaaatggaaacactgcctttgcttccctgccccggaactgcttcattttccttggggtttctggaccactttgacctctctctgtggccagcaatggtggggaggtgggtggatctggagctggcatgggcaggctcagcattccagcccattctggggtgaggttggccttgggtgaggacaggggtcactgggtcagacattcattttctggagcccaggggtggtgacgtgtccatcagggaagcacgcgcctgtgctggggggtgctccctggaccagcagcgccggcctccctgggaccttgttctgtgcagatgtgttgtctccctctcccccgacctgcctgatcagaagctctgggtttccatcccgctccccgaccactgcttttacaagtccccccaggggatgacacgggagatggtgggggctgtctatcagtggagaaggtgggcgctgtctattggtggagatggtgggggctgtctgtcggtgaagatggtgggggctgtctgtcggtggagaaggtgggggctgtctgtcagtggagatggtgggggctgtctgccggtggagatggtgggggctgtctgtcggtgaagatggcgggggctgtctgtcggtggagaaggtgggggctgtctgtcggtggagatggtgggggctgtctatcagtggagaaggtggaggcttgtactcagagcaggggatatttagacttgaaggggccagggaggaaggtactggttctactaagccccatgttcactgggcagccactaagtttgggaccgtgtgtgtactgagtggattccg

SEQ ID NO: 28399 - DNA, 1193 bp, Artificial sequence
  DNA replication origin
gtgggatgacgcgggcgccgggggggtaggtcgcgaggccggggtctccatggcgcaggaggacgggggccttcgaggaccacgcgggcctgggaatcgcctgccaggctaggccggaggacgcacgtgctccgagctgggtcgagggggcggggctgagagccgcggccgggccacggggcggggaggagccgcggacggtgggcggggccagcgggccggggcctaaaaggcggcgcgggcggggttcttgacgcagctgcgggcggcgagcggcgcgcacaatcctcgctcggctgcggctctcgggtgtcccaggcccggccggtaagcagagcatggcgggtgcgggcccgaagcggcgggcgctagcggccccggtggccgaggagaaggaagaggcgcgggagaagatgctggcctccaagcgcgcggacggcgcggcgccggcaggcgagggcgagggcgtgaccctgcagcggaacatcacgctactcaacggcgtggccatcatcgtgggcgccatcatcggctcgggcatcttcgtgacgcccacgggcgtgcttaaggaggcaggctcgccggggctggcgctggtgatgtgggccgcgtgcggcgtcttctccatcgtgggcgcgctctgctacgcggagctgggcaccaccatctccaaatcgggcggcgactacgcctacatgctggacgtctacggctcgctgcccgccttcctcaagctctggatcgagctgctcgtcatccggccttcatcgcagtacatcgtggccctggtcttcgccacctacctgctcaagccgctcttccccagctgcccggtgcccgaggaggcagccaagctcatggcctgccactgcgtgcgtgagtacggggcgcgggccgggggttgggaggtcgtggtccctgggtccctgcatccttgcatcactacgcccctggctcccacatctctacatttttgcgttcctggaccgtcccggcagttctaggctaaggtcattggtcccagaaaccacgtgcgtttctttcattcattcgtttacacttctccccacgggctgggaatatcttcagtgacgggacagcagggtccctgccctgcccttcggtgggcatttcattcccccacttaagcggttcaggcaagtgccagcctcccgttggccccgctgagcaat

SEQ ID NO: 28400 - DNA, 1859 bp, Artificial sequence
  DNA replication origin
cgccgcttcgggcccgcacccgccatgctctgcttaccggccgggcctgggacacccgagagccgcagccgagcgaggattgtgcgcgccgctcgccgcccgcagctgcgtcaagaaccccgcccgcgccgccttttaggccccggcccgctggccccgcccaccgtccgcggctcctccccgccccgtggcccggccgcggctctcagccccgccccctcgacccagctcggagcacgtgcgtcctccggcctagcctggcaggcgattcccaggcccgcgtggtcctcgaaggcccccgtcctcctgcgccatggagaccccggcctcgcgacctacccccccggcgcccgcgtcatcccaccccgtcctcccgggtgcgcctgggcggggcctggcagtcagggcgagccccttcacccactggcccgcagcctctcgtcaagcctgggagcgggcagtgcaccagggctggcctgaggccaaggatggggtttggggtaccccccgaagggaacctaggctcctgtcccggatgggcctaggggatggaaccgcccccacaaccagctcctggggcacgggggagggatgagaggatgacctgaggggaagctcctgcagcctccttccagcctgggggctgcatcaatgtggctggtgagccgcgaactgagacgagggaagaaccgaaccgaggccacccagtaattcccattgtatcccaaaagaatcttgccaaagatggcgatccggtgcccgtagctttgagaagcagtaataacacaggctttgggaagccagcaatctgcctgagctcaatttaatcaacagaaccgggggttcaccgggagccataagacccccacccccaaatctagctggggaattcaaaggcaggcttcagtgtgaaggggctttaaagcttgttattcctggggaatgcgagaggcatcttagctaaaaagggttgagaggtaatttcagttagaggcgagagcaggatgccaaggctcctaggcctggaaacgggaaggaatataaatactgccccgagattgaccagactggtgagcagccaaagacctcttcaaagggtgtgtgtgggtcagggaggaagctcctcggtatcacccccacccggggttccttggcgtgtgtcctaacgagtccttggaagctcacagcaggcatgtggggaggcctttgttctgggtgagcgttcagcctcccagggcaaacacgcaaacaccggttgcagagctgggtgttcacagcaagacagtctgctgggcagatgcctctggaatccacagaatcctgaacaatagccgtggtggagggggggtcagaatccctgtcatgctgggacctctagctgcagccaggaatgtccaggccccaccccggggaggaggcggctgaggaatgccacggcttgtcattctggaccttgctcgccccccggtatggcgggcattcctctgcagtgataaaaccaagcgaaatctcagcagcccaggcagccaccggcaggggagtgcggaggtcacacagatactaacttgtaatctgccgtccacgctgctggctgtggaaggtgcagagagccctccatccgccctattcttcccgctgtgcctgcagagggaaggagacagtaccaccatggctgggcaaactcaccgagtgctcactgagtcctcccctagatagcttcttgtgcaatagggtaggtgccagttaggagcaaggttagagattgtagggccagattttttgcttaggttcaactacgcaaaataaaaatagactttgcatgcatttcaggcactgggctgacgaccggccaccaggga

SEQ ID NO: 28401 - DNA, 1470 bp, Artificial sequence
  DNA replication origin
ttatccttcaccatcaccagccctcccaggtcgtagcggtgcgaggcggccccgcccaccaggagcccatacttctccaccagccggaagcctggcgtggtcttcctcgtgcctgccacgtgcccagtccagccggcccccctggcggcctccactgcagcggcggcagcactggcaatgccactgcagcgggccagcgtgttgagggccacccgttcccccagcagcaggcagtgggcagggccccggacctcggccactctggccaccggcaccagcttcgatccctcggggaggaaccaggagacttggcagttgagttgggtaaatatggcatcgaagaaaggctgccctgccagtaccccaggggatttggcccacagcgccgcctgcgaggggcctgccccgctgaccaaggctgcgtagttgagccctgggcagtcctctcggagccagctgtccaccagggctgccagggtgacgggcggcagcagcagcgccaggcctggggggaagagagaacagctgttgagtttggctgcctctcctgctgtcaggggtcactgtcaaaatatttaacaaccagtgaaactgggaactggcccatcagcctcaagatctaggggtcccaggggggggactgcggtgaggaaggggggcgtggggggaagggaggttgtgggggcgagggtgagggagtgctgtgggcttgatgagatcactgggcacctagttaaatttaaacttctgggccgggcgcggtggctcacgcctgtaatcccagtactttgagaggccgaggcgggcggatcacgaggtcaggagatcgagaccattctggctaatatggtgaaaccccgtctctactaaaaatacgaaaaaattagccaggcttggtggcgggcgcctgtagtcccagcgactccagaggctgaggcaggagaatggcgtgaacctgggaggtggagcttgcagtgagccgagatcaggccactgcactccagccggggtgacagagtaagactccgtctcaaaaaaaaaaattaaacttctgaccgggtgcggtggctcacgactgtaatcccaaacactttgggaggctggggcaggcagatcacttgaggtcaggggttcaaggccagcctggccaacatggtctctactaaaaatacaaaaattagccaggcttgggggtggacacctgcaatcccatcacagtttgtttatccaatactcaccagttgcagctttcaaattcacttaaaaaaaaaatcagtctggccaggcgcggtggctcacgcctgtaatcccagcactttgggaggccaaggcgggaggatcacctgaggtcaggagtttgagaccagcctagccaaaatggtaaaaccctcctgtctctactaaaaatacaaaaattagccgggcgtggtggcaggcgcctgcaatcccagctactcgggaggctgaggc

SEQ ID NO: 28402 - DNA, 1322 bp, Artificial sequence
  DNA replication origin
ccaggtgggcactttggaggcccgagcaacagccccacctgccccctcagccccaaattctgctcccagcaacttgggcccccagaccgtactggaggtcccagcccggagcaccttctgggggccccagccctgggaggggaggccccccgccacaggcctggtgagctgggctgaacccgagcagaggccagaggccagcgtccagtttgggagcccccaggccaggaggcagcggccagggagcccggatcctgagtggggcctccagccacgggtcaccttggagcagatctcagctttctggaagcgtgaaggccggaccagtgtggggttctgaatccccagggttccccagagatccccgaggcaggccttgcctcagtgggaccggggaccccaggatccagcattaggattgagactgccccagcgaagatgcccttcccaggctccttccacctggagtccccctccccgggtctgggtggtggccaggctatgtggactaggggaagcccagcagtgcctctgctcagctacctgggctgtggctcagagacctgggggtggagccaatgccaggccagaagccttcaagatcgcatccagatgaagaacccaaggtactagatagtcaggaaatggcatcgaccagccacctccaccttctttcagtgtttaccgaagccaccaataccaaagagaacgggtcctgcggtgctgaacagcctcggtgtggcgatgacagctggcaggagatgacaggaatccagtttcccagagccacaaatcctgttctccttggccactcacccactgtgaggtcctctaggaaaatacacaaagagaggaccagaccaggcagaggaacattttgtttcatatgaactgtggctttgacccccaaactgcaaggaggaacttgctgggccaagctgcagcggcgctgtcttgctggagtggggacctagagtcagagaaaacccacaggctcctctgcccattctcctccatctgcacacgtctcagcctcggaccctcaccactccatggtgaggaaggccatggccaggggaaactgagtttcatccaatgtggagaggagcgttgtcctagagcagggcaactcccaaactgtgacctctgatcatcgtcccttccagcttgctggagtgtccagagagacagatttgccacaagctaggcttacttataatgctccaccctacagaaatgggaccccaagtacccaatcttccctttaggagaggcaggcaggtgggtgagcagcagatgtagtttccatttccctgggggtt

SEQ ID NO: 28403 - DNA, 2583 bp, Artificial sequence
  DNA replication origin
ggagcagcctcggcccccgccgcgcgcgcgcccagccggcgcctcggggagggcgggggagggcgcgagggagggagggggacagctgcgcgcgcaccgggcgcgcggagggggggtgggacgggagggagggcgggcaggagggggtgtgggcaggggggtgggggcggggggagggagttgttacctggaagatgaagctgctccagttgctgggatccatggcggagggagggagggaggtggctcgcgctcaccctggggcgggaggaggaggcggcggcggtgggggagggggaacccgggaggaggcgcgcggggcgggcaggaggggggaggtggagggtgggggaagcggagcacactacgcgcggggagggcgggcggggggcgcgaggacacacaagaggctggagcgggcgcgagcgctagcgcgagcgcgcgcgtggccagcgggaggggcaggcgcgagagggactctggcgggaggagggacgggggagccacccagcagcccgagtcgccccgagcgcgagacccctgagacggctgctgattggctgacgatggcgcaggtggtgggcgcgcgggagacagggcggcttctctcctcttccccccgccaacgattccactccccctccctccgccagcggccgttatttcgcgcgcacgcgcacaaggccgccgtcgttgccgagcgggagaatgggggagcgcgcgcgccgggggcacggacggggcggggctaatccctgagcgcgcgcccgcctaacggtcgcaggcctcatgcttcggcttccgctttttgcgtcctgcaggccaccgtcctccccgccccaccccagcggtgtatttacaatcctgcgctgagtcgttccccgaagatggcgcccagtggagtcgcctgccttgctcgcggcccaccccgaggcggtcacaccccggtcccgcccccgcagccccaaaaatcaggcggaagcaccggagcaaaaactgtatttacacaacacggggttatacaaaaatttgaaaaggcggagtgaggagacgacggtcaggaggcgccacagcgctggccggcggcgagacccaggatgtttgcctgcaacacaggagggagggagacagcgacgttagagaggggcgcggggcgcaggacaggcagaggaggggcagggccgtgacttcaccttcaggaaggactccatctgtttccccgttatgccctccacgcgttccaggtcctccacctggcgggacaggatcgataggggacagggtctcgggggtacccggtctcccccgcccccgccctcccccagtccagtgggctgctacctggctgaaggggccgtggagctcccgccagcccacgattagctgggccttcttcgggccaatgcgctgaagactgcggagatctcgggctgagccttcgttcagcagatccagtattttttggcgcccatgagccagtagctccgggctgatctgtagctcccagcagtcctcagccttctcctcaggctctagggcatccagggactccagctgggaggcaaagggagatgagtgacacgcagggcagccaagtgctttgggctcctctgccaagactaggagcccagcaccagctacctcctgcgctccagcctcttcctctcttgtcaagtgtgtccaaaatcccgccctcaggtcactctctgggttaattcttattatgcaactagtgaaagagaggtactactcagtacccagtggtaatattagcacccttctcatggagttgctgtggagatcaagtgagttaatgaatgtaaagcacaaaataagctcttaaatctggtccctcatctctaaaagggaaagaataagctgtctttcaaaaagtacatgggagaaagtaatatgaataaatgatacctcccccaaccatctcagtttttgggtagttctagtggtgttcgattctgggtatgtgcatatgtgtggtttcttgcttgactgcttaggtcatagttccctaagttttccctcttaagcttgtagagggtagaagccaggctacacagtggaacatccgctctgcgaggtacatccacatcactgccttccaccctaaatgccctgcaaggaaccatccatcaccacattccaggggtaagcaagttgaggtctgttagtagctggcggccatcatccagttcgtttaaccccaaggccaacgctcctccccctagagcctactcccccttacttctgggctccaggtgtagcctaagcccccagctactttcacctttctcttccggcctttattcttcaggatgtggatctcggcatttggggatgctgcctgctcctgaactgaaagtaggaatcgagaattggagtcagggcaaagggtacttttcaccctccctggtagcccttcgattcttccatttctgattccccagctcccctccatccagagttaacctgttgtgtttccacatgaccttttttatacccgcatttaaaggaatttcagtcagtcttgcattatcttcaatcctctactcgtttgtccatcccact

SEQ ID NO: 28404 - DNA, 734 bp, Artificial sequence
  DNA replication origin
cgccgctgctgccgccgtcgctgccgcgcccccggcccctgccgccgcctctacggtggacacagcggccctgaagcagcctccggcgccccctccgccacccccgccagtgtcggcgcccgcggccgaggccgcgccccccgcctccgccgccactatcgccgcggcggcggccaccgccgtcgtagccccaacctcgacggtcgccgtggccccggtcgcgtctgccttggagaagaagacaaagagcaaggggccctacatctgcgctctgtgcgccaaggagttcaagaacggctacaatctccggaggcacgaagccatccacacgggagccaaggccggccgggtcccctcgggtgctatgaagatgccgaccatggtgcccctgagcctcctgagcgtgccccagctgagcggagccggcgggggagggggagaggcgggtgccggcggcggcgctgccgcagtggccgccggtggcgtggtgaccacgaccgcctcggggaagcgcatccggaagaaccatgcctgcgagatgtgtggcaaggccttccgcgacgtctaccacctgaaccgacacaagctgtcgcactcggacgagaagccctaccagtgcccggtgtgccagcagcgcttcaagcgcaaggaccgcatgagctaccacgtgcgctcacatgacggcgctgtgcacaagccctacaactgctcccactgtggcaagagcttctccc

SEQ ID NO: 28405 - DNA, 1113 bp, Artificial sequence
  DNA replication origin
acgaagccatccacacgggagccaaggccggccgggtcccctcgggtgctatgaagatgccgaccatggtgcccctgagcctcctgagcgtgccccagctgagcggagccggcgggggagggggagaggcgggtgccggcggcggcgctgccgcagtggccgccggtggcgtggtgaccacgaccgcctcggggaagcgcatccggaagaaccatgcctgcgagatgtgtggcaaggccttccgcgacgtctaccacctgaaccgacacaagctgtcgcactcggacgagaagccctaccagtgcccggtgtgccagcagcgcttcaagcgcaaggaccgcatgagctaccacgtgcgctcacatgacggcgctgtgcacaagccctacaactgctcccactgtggcaagagcttctcccggtgtgcacggggcctcggccgcccgctaggccgtggggagggagggacgcgacggaggtggcctggccgtggctggcggggagggaggcggctgctgaggctggggaaggggagccactcccagggcggagggaggaagcctctcccggttaccagggagcaaggggtggtcctttgtcgaggaggtgggccttggggttgacggaagcttcgcgtgggaggaggcggcggcggcggcagcggctgctgggctccaggggagggatttcctgcttaagtgtcgctgtgacggcctgggctccgggaggaggcgcagggatcctcggaaaggcctgtggtgcggtttggtggatttggggcgcaccacctccgccctaaccccaaccccaacgtgtccccaggccggatcacctcaacagtcacgtcagacaagtgcactcaacagaacggcccttcaaatgtgaggtaggaagcccgcctcctcctgtcttggttttcatgattttgatcctcatggtagctgtctgagtcagtctctcagaccccctttttctctctcttctttttgcctttttgctccattttctcatcccttcttcaaggcctcatcatgtcactcccatttcctacagatcaaagatccccaaggctctgattcctttaatctcttgctcccccctccccagcccacc

SEQ ID NO: 28406 - DNA, 793 bp, Artificial sequence
  DNA replication origin
cgggcaccacacaagccaggccccaggctcagggaggggctgtgtctaccagccccaacagagcagttggccccaggctaccaaggataccgtgggaggaggacagggccatctgaggagggcatcccccgcctaggagatcagccccgtctctggggtctccgcctggctgacccccgccccatcccaatccaccccccaataggcttcaccacggcagcatacctgcgcatccacgcggtgaaggaccacgggctccaggccccgcgggctgaccgcatcctgtgcaagctgtgcagcgtgcactgcaagacccctgcccagctggccggccacatgcagacccatctggggggggccgccccccctgtcccgggagacgccccccagccacagcccacctgctgagggggacccccgcacccaccaggcaaggcgtggggcatggctggggggcgggatggggggtgtgggggacaacggggctcaaagggcccaataggggatctcaggaaggcgagggatgcccatgtaccactcaggctagggagacttctgggcacagggaggatccttgagaactgctctgtctgggtgaggatgcaggctgaggcctctggggtccagataggaagtgagcaacggctgtgtcccaggggaagcaggctgggaaggtgtggggtgagggcaaggctcttgccattcagatcgcgctgtgatccgtggtgtttctcctgtgcaggtactggtgaggtttgtccaatggcggcggcagcggcagcggcggcagcgg

SEQ ID NO: 28407 - DNA, 1151 bp, Artificial sequence
  DNA replication origin
cctcgccttcggtgggctggcgcctcctcccgatggttcagcccgcccagcaccaccaccagccctccagacacccgcattcccgtgcagtccgcccggcgtcagccgtcggtcggtccactcctacccgcagcctcagtctgcccgggtctcacctcgacgccggcctccggacagctcccgctgccgctgctggcttttgcagcagccgcagcccgggagggagcaagtcagctagggagggagggaggcggcgggtctccctcttctcctctcccgtgtgctcatcccctcctctccggtcccctcccctacgctccgccgccgtcgccgcccccgcccctcgcgagcctccggcccctcccgccagcccaagggagccacgcgttacccaggcaaccggcccggggaccactcgcgccccctccctgccccttctcacgcgcgcctccaggagagacgcctccttcttaagtccccggcccctcccgccaacggtcaccgggattcctggaagagacggggatttgggggaaacggagagggttctgcgaggagacgggaccagtgagacaggcaggaccgggtggaggcgtctctacgagcaggagggcaaggaagatggggcaagacgcggggaggctgcagaggaggagcagggtggggtttggagagaatggagcctgcagaaaggagcggcagaaactggcgctggaaggctcaaaaaaggggccctggaaaggacggagcggggacaggaaagggaattccaaggggcaggaggagctgggcagaggagcccgtgtaaacacagagtggcccatgcccaggatgagggacaggtgcagctttcattctctacctcgctgctcccagtcctagggctcggactccccagcctttccgcagccgcatccacccaccatggcctcagggccgtgacgcgcgtggggagggatgcggctgggggctgagcagcggccatgagtgtggacgggggagggcggcattcccgtctggcagctctgtttgggtttctgacggggcctcttcaaacctccaggggctattctgggcctgtccgagttgggaattccccagagacctggaacttgctctccacagccacagccttggccccgccctgtatc

SEQ ID NO: 28408 - DNA, 1024 bp, Artificial sequence
  DNA replication origin
tgaccgttggcgggaggggccggggacttaagaaggaggcgtctctcctggaggcgcgcgtgagaaggggcagggagggggcgcgagtggtccccgggccggttgcctgggtaacgcgtggctcccttgggctggcgggaggggccggaggctcgcgaggggcgggggcggcgacggcggcggagcgtaggggaggggaccggagaggaggggatgagcacacgggagaggagaagagggagacccgccgcctccctccctccctagctgacttgctccctcccgggctgcggctgctgcaaaagccagcagcggcagcgggagctgtccggaggccggcgtcgaggtgagacccgggcagactgaggctgcgggtaggagtggaccgaccgacggctgacgccgggcggactgcacgggaatgcgggtgtctggagggctggtggtggtgctgggcgggctgaaccatcgggaggaggcgccagcccaccgaaggcgagggaagccccgggagaggggctgacaggggatcgaaggagataaccaggtcccccagaaaggggcgggagcgtcctcgccctaaacgcgcagcaagaaaacccgcaccgcctgggagcccagggaggaggggaggatgcagagggagtggaatgcgaatgtcgggtcctctgcccagtcggcctgtcggagtgctatttgcacagctcgttgattttggggtgctgggatctgagagtctggatcttgttggatggacccagggagagaccctggagaaggtcctgtttacaaaagggttaatcttccccagggctctccaagcagaagactttgagtagagcactcctcccgcagggatgtcccaccctaaggcaaaggaaaccccaacttttcttcctctccctagaggcagtgcaaggctggccctgagacaggaatgtggcccaattgggcctgcagtgctgagcgccctcttccctcctcaccccaagcctatctcctcctcttccagggtttgccgctg

SEQ ID NO: 28409 - DNA, 944 bp, Artificial sequence
  DNA replication origin
aggagcaggacagaagctgtaaacaaggccgctcaggctcccttggtccttaggggtgggggccagggccatcagttgggctccccccaggggagggatgggcccaaggcagctcccaacaggaagaaaagtcttgggatgcggggcagagcccctcacttatacactgtgggagaggagagggaaggacagacggggggagggggagacaaggagagacaaaggagaggtaaggaggacagacaggagagagcaggggcaggggttagtaaagctgcccttgccaacccttccattcctcccctgcctgtcccaagcccccactcaccgcctaagttgatgacgcaggaggcgatgatgatgaggactccccccaccagcgccacgatgcttaagagcttggctacccggcccagacgctgggccccgtccacgtccccctgctgcaggctgttccgggactggggttagggcgaggggtggaggcacatagccggggtcaggagaagccagcccagaagggatcaggtggaaaagtcatccagaagagagagaggccagccccatagatggcgggtaagggaggaaggaggagtgaaggggcagggggaggagggcacaggtcagcgaggctgtgtgacacgtgtttccatatccctcccacccaaaggggcagggcagtggtggctcagagggttaggtcctagggagaggcaaacaaaggccctggaattggggaggtgggatccatgcagagaggagaggggaaggaaggcatgattactccagaggctctattgcagcgctggcgggaagctgggagccacagcaggcctgggctagggtcccatggggctcaccatgacagcataagcgaaggccacgatgttgacaggccacatggggcagaagcaggacaggatggcaaggatgatgtagtcccg

SEQ ID NO: 28410 - DNA, 935 bp, Artificial sequence
  DNA replication origin
ccgccaaatccgaaccgcgttgtagctcggtccccgcctcctcagcgggctgtcgcgtgcaacaaacctcccccatcatcttagaaaataattatagagcgcggcgccccgccctcgctcctgccagtgggcgctttggtcctattttttggattatttcattacgaagcacgtgaatgaatctagcccccacaccttcaagaaagaaactcgcggactggggttgaaaagcccaggtgggcgggtcaactccagctgacctggaagggtcagcgccgcgtccctcccttctcccctgcgtgcgttcggaaccagtactcgccaccctcacccgagtccccatacgaggcccggcttgccaactctgcgacctgccaggcacccttgggtgtccgaccctgggtggtcccagcagagaacagtccgagcctggggttggggagccctctcccaacactgctccctgcccccaagcctcgtctaagtgctgtcaattttgcagagtaaacggtgacgggaggttggagaagaggatgcttaagggagatgaggaggcaggaagaggaagggggcgggacgtggagaggaaaggggagatgataaagaagggaaggaagagaggactgagggttgagagatgccaagacaatgaaagttgggaggaggcggccagggtggaggtccagagaatttggggggctggaagaagtgcagggaggccaggagagatgcagggaggctgagagcgcagagttggggaggtgttcagggaggtttccagagtgcagggaggtttccagaagtgcagggatagggggccaagaggccggaggggatgcaggcattagtgcagggaggttggaaccagtgcagggatgaggcaggcctacagttggcagaggagcctggcaagatgcaggagcaggacagaagct

SEQ ID NO: 28411 - DNA, 1096 bp, Artificial sequence
  DNA replication origin
ccggggacgggcggtctggccgcggagtcccctgcgggagcgtgattggctggaaacggtcccgaacccccaggggagcccgatccctgggggaccctggcttcggactccagtatctgtcgtcgcagggtccctgccctagtggcctatgtcccttgctcggggccatggagacactgcggccagtacggcggcgcctctgtctgaagaaggggaagtgacctccggcctccaggctctggccgtggaggataccggaggcccctctgcctcggccggtaaggccgaggacgagggggaaggaggccgagaggagaccgagcgtgaggggtccgggggcgaggaggcgcagggagaagtccccagcgctgggggagaagagcctgccgaggaggactccgaggactggtgcgtgccctgcagcgacgaggaggtggagctgcctgcggatgggcagccctggatgcccccgccctccgaaatccagcggctctatgaactgctggctgcccacggtactctggagctgcaagccgagatcctgccccgccggcctcccacgccggaggcccagagcgaagaggagagatccgatgaggagccggaggccaaagaagaggaagaggaaaagtaaaggcacacccttacaccttgtcccggggctgctcccctgatggcgggaggaaatagggaggggaaaatgtgggacgctggaacctttgaaagtggagggagggaagccagcgggggaggaggaacgggcaggggagaagcacacgtgtgggtgggagggaggaccgccctcacccttaactatgttcacctgtcccagaccacacatgcccacggaatttgattttgatgatgagccagtgacaccaaaggactccctgattgaccggagacgcaccccaggtacaaacgaagaggaaacagttgggggaggtgaagggcctcggctcagttacccaagatcggctcccctagaggcctttgcttgctgcctcagctcccacacaacttacagctgcaggagagagtattcacccagtagcaccatctttatgacttagattactaccttgtcttccttttt

SEQ ID NO: 28412 - DNA, 852 bp, Artificial sequence
  DNA replication origin
tttccttttccgtttctaactttgcttgacgttaatggttccttcctccctctcctcctctgcgctttggtacgagccaagggagaggggcggagggaggaaaagggaaaggaagccgacaggccttaaaggggccgcaactatttttttaagccactttttcctctctccaattttgcaacgacgggcgcggaggaggaggttcccggaagccacgcgcagctggagcagcggcgaccgcagctggaggcccggagcgcctgcggggctggcagaggcgagggaggttgcgggtaggaagggcggactgcgcgcgccccctgcgtcccgcgcacctcggggccggtccatgctcccgacggctgcgggcttcagcatctggggccaggttggggcggcggggtccagggcgcaggtggtgcggccgatgcgccgggccggaggctgaggccgcgctgcggggctgggacagcactggcatctccagagcaggcccggggcagcaagggaggcgccgcgatgccagacgaaaatatcttcctgttcgtgcccaacctcatcggtgagtgctgcccacggccccgggccgaacgagagggcgaggggccttggcgggctccctgatcctgccctgtctccccgcgtcccgttccaaggttatgcccggattgtcttcgccatcatttctttctacttcatgccctgctgccccctcacggcctcctccttctacctgctcagcggcctgctggacgctttcgatggacacgctgctcgcgctcttaatcaaggtgacagacacccctctcagccagccttggggttcaacaatcccctcctcccttcccctgc

SEQ ID NO: 28413 - DNA, 1893 bp, Artificial sequence
  DNA replication origin
gctaaggggattctcggccagcagtgaggagtgggtactgggttagcgggtgagaggggcatttcacaggtcctagggctggctgtgagatggatgagatgggcacagactcctggagagttcagctaggggtgggaggggtcagggactgtaaccaggcatagtgggggcagcggttctctagacacggtggtcctgaggcagggggttaccgcgtttggatatctgagtcgcttggtcttgtgactgcttttttttgatgggcacagggttcaagtggcagcaagcagtgcacaaagcctcctccatgagttctgcactgatctgggacaggtattcctcagaacgagataacgaagcctgggaaaggaaaagccggaggggttcagcctgggagctcccacatgggagtgctggctgtgggagttcccaggctggggcctgtgggtccaaggagcttgctcctgaaggactgggccttgagatttagctagaaagctctggacctgggggaggggggtttggtgggggtttagagtcagggcctagtgctgagagctatgagtcggggcttcaggactcagggttgaggctagagtctcagggcccgtggctcagacctggcacggggtgcctctgcctgggaggctttcacttcattacattcccacctctagggttccctgcagtgctcaccggacctcctctcaaggagggtgcagcttgagatggccagctgctcttcttctccccctcattccccatcggagtggacgccatccccctgggaacagtcgaagcctgagttgacctgagaaaccagcccgctttcccccagaacccagtccaccaccattccccgggcccaggtttaaacaaggcctttagaggaaacatcccgctgcctcattccctctcacaagaaaaaataataataataataaaggttgctttatatcttcgggagtgagagggaactcccgcaaccccctacccctcaccccttcgcctggtgggcctctccttccttcttccctcccaagcaccttcccaagccgaggcagccgacttgacgccccagacctggcagatgggtggaaaccttgggctactcggcaaaaggagagacgtggaggcctaaggacctctggtataggtcgtgggggatggagaatgggagatggggaggaaggctggaaaagggggagccggctccgtgtcgctaccggacgctataaaacccttggagtctgcagaggttccgcagcctcgttgctaggagatcaggggttctagaactaaagacagaggaatttcctagcgcgccccgtttgctcctccagcctcccctccgtacccctccaggtgcctccttgagggcagtgaccccaagcgccagacgcttgagaagcttgggaggatgacgtagggtggagcctgcgacctaatcctcccatcacaaggggcacgcgaaaagcaacccatctgcagggcgctctggagcctctctagccgcctagagcctgcgagagcaaaggcggctggagacttagggggcggggagtaaagtgaggactgcaccaaatctcctggcctcttggggacgcaaagactcaggaggaggaattttatcgccttatctttgcctccaggaagtcataccctccacaaaaggaaagcagagatttttattcggtcttctcttttaccctttccttttccgtttctaactttgcttgacgttaatggttccttcctccctctcctcctctgcgctttggtacgagccaagggagaggggcggagggaggaaaagggaaaggaagccgacaggccttaaaggggccgcaactatttttttaagccactttttcctctctccaattttgcaac

SEQ ID NO: 28414 - DNA, 1220 bp, Artificial sequence
  DNA replication origin
tcaagaccatcctggctaacacggtgaaaccccgtctctactaaaaatacaaaaaaattagtcgggtgtggtggcgggtgcctgtagtcccagctacttgggaggctgaggcaggagaatggcgtgaacccaggaggtggagcttgcagtgagctgagatcacaccactgcactccagcctgggcaacagagcaagactccgtctcaaaaaaaaaaagaagaagctccatggctcctgtccttcctgtccaattgaagctgggataagagtactatcccactgtgtccatttctattatggaaacttatccagactgtattataattggccatttccttgtctgtccccacactgaactgtgaactcttcaagggctgagactgtaccattcatttcagtgtcccaagctcctaagacagggaccaacatatagtgcaaactcaaaaggtttggttaatatcgaatagccttggcagccatggaccctgcatgtaccttttcaccaggagttggcaggaggtatgccttgctgcaggtacggtttctgtccgagcaggagatggtggaagagaggggagagggctgagaattcagaatttgaggatcagggcagaatagaatggaagtgcacggttcaaaaattcccccaccctgctgggatattgtgaaaccctcactctctcccctccaggttcctcacctctctcccaggacaaagagcatctcccttgaagcctcactcaccaggtgtctgtgcctcaggtcttggtgaagaatgctggaagtagaggacctagtcagagaaaggactatccccgtggccagaagagatgcggccagggcagacggggctaaggggattctcggccagcagtgaggagtgggtactgggttagcgggtgagaggggcatttcacaggtcctagggctggctgtgagatggatgagatgggcacagactcctggagagttcagctaggggtgggaggggtcagggactgtaaccaggcatagtgggggcagcggttctctagacacggtggtcctgaggcagggggttaccgcgtttggatatctgagtcgcttggtcttgtgactgcttttttttgatgggcacagggttcaagtggcagcaagcagtgcacaaagcctcctccatgagttctgcactgatctgggacaggtattcctcagaacgagataacgaagcctgggaaag

SEQ ID NO: 28415 - DNA, 1146 bp, Artificial sequence
  DNA replication origin
ccttgctggcgctgtccagggtccataagagctaaggtgttcaatgaaggcccacacagcccagggagaagggagaggggaggggagagaagaggtgtgggagtgggagtatgagggcagctgggagcccctcctccgatcttggccctcagtcgagcctgggaccatctgagcccctgcaggcccagctgatggaggagggaggaagagttctagaaaatatctctctggagaaggaaggggtgtggggaagtggagaagctcacacaacttcacctcctaggtctgcccctgaaggaggaggagatattgccagagcctggaagtgagacccccacggtggcctctgaggccctggctgaactgcttcatggggccctgctgaggaggggcccagagatgggctacctgccaggtgaggcccccagagtggcaggagtggcctagaggcagagggagggatatgggctcagggagatggggagccaggctagagaagagcaggcagagagagactgcagaggaaagagcctgcattcctgtgagattcagggaacacagaacgagactgtcagagaaagtcaaacctgggcacagacagaaccagagagacagagacagaatgattaggtgacagtcagacagaaaaacagacacatagaaacagagatggaaattcagagaaccagactcagagaaatggtggaagacagagacagagagaatgaaacacaaaaactagtggatctcgaatcatgaaatcagagtgcaatcagaatactaaacagggaaatggggaaataaagagttcgagagagaatgagacagaggagagaggagataaccagagagagaacgtgatctgagtgaggaggcagagagagaggctcagggagaggagtatcagggtggaaggggctgggtggagagaagggaccagaagagaaagaggggggactcaggctgtggaagccttgggaggaggtaggggctggggtggggaagggaaaggtggggggtgctgtaccttgtgcgggaggcttttgtggtatggcaggggaacccctagcttccctcagccctgctccccacccaaggtcctccatgtgctcctcctgtgctctgatattccctgcactgtcccag

SEQ ID NO: 28416 - DNA, 1321 bp, Artificial sequence
  DNA replication origin
caggcgcctgagcaggagggtaacccaggccacccggccccttcggccctctcggccccaccccctgcagccggagccgcgccccctccaccacagagccgcgagaagaggacagaggagactgagcaaaggggggtgggctccaggcgacccctagcccaattctgcccctccatcccaaggggcagagaaattgtctttctttgctgactcctacgaggaaaaaaaaaaaaaaaaaaaaaacaattaaagggaaagataaacggagacggaggaaaggtggcagccagattacttagagaggcacagaggagagagatcggggtgagtcgccatggggactcccagggcccagcacccgccgcctccccagctgctgttcctaattctgctgagctgtccctggatccagggtaaggacatgagactgtgggggtgggccccaggaaggcgtccagcggggtcctccaccctcctttctcttaatatcctgggtcttccgagcacatgggggaggggagaggcacagctgatggggaaggggcaagccagagctttcaggcttgaacccgaagccccttaaccctcaatattgagaaggcagagaaatgaatgagagaagcttttagcagtgtctcaggggctagatccaagaaggagggctgggaaagttggggggatgtctgcggaggcggcagaagcatggagggacctgggtgggagatggaggtgctgagagagatgccaggcgctgtacacacaactgttcttggatgaatggacaaagacagatgagcagaggcagggctcaaagaccagattttcagtcccccactctgacccccagccagactccagggaaggaggcagagactgcagaggaccagagagagagagggtgggggggagagagagagagagagagagagaaaagacagccacactgcagagacagaaacccagagagaaagccaggcactgcggaagcaagggctgggaggtgcggccagatcctctgcagagccccagggttggggggagatcaccactgaggtgaaagggaaggcagcaccggcgacccctctgccttgctggcgctgtccagggtccataagagctaaggtgttcaatgaaggcccacacagcccagggagaagggagaggggaggggagagaagaggtgtgggagtgggagtatgagggcagctgggagcccctcctccgatcttggccctcagtcgagcctgggaccatctgagcccctgcaggcccagctgatggaggagggaggaagagttctagaaaatatctctctggagaa

SEQ ID NO: 28417 - DNA, 1139 bp, Artificial sequence
  DNA replication origin
gacgccttcctggggcccacccccacagtctcatgtccttaccctggatccagggacagctcagcagaattaggaacagcagctggggaggcggcgggtgctgggccctgggagtccccatggcgactcaccccgatctctctcctctgtgcctctctaagtaatctggctgccacctttcctccgtctccgtttatctttccctttaattgttttttttttttttttttttttcctcgtaggagtcagcaaagaaagacaatttctctgccccttgggatggaggggcagaattgggctaggggtcgcctggagcccacccccctttgctcagtctcctctgtcctcttctcgcggctctgtggtggagggggcgcggctccggctgcagggggtggggccgagagggccgaaggggccgggtggcctgggttaccctcctgctcaggcgcctgggtccactgggctgtctggaccccaagctaggggactggggaggagaaagacagcttctgggggtttagggtggggtcgaggatcgagggggtctccactgggctctagcggggcttgtcggggaggggaaggggtgggttggggaactgggagagccgaagctcgggcactggagctgcgggagggagaagctgagaaaggtatcgagcccacgtcagatcctggggacgggcggagggaggggcctgggatttatttgacggggagggaggaggaggaagtgcagatggaggagggagggatcatacgagccagggccgtaatcctcactcccgcggcccctaggggaggcaaaggaaactctctggtcccagcagtaattagccccctccgcctgccattccagcacatctggaatctgaatctcctcttcccagggtgccgaggggctgcatagcttggttcgcgcctgctaggcccccaattatgccccctgttcacattcagacctcccaaggggcttcccttccccttttacagtagctcgggtggaatgggctctccctcctccaggggaatagagagcttccacgattgtgacaagtctcgtgggtgacgggccggggtttggggaggagagacagacccctcctcttccataaaccctgaccccggccagctaa

SEQ ID NO: 28418 - DNA, 1572 bp, Artificial sequence
  DNA replication origin
ccctcctcttccataaaccctgaccccggccagctaacaggcggcctcggctctgattttccctccggagcgcccttttcagcaccagcggcgcgcggacagctcccctcgccccgccggggcgggcccggcccgacgccgcccgcgattggctgaggccgctttcggtgtttgccaggctcgcgggctcccgggctgcctagggccagcgggagtcacaggccgaccgaccgacggaccagccgcccgacggactggcctcagcatccttgcccgcagtcccgggcgcctgcccagccgtcagtccgcgctcgccccgcccctcaggccccgcccctcaggccccgcccgatacgacccgccccttctttcgcattgcgggacggctggaggctggcaccgtggcccctgcgccccacgtggcgccctttccgggcggggggggtggggaggcacctccagcgacaactctcccccctcccccggcacccggctgatttgctgtgccactgggagggttcgggggtggctgagctgagagggctccgggaaggagtgacgtcagggtgagtgggagcccaggaaggagcgagtaggagagagggagcgagagccaggcaggaccgcagggtcggggctagtgaggagcgagggcaaggagagagcagtgaggccggagagaaagaagctgccgcggaggaagacaggctgcgggttcccgggactgcaggtccaggcagggtaggaaccgctgcccaggggagctaggaggaagcggggagagagagcgagcgaaaagcgggggtggggaggaaagggggagattgaggtgggagagagaagcagagcgagagagaggaggctgctggaaggagaaagaagagggtgaggaggcgacagagggagaggaggaagaagaggtagaaggagagagaaaggggagagaaaggagagaggagggttggaggtgcatgaaggaggggagagggagcttcagcgtggagagaggaccgcggaaggagagagagacagcccagagtggaatgtggaagggaaacagtccagcggggagccagggggcagccatggaagggacaggtggggagctggggggacaggggaactggggtccggaggacgccccaggcctcttggccagggcctccctgatcatgctcccgtggccactacccctggcctcctcggccctcaccttgctcttcggggccctcacttccctgttcctctggtactgctaccgcctgggctcccaagacatgcaggccctaggggctgggagccgagctgggggtgttcgtggtgggcctgtgggatgctcggaggccggcgggccaagcccagggggtcctggggatcccggggaaggacctaggacggaaggcctagtgagccggcggcttcgggcctacgcaaggcgctactcctgggctgggatgggtagagtgaggcgggcagctcagggtggcccaggccctgggagagggccaggggtcctaggtattcagcgcccaggcctgcttttcctaccagacctgccttcagccccctttg

SEQ ID NO: 28419 - DNA, 869 bp, Artificial sequence
  DNA replication origin
agtactgacctcaagggggaggactctgccagttcctagaatgagagcacttgggataggctcgccactatcactttgtcctcacccaaacccatttactgatgactgagctgaagctgagaagcagaaaggacctgcctagagcgtcaggggtaagaggcgaagccgaatctgcgagcaggcacagatgttcttgtaggccccccgtgtggccgtggccctcgccttgggcagaagcagggctgtgctgcatcccagggtcccgcccagtgccccgcaccccggcggtcacctggtgtaggagtacttgttgttactgcggttgtgcaggagcttcaccacgggctggcgggggagagaggatggacgagaggggtgaggctgcagggagaggcccccccagtgagcctccaccctgcagggcttgggggcctcaccttggaggtgctggccaggagctgctgctcctcccggggagatgtcaccatggggatgaggcacagcggggacagcgtctcccttttttgctggggaagaagcggaaggtggttaacagcacaaccaaaggccacgtactcccccacttaaaagccttcaaaagctggttgggaacaactccagactcctcagtggtccgcagggctctgcaggctccaagctccgccagcctctctgccactctccctttgcttgctgggccttggtcccacggacaccttgctgcttcacacatccagcttgtgcctgccccggccactggctgtgcccctgcccgggatgcttctttgctcagctgtcagcgtggcgtgtccgtcatgccattcagatcgcaggtcacacagtgcctcctcagggccagccctccccag

SEQ ID NO: 28420 - DNA, 1567 bp, Artificial sequence
  DNA replication origin
ctgttaacccccgaagttaattctcaccatcctatttaattaaaatgtctacctccccccgtccagttcactgccattttaacttttatattcttcatagagcttactatcaaaaaaagaaaaaagaaagaacttactactatctgcaattgcatatgcatatacattttgtttacttgcttattggtcttctgatctcccacttccctaaaaaaagggaatttccataattttgtcaggttcatttacctatctccagcactaactgatattttacaaatacttattggacaaatgaattcttcccttttttttttttttttttgagacagtctctctctgtcgcccaggctggagtgcagtggcgctgtctcggctcactgcaacctccgcctcccaggttcaagcgattctcctgtctcagcctcccgagtagctgggctacaggcgcacaccaccacgcccggctaatttttgtatttttagtagagacggggtttcgccatattggtcaggctggtctcgaactcctgacctcaggtgatccaccgcctcggcctcccaaagtgctgggattaaaggcgtgagccaccgcacctggccgaattcttcacctttgatacttgaaggcagatctccgcctctcaaatttttattctcctgctctcacagtcctcgttaacccctcccttaagactctcccactcccaaactccaaaacttcaaagtctcacttgggcacgaagggtccatacttgaatgcaacactccaagaaggtaaggttcacctgccaaggagacctgtccaccctccactctggtgtccctggcaaacccaaagcagcctccttctgcaatgtgtgtatacaggtggattcctagagtgtacagggacctgtgtcaggggaacacagaggcaaacaagatctcccagctctcctggctggctgtgagcagttctgaagcagagagggaaacaaaaggctgggcagtcggaagaaactgaggaaggctgccaggagtagtactgcaggcagcagggctagttcccaagtcttgagctgaggggtgaagggtgggagaggtggtcatgaggattatgaactgacacgttcaatcacttaccacagcgcctggcagttaggggttccgtaagtgttggttattgctgggggtaaaggattgggggaggagaagagaaattatgaatgagaaaggggaggagatgggatgtgggggctggagggagctgagaatgagttgactggacagtagcgggcagagagaaggggcatgaggagccccggtggtgagagactgcggggaacgggagttgggggtctggggtgggggcacggtaggggcgccgctcgtacctccggcatcggtcagcacctccacgcggccgctgaacatggctttgagcatggtgtcctgtcccgtgagggtgcgcagcgtggtgtagtgcaacgagccgcccacgttcagcttcacgtatttgctgttcggggtcagcggcttgagaccgtaggcggcggggccaggctcgagacccgagggcttgggg

SEQ ID NO: 28421 - DNA, 1613 bp, Artificial sequence
  DNA replication origin
agggtgcgcagcgtggtgtagtgcaacgagccgcccacgttcagcttcacgtatttgctgttcggggtcagcggcttgagaccgtaggcggcggggccaggctcgagacccgagggcttgggggcttccagggacggggccgcggcggcagccgggcccgaggcctccgccgacatgccgggtagcagcggcggacggcgatcccaggatctctccgcgccctgcggcctgctcccgaagaccctcggccggcccccagcccttgggccagaccgctcggcgcacacgcccactcaccgcagctactctgcaagaccggccctccgccccatctcgctcgcaccacccggaagccggcgccgggcagctgcgcaggcgcggccccgcccctgaatgggggcggggctgcgagtatggagcatgcgcagtggcctcgctgggggatcccgtagaggtttggcgtgtggcctgcgggttccccgggcgggtcgacgtgcgctcctctctggtctcgagtcaccaggaccagatcgaggatgcggccgaccccctgcccgatgtggaaagcgaagtctccacctcgtgattgggtctctgctgtcagagagcttcacgagcttgaggggaaacagacagagaggtctgggcattgggcagtttcccgcctcccagccccgcgcactgaacagactgtgaccagaactgcgaacaaagcgcggagggaagctcttaaaggaggccaaagcggccgggcgctgtggctcacacctgtaaccccagcctgtaagcctagctactcgggaggccgaggcagaaggagcgcttgaagccaggagttggaagctgcagtaatccgtgatcggaccgttgcactctagcctgggcaacataacgtcctttgaaaaaaaaaaaaaaaacagaggccaaaacgggtagcagtggtgcccgggcaccaaggatggaaggcctctctgaggaggtgatgccgagctgaagctgggaagcggatgtgagggaagagttccaggcagagggaaggcaaatgcagagatcctcaggcaggaacactgaactgttctccgtatttgaggagcagagggcgtgtcagtggtggccgcagcagctgagcaaaggtcttagaatcccagctaatgtcgtgggacctagcacccaatcccaaaagaaagaagaatagataggaacccactgttgacaagaaggtgcactgagaagtgtttttatctgacccgatctgcatccagtttagaagccgatacatcagggatttaacaatctgtcttaatgtctagcaaggggggttgctggagggaaaacacagagtcagagttctatcttcagccctgccagcaggtccctgggagatgctagacgagtgacttttctctgggcgtggttggtgtaagggatgcacacgcaggaggaaggtcggagtgtaaatgtgtgacctgggcctgttactgggtataaatgggcctgtagtgaccgggagctcatgttctaccaaaggggttgccaattttctgatttcgagtgtggcggtgtaaaagagaaaagcaactgctgccagctgggagctggtttgcaccctcact

SEQ ID NO: 28422 - DNA, 2062 bp, Artificial sequence
  DNA replication origin
agtggcagccctgcaactctgagcggatgccgagtcctcaccgggaacccgggcgcggctggtctgtgctattggcgcgggtaggggacgcacagcccaaaaatgcccgcgacaagcttctggggcagttctcgccagtctctctggagggagcctacgggttctgcgacgtttctcgcacttgctccctggcctcgctcccgtttccacccctcccacggaggttttcctttctggtggctccttccttgggtgtccctttggtacgcccccaccctggcggtgagctgcgaggctggcgcccgcgtggccactgcgcatgcggacccggccgcggggcggggccgcgcgaggaggagggtcggggacggaagcgcagagcacggaccccgccccctcgcggccccgctcgtgacgtcgcggggggcgccggcctccgcccggccccgaggggtaagagcgagcggctggcggatccgacgcgcgagaccgggaggggacgagggcgttgcaatcgttcggggcgggggctttccggggagggggtgctcaggtgcaccagcggcggcggaccctcagactctgccctcccctccctttaacccccttccagccggacgggaggcggggcagggctgagcatttgtgacacctacatttccgtggctcccttcttttcccccgacccctgtttatctcttcgccttccagaagttcttttccatcaggccgtcgcaccttgcgtgggaaggagcaccccacttggaagcaggaggcggggttcagatcttggccctacccctcctgtgttaaagtccgcgagcctcagtttccctcacagtattttttgcctcgccttacccggttttgaggatctgtacgagaaagagaaaggaagtggacatttgttgaattcctgcatggccaaataccacgcagactgcttcatccgccacgtttaatccttattacttggtgttctcagaactcccatttcatggattcttaagctcacagagtcagtgaataacagaaagggattcagatctagccgtttagctgcacagtggagttcttctccagagtcttcccttgtctgggctctggctggaactattcctcagccaaatcctcgccccagaacagtgcttcctgtttctccagctgagaagtctccctttcagtttccttcttccagcacggagtacactgctctgcctccacttagattacttcagaaatgaaatgcagcaaatatttatccagcagtgcagggagttgaacttttggagtcgggaaccttggattcttgttctggctctgccacttactgtgtggccttgggaagtcctttgtcttctctgagctttcttttctctttgcgtaaaagcggtgctcttgtcccattctccctccctgtcttccagcaggctctccccggaggctcagccccctctgctccccatgggcaactgccaggcagggcacaacctgcacctgtgtctggcccaccacccacctctggtctgtgccactttgatcctgctgctccttggcctctctggcctgggccttggcagcttcctcctcacccacaggactggcctgcgcagccctgacatcccccaggtaagttccccacccccgtacccgctcttccttccaacctagacaggcttttgctgctaatctcatctcacccgtcttcttttgctcacaggactgggtctcttttttgagatcttttggccagctgaccctgtgtcccaggaatgggacagtcacagggaagtggcgagggtctcacgtcgtgggcttgctgaccaccttgaacttcggagacggtccagacaggaacaagacccggacattccaggccacagtcctgggaagtcagatgggattgaaaggtgagatcagaggctgggtgtggtggctcacgcctgtaatcccaacactttgggaggctaaggtaggtggatcatttgaggtcaggagttcaagaccagcctggccaacatgatgaaacaccatctctactaaaaatacaaaaattagccag

SEQ ID NO: 28423 - DNA, 1504 bp, Artificial sequence
  DNA replication origin
gtccggccgcacggcccctctcacgccggggtccgagggtgacagcccccactcccgccccggcctcctccctctcccttctctcttccgagaatagctgaacgattgtagctaaggtgctgctgacggtccccgcgccctctctgcctctcctcttctccgtctcagcctctctccgcaccacagccccggtctcgtcccggtctccctctccctcttcctcccaattccaagatggagaccgggcgggagcgcgcaggcgcggtagggacgccgggctaaagggggcgggggcgcagaggactcagccccgccctctctcctcactgccgcggcctgggagaccggcagccgccaagcccgagtgcgcgcccgccccgccacgcggaccccaggccggaggaggcggggagaagagctagacttgcaaggggaggagcccggcactctgtcccacgactggcggtggacagagctgcagcgcatgcgctcgccccgccttcgctctgagcccgagcttgttgctaggggaagctttgagggggcgcgggtggacggacagcagcggcgatctgcgactgcgcgcagggtggaagttgggaggggcaaaggaagctgctgctgggcgcggaaaaggcgggaaaatagactgctccgaggttagcaaccatctaacctggaaaagggcctccaagtgcgaggaatctttgcgcgtcgacgctgggaaaactcaatcggtcaaatctcttacggaaattgaggcgctgcaggttgcaagacttgccaaggtcacagtgcatttatgtcacagcatttccatgacctgacaccccacccgcccaactaactgtaattatccattttatttcgtagaagaaaacaagacaggtgtttaccaaagccaagtcaaccatggggagagctcaagtaacctatgccctatgccaacctgtgtccaaactagagagtcaacaggaaagagtcccccaaaacttctaagcctgcctaccctaaaatccccacctcaatccaacccccaataaacaccatacacgccactgggcaaaaaagctttttattttcccccacattccagctcttcactttttctaaaaccttttccaactcagagccaaggcccaagaagttgattcacacctggggagaaagaaaataaaacaacaaaacaggtcgaagagctgctagaggaagctctgagatgtgtgcagaaattgaggaaggagcagagggagtgacagctagagaccaatacgggcatttaatcccaactaaggtagcctcaggaccccagggtctgtcaggggccaggaagccctcctttcccagtccaaggttgagagggtcctgtcatttcctgtcccaagtaggtggttggggcatttaggcccagccatcagcaaaataagcacagttgatcttgagcttccacttcctctggcctgatcagttccctgggcctcaactatttccacttttcccatag

SEQ ID NO: 28424 - DNA, 1267 bp, Artificial sequence
  DNA replication origin
gctgcttgggctccaaagtggccccttcctttcccagaatccttctctctccaactgcttcctcctcctcgccaagcattctttggtccaggactgcctcctggccaggtgagcagggctgctgttctataggggtgcctgtgttgggtgggcccagagccccaggaatggggagtggaaggcccggggggcgctggcctgcacgtactttgaggctcttgggctgctggcgaacctgggccgcatgcttctgccgcaactcttgctcacgccgcttgttgtactccagctggttgcccagctccgtctggtgctgcaggcgggtgagctcagcccgcgtgcgctgcacggcctggagctgccgcagctccagctcccgcgtggcctcgtgctgccgaagcagcagtgcacactccaagtccttctgggtctgcttcttgttcaggtcctgaggcagaagaaatgcagggcccggggcctggtcagtatcaaggaagtgagaggccagggctccttggcagagggagctggggatggcggaagaaacacagggcccagggcctggtcagtatcaaggaagtgaggggccagggctccttggcagagggagctggggatggcaggagatgagggtgtaggggaggcaagctcctccctggcctgggaaaagaggcctaaggaaattctggcagggtctgttggggatgagaagtaaaaggggcactgaagcaaagctgaactgtaacactcgagggccaaggagaaagaagacaagaatgaggaaaatggaaaagggtgggtccctgggatccacgagtgagcgggaggggaacagagattgggatgcctacctcccgcagcaggtcctggtccaggctgtgccgagccagcaacatcttgcgcttgtactggcgacactgcagctcaaagtactggcgctgccgccgcagcagccctgcttcctcctccgcctggcactgctggagctgctccttctgccgcagcagccactcggccttctcccgcttgggagtgctggggttctcctggagctcctgggcgagtgcagagggaagcagggtcaggacccacctggctcgccatcggctccgcccccaagcagccctagctcacctccttcagctgttccttgcgaagtttgtaggtccgcttctgtgcctccagcagggcagccagctccttcttctgctgcccaaggatgtgctgctggaacttccgctcctcggcctgggcagctcgtgcctcc

SEQ ID NO: 28425 - DNA, 1133 bp, Artificial sequence
  DNA replication origin
aatttccttaggcctcttttcccaggccagggaggagcttgcctcccctacaccctcatctcctgccatccccagctccctctgccaaggagccctggcccctcacttccttgatactgaccaggccctgggccctgtgtttcttccgccatccccagctccctctgccaaggagccctggcctctcacttccttgatactgaccaggccccgggccctgcatttcttctgcctcaggacctgaacaagaagcagacccagaaggacttggagtgtgcactgctgcttcggcagcacgaggccacgcgggagctggagctgcggcagctccaggccgtgcagcgcacgcgggctgagctcacccgcctgcagcaccagacggagctgggcaaccagctggagtacaacaagcggcgtgagcaagagttgcggcagaagcatgcggcccaggttcgccagcagcccaagagcctcaaagtacgtgcaggccagcgccccccgggccttccactccccattcctggggctctgggcccacccaacacaggcacccctatagaacagcagccctgctcacctggccaggaggcagtcctggaccaaagaatgcttggcgaggaggaggaagcagttggagagagaaggattctgggaaaggaaggggccactttggagcccaagcagcagaggattctgggggaagaatcaggagcccctagtcccagtccacaaaaacatgggagcctggttgatgaggaagtttggggtctgcctgaggagatagaggagcttagggtgccctcccttgtaccccaggagaggagcattgttggccaggaggaggctgggacatggagcttgtgggggaaggaggatgagagtcttctggatgaggagtttgagcttggctgggtccagggcccagcactgactcccgtccctgaggaggaggaagaagaggaagagggggctccgattgggacccctagggatcctggagatggttgtccttcccccgacatccctcctgaaccccctccaacacacctgaggccctgccctgccagccagctccctggactcctgtcccatggcctcctggccggcctctcctttgcagtggggtcctcctc

SEQ ID NO: 28426 - DNA, 1165 bp, Artificial sequence
  DNA replication origin
gcacgagaacaagcgagaagaaccagtcacacaaaacacccatgaagaaagcaacacgactaaggacagacacaggaagtcccaggtccagcagctcagggaggaaggcagggaaggaggagaagcaccgagctgagaaatgggtaagaaggggctgccccattttgggccgcagaggagaaaggggcaaaggaggtggccagaaagggcctgacaagttcaaccggccagcagctaccaccctgaccagatccgcattccagcccggcccctcacacactcagctcccactccaggcccacactcaatcctgctgccacagccttcatactccgcctggttgcccccagctcagcaccccctactgtggagggtctgcagccccgtcccccaacccactagggtaatgcctgatgcaggagagcaatttggtcccctgcagccatggttgggagaaaaggcaagggatgaggagaccaagggcctggaaactaagacctctggaaggaacccgcaaacaggcgctctgtgggaccaagaagttcggtgaagttctacaggggcccagaccccagagccggtggtggtcatggtgcaatgaagctatgaaggcagagagcatgaggctggaggagtgagggggctgagataacggagatggggtgaagaggtcatggagccgggccgagggtcagcctgggggcataccggggaggctaggcggcaggacaaagcagacagaggcagcctgggccaaaggcacagttccgctcagatattttatttgtgtttgtctttttctttttttggtggggggaaggggacaggttggaagggagacagaaaaacaaaatcaaagaggagaaaaaaaacatgactcttcccaccctccaccacccctggccccaggcctgagtcaatgagggtgaggatgagcacacacagcgggcgaacagcaataacttaggggaggagcgccaggagaacacagagtgactgctggactccacagctgaggaggctgcctgtctagaggtccgaagggctgggcctggggtaagtgagcaaactgaggaaggtgggtgaaaagagaggactagggactggagaaacttcactgagtcgtgggagataaagtgctcaatgctctagatttgggctggaa

SEQ ID NO: 28427 - DNA, 1358 bp, Artificial sequence
  DNA replication origin
gtctgagtaaatgggcttgagggccacactcactttaatctgcaccctgtttacccattaaactaactcaggcccaggaaaaaaataatagccactcttttccttggtggttcttgggaataggcacatggctttgtcaagaccttaagaaaatactaagagaaagaataaaaccactgaggagaatatgaaataaatcattgtggagaacacgaacagagggagagtatgtgagtttcccaagtaaaaaagccccagctctgtgcatgccctgcaccgtccatttctctaaagcaaagtacagagcctggcctctagcgcactccctccctggaccccaggcctcaccgcctgtgagctgagcatctctgagatggactggtcatactgctccgccaagatcgccagcttgcgggtctgctcttccttgagccgcttaaggaggctcttgtgctgagctttgggcgtggtctccagcaagtgtgctcgcagagccttgtactgccgagtctggatcttacacgtctcctggaactgcttcttgatctgcagctccttagactatgcagtggacggatcaaggggagatgggggcagcggggaagaggaggaggaagaggaggaagaggaagaggaggaacaaccaggggaaatggggagaagagagagaagaggagaggagacagaagcagagacagggagagggagagaaacagaaaacatgttagacagagggggtggggggagctgtatacagacagacagacatggagaggtgggatcgtgttgagagagatcaggaaggtctcgatgggcaagagatgcagagaagacaagaggttccaagagcacgtgcacggagttgggtgcgatacccacgagaaagaacatcggagttactggacagggaactgaggatcttggaagctctgaccaggcaaagagggagagactgtgacctagagacagaagcacgtgagcaaatatgagaacgtgcacgagaacaagcgagaagaaccagtcacacaaaacacccatgaagaaagcaacacgactaaggacagacacaggaagtcccaggtccagcagctcagggaggaaggcagggaaggaggagaagcaccgagctgagaaatgggtaagaaggggctgccccattttgggccgcagaggagaaaggggcaaaggaggtggccagaaagggcctgacaagttcaaccggccagcagctaccaccctgaccagatccgcattccagcccggcccctcacacactcagctcccactccaggcccacactcaatcctgctgccacagccttcatactccgcctggttgcccccagctcagcaccccct

SEQ ID NO: 28428 - DNA, 1400 bp, Artificial sequence
  DNA replication origin
gccctcttggcgcacacacaggtggatgaagccgcttccagggaagacaaactggaccttaccaagaagggcaagaggcctcccaccccttgtagcgacccggagagaaaaaggttccgcttcaattcagagtcgggttagtgcttcctccctgctgtgggggccttctgcatcgttggttcactcaagaagcattcactgcgcatctcttatgtccccaggcgttagatgagggagcaaggctagtgagtcaggaaccgggaacagcaagtacagatagctgtttcctgctgcccctccaactgtcagggcagggctcgaggcaacctatccgaagtgaagggagaagggacaggaggagcctgtctcaaccctctctcctctccatattccagagtccggctctgaagcctccagcccagactactttggacccccagcaaagaatggggtggcagcagaagtcagcccagccaaagaggagaatccaaggcgagcctcaaaggcagttgaggagagcagtgatgaggaacggcagagggacctgcccgcacagaggggagaggagagcagtgaggaggaggaaaaggggtacaaggggaagactaggaagaaacctgtggtaaagaagcaggcaccaggcaaggcctcagtcagtaggaagcaggccagggaagaaagtgaggagagcgaggcagaacccgttcagaggacagcaaagaaggtggagggaaataaaggaactaaaagcctgaaggaaagtgaacaggagagtgaagaggagatcctagcccagaagaaagagcagagagaggaggaagtggaggaggaagagaaagaagaggatgaggaaaagggggattggaaacccagaaccaggagcaatggccggagaaagtcagctagggaggagaggagctgtaagcagaaaagccaggcaaagaggctcttgggagactcagacagcgaggaagagcagaaagaggcagccagcagtggggatgacagtgggagagatagagaacccccagtgcagaggaagagtgaggacaggacccagcttaagggtgggaagaggttgagtggaagcagcgaggacgaggaagacagtgggaagggggaacccacagctaaaggctctagaaagatggccagactgggcagcaccagtggtgaggaaagtgacttggagagggaggtaagtgacagcgaggcagggggaggcccccagggggagaggaagaaccgctcttccaagaagagctccaggaaaggcaggacacgaagctcctcttcctcctcagatggaagtccagaggccaaaggagggaaggtgagggtgaggaggggtgggaggccactattagggaagagggagaccctgcctcaggcccagcagg

SEQ ID NO: 28429 - DNA, 1645 bp, Artificial sequence
  DNA replication origin
ctgtgcgggagagaggccaggatgcctccagggctttagtctgagcacgagtggagtctccctccctggagatgggagggctgtgggaccacaggcttggaggaaaactgagtctggccgcggatgtgtcagatgccatctggaaaggcagctagatagcggcccgtgaggggctgcgcatttggaagccgccaggctggcggtagatgcaagccttgggagagatggggatgggctgaggggcagagcggagtggggaccaactgggcggctcccagggttctggagccagaagcagaatgagaggccgcatttgcggtggtctggagtacaggatctggagctctaatcccaactctgccgttttctccgtgtgaccttggccctgtgaggcttcacctcttgagcctgagaagcagaggtgacagtactggccctggttcttagcaggggggtggcgggcagggtagggggtggcgcagcactggggggcactttgaggctttctggctgggtgctgagtcctgaagcagagtcatgtccgggagcaaagttgtagacattctggagagaaggtttgagagggtggcccaggtccatggctgtcgggggaggtggggagaagccaggaaaggcctcagcaaggagaacgtgtaagcccagggtgagtggatttggatattcctggctgaagccatagtgggaagggagacagggccacagggaaagcactgcctgggccagagcaggagtggtaagaaattggcaagaagaaccgggtggggtggggtcatggaaggcctggacagtggcctgaagtgggaatttgtctgttactgtcaggggagcgggagtccctgaagggccaggggagtgaggagatggaaggaagggagtccaagcagaggaaggatagctgtgaagacagaagcaggttggttctgtcaggcctgagttggacttggccagctttgaatcccagctcttccagtgctcaccatgcgacctcagcgttgtcatttcactctttaagccacagctctctttctccattcagtggcggcattgtgcggagaatgtgagtgaagggatgaaaatcgctcggcccgtgcctggcccctagtaagccacagagaaatgtgagccgctgccagtcaggctgagaggacgccactgaggaagtccaggccagggtgggacatgctgcgcacagtggggaaggagaggaggtggccagaggaggggatggtcctttccagtcatacacgcatgtctgcttgtgtgtgtacatgtgggggcctggtgcagggcgtgggggtgctgttcagagttggaccccccatcatccatcctgccagcctcctataccctgaggcctgacccaccctggcccccacaccaccccagcagcggagatgagggtaagtgagggctccttaggaagcagagaggaggccacagggccaaatgtgacactcagaagggccactggagaccacgcatggcgtttcctgccagcccactcagcatctagcccagggccagactggacactgccccgcaggacccagcaggcctaagcctcaggacctccatgtccacaccaggttcagcctcctctgctggcacgtgacttctccccgtt

SEQ ID NO: 28430 - DNA, 1792 bp, Artificial sequence
  DNA replication origin
tgacggagcaagttccctgtccctgaagacttcactccttaagagattttaggggaactcaaggcacggaaggggcagaccaaagctgcagaggtctggcttaagccaagggctctgagaaggggtctcggcaacccaggaacgtttttgggagggggcagagcttggactgaacctcagatgagcggaatttaggctggcaggaaggagctttccagatagaaaacaacaggaaaagttcaggagttgtggaactggccagttggaagaagggagtcctctgtttgaggggcagaagatacttttgttttgtttttgagatggagtctccatcacccaggctggagtgcagtggtgcgatctcggctcactgcaacctctgcctcccgggttcaagtgatcctcctgcctcagcctctcgagtagctgggatttacaggtacatgccaccacgcccggctaatttttgtatttttagtagagacgggggtttcaccaagttggccaggctggtcttgaactcctgacctcaagtgatccgcccacctcggcctcccaaagtgctgggattacaggtgtgagccaccacacctggcaggcaggagatattgaggggcaggaatggcagggaagaattttggcctgctgccaaaggggctagggagccgctgatggttcttgagcatcagagaggtacgggcttaatgggacatagatcaaccaaccagcggttacaatgtcagctgtccccgagctgctgctgggtggtggggaggggggccctcacctgagcaccttgtgcgtgatgtcgtcatctgtgatcccgctgtaagtcaggtcctcattccacacgggattcagtgtgttcctctgagtcttcgtttttagcttattggcctgggatgtggggatgaaaggttctcaatacctgtcctccagccccacaggctggagtcatgggctgggccgggcggggcgagaggaggctgttaccttacaggctccaggcagcaagtgcagcttgacgtaggggtcggcgaggccattgaaatccatgggcttgaggccctggagaggagggcaggggagagggctagaggctcccggcacctctctccatccctcttgtagagctggaccctggaggagcccagaaggagggggcaagggcaggacgaaggagcaggcctgggaagggaaggaggaatgggccccctctgggggctgcacgcaaaccgggcccgggcttgggtggcagggagtgcccaccttggccctgaggatgctacagtgcagagtgcaggaggcccggtcgtagagaaggtcaaactccagcgtgcctagggcggctggagagagaggaaaggcagcatgggtcggtatggagacaggtgtgtgcgagaggccagcaggtgggcactggctctgtgtgtctctctctcttgccagcccgcgagtgtgagtgcaagaggctgagtgggcccatgcgtgtgtgcgtctgggtccctggctcggccgcaactggggctgtgtgggtggtggagtgtctcagcagaaatactgaatattgagccttgctgaagctgtaatctccacgctgactgcagctgtggtggccgtccctgccacccccccactgccctcctcccctacctacatgcacagccagcagggcccatccccctctccccccaccacggcaagcctggagacccccaccagcacatggggcctccaagcccccagactcactggcatcatccgagtcatagctgtccacctccgcaccatc

SEQ ID NO: 28431 - DNA, 1272 bp, Artificial sequence
  DNA replication origin
cgcagggagcccgcgtgtttgcgagtgcgtgtgtgtgcgaagttctccgggtaagtgtgccagcgcgcgcctgggtgtgtgcaagggtgtgagcgtgcacacgtgggcacgggcgtgtgcgcgcgggggtgcccggttggatgtgtgcacacgagtgtgtgccggtccgcgtgcccctgcgtgagtgtgcgcgcgcgagcacacgtgtgtgtgcgcgctcgcgtgcgctcccgagcgggccccgggtgggagtccgagatcccgccccctccccagccccagcgcccctccccgtcccccgccgccgcgccggctgcatcctcgcctccacctcgctcaccccctcctccccgcactttctcggcgctccctccctctcggctcgcacagctcgactccgcgctctcctcgccggccgccgccgcccagcctgcgcccgccgtccccccagtgcctgggcacctgttggaggcagaggcaggtgcagggggctgggcaggccgggggcgtgagggtgcggggaagcgtgccagcctgtgtgcgctacgggggtgttcggctctcctgcggctgcaatttctggctcccctgaggagccagaggtggcatctgaggctggggtctccaccgtgggctgtggtgagcgagcgggggaaccaggcaggcagacaggtcctggggctgaatgaggggacagtgggcagttggagcctagaggggtgggtgacaccctgactagaccagcgcctggtgcagaggaggacagagcctccgagaaacagaggcggggccctgcagggccccttgggggacaggcaggctcaggagcagaggggagccccggaggagaggaaggagctggcaagatgatacagggacaacctagaagtgggtgggtgaggacggggtggtgcaacctcgacttctgcaaggagtgggttggcagcccagcccctgtggagtcagcttggggtctgcagggcccaggcctcccacctgccaccggctggcacacaccaccctctccctcgacacctaggaagggaggccagtgagggccccacagaccgaggaggccgtcgcctggccctcagccaggatggctaggtatgatgggctcactggctcacacgccctctcctagccaggggtgctgcatgaggggccgcaggggcgatcgcatgaccatcaacatccaggagcacatggccatcaacgtgtgccccgggcccatccggcccatccgccagatctctgactacttcccccggg

SEQ ID NO: 28432 - DNA, 1134 bp, Artificial sequence
  DNA replication origin
caggtgatccacccacctcggcctcccaaagcgctgggattacaggcgtgagccactgcgccccgccccctcagtgttgttgactttacatttctcttacttttttttttttttttttttaagagactgtgtctcactgtgttgcccaggctggcttcactcaagcgatcctctcgccgcagtccctggagtagctaggattacaggcacccgccaccactctcggccccatttctcttatttaaaaaaaaaaaaattgccgtgaaatacgcatatcgaaatgtaccatcttcaccatttttaagggtaagattaggtggtgttaggtatgttcagttgtcgtgcaaccagattgctgttttaaataacagcacttagagatgccgacttcgtgccaggcccagtttgggacattagggactcccagatgaatcagccgctccagtggaactccctgctggtgggggaggcactggcgaagcggtgctgagccgagtcctgacggcgctggagctgaggggcagtgcgggatgccccaggaaggctcctaggaagaggggacccacggtgacttcctaaggaagcgcggttcccaggtagaggagcgcatgtgagccaagatccctaggcctgagccgtctaggtgtgtcccaggaactgcaggaaacggttgggtgagtcagtggtgggcagcgagggtgataagccccttcgtgtcttcgggatggtaagtttggggcacaggtgagtgaagaccgaaggccaggggtggactgacactccgtggcaggcgcagggccgggcaggggggcggcttgggggtggcaaggtttgggtgagaaatggcagcccatggggaactaccgcagggctctgagaccttcagagccaagccccgacgccccttcccacctgcggggcagaactggggatggcaggggggagggtggttcccaaaggagataccatccctggtaaggggacatgggcccctgggagttgggttgggccacaaggagagaggcctgaacggccaaagggagggggcgtgggggaagccgcagcatcagacctctgcctcctccctcagatcgtgaggctccccagcctggctcgggagaccccgagatcccc

SEQ ID NO: 28433 - DNA, 1150 bp, Artificial sequence
  DNA replication origin
cctctcgggtgatggggagccctgggggatggcagcataggggctgggatggccttggcagaggcgtctccccacattctgactcctggtccccttgaaaccctgttggtgtccctccccacaagccctcctgccctcagtgggtgggaggcggtgccccctcccctcctccagcgcaagggtgtgcaggaagggggcagagtagggggaagaggtcccctctctccaccccctcagtccccgagagatggggcctcttccctttcggggtcatcgtcagtcctggggttgtccgggcaagaggaccctggctcccaaccccagccatcagccccagagccctgtctccacgggggtgggggtggggagggggagggtcccggcccccggcctcagtcctgggcctggcaggccgggggcggccgggagcggggccagaagaggcggcaggccccacggcagatgaggaagaaccagtagagctgaggggccaggagcagcgcagcgcccaggttgacgtgggcagggatggccaggggcacggccagcaggggcaggccggcatggcgcccgtaggcccagtacaggtagggaaagagcagcacccggcagcagaggaagctgagcagcatcagggccccgttcaccttgtgcagcagtgtgtgctgctgcttgtactgaggagacacagacacagtggccacggcagcagaagggctcggccccccttggccctctccctgcctccctgcgaccctagcaggcagctcctcccaaaccagacactttgccaggacacaagcaccaggtgctcaaaatgcacggggtgagggggggatgacgaaggggctagagcccttggcagcaaccttgaaggtccctccccttcctgtgacctccccattgggctcctgcaccctcccatgctcactcacctggatgaggatcttgccaaggcagacgaagggcgtgctgacctctgccatcaacatgcaacccagaaagaagtctcccttaccctgtcgccacacctgggcacagaggcaggaaggtgaggagctggggctctccctgggttcttgggcagcccccgcccttcctctttcccctctgtcactttgggagatgcttgactctgaacatcagaaca

SEQ ID NO: 28434 - DNA, 830 bp, Artificial sequence
  DNA replication origin
aggctcagagacgtgcaaccacaaatccaaagagccacagccgggcatcgtccagcccagggccaggctgcccccacaccctggtgccctgggctggtgctcagtgaaccctgcctgtccacagctttccctgggaatacgctgggtctgcttggttgtcagtacgcagacccggggcttcccaggctcctgccagcaccagcaggaccaaggagcaggccacccgcaccccgcccgcccagctccccgggactcaccactgagagtgggaagcacaccagcaccatggcggcatggtggagcaccatgaggaactccttgtgcaggtagccacgcgctatggcccacgtgctgcccggggctctggccgctccgtcgtcccctccatgccctttgacctggtgcttgtgccagtgacagaggaacatggcgtagatgtcgtagatgaagtagggcacagcaaattgcgtgtaggcagaggacagccagtgtctgttgggcagagagacggggtgggggagcaaggaggaaaggggacaccagtgattggggtcagatctcaggggtcagcacagcagccctggacaggagcggagtcttgggtacagatgagggatccagagggtagagggtgagaaacttgcccaaggtcacacagtcatgcagctagtaagagatggtgctgggattcaaacctgtggtctcagaactcacccatgttcctctctctctgcagtatagtcgggggaaaagaaaagaccagaagatgcccacagaccaaaaggcacagatacagtgccaaaataagcccaggacaggcaggtgggacc

SEQ ID NO: 28435 - DNA, 878 bp, Artificial sequence
  DNA replication origin
atgacacctagctgtctggccctggcctcagtccctaatgtcttataggaatgtcttcgccgcatgctggccctgttttggagggtgggagggtgtacggggaagaagagagaggcgggctgaacactagtagaccagatggccgggctggatgaggtctcccagaacagtgagcaaggcaggcagtgaggagagaggaagcctgggggtaaagccccggacccccacaggagctcccagtcccccaccgctgagggtccagagaagtgccaggtcccttccattccctgagaagcccaagaagcagacaggggctgaggggaaagaaagtggtttacctggctgagacaatgactgcgtcggcctcctcccagcgtagctggggcagccgctggagcgtgttcttggagaggaggaagagtccggggaacaccacccccccggccaccatcggggtcagcatggtggctcaggacttgggcagggaggcaggcgggccgtgaaggggcagggaggccgagtggaaggagttaggggtggagaagggacgccaagcccgggaaggagggagaaaacgatgagaaggggcacaaaggggccagggcggggacgggatggggccagggagtccgatgaaactggggagtcgggagggggctggctgggcagagacgggggaggggaggatgggagaaggggagcaggagcaggccagcgagggatggggagaggcaaagaggggatggcttggtgagggacagagaggaagaggggacaggaggaggaggatgcggatgggggaggggagggagccaccaggcaggtggggaggggaggcttacgtgagaggctgggagggcccgaggaggcggggaggg

SEQ ID NO: 28436 - DNA, 948 bp, Artificial sequence
  DNA replication origin
tacgtgagaggctgggagggcccgaggaggcggggagggggtgggggtgggtctgagtaccagccccaaaggaaggaggtgggcgggagggagcggaggagcagccgggcaagcggtcagcggtcaccaccgctctcctggctccactgcctcctctcgctgccgccccagtccctgccgcccggcacagacaccgcacatggcatcatcatagagactccgtgcccagccccctgccccctcggtggggagggggagggggaggggaagtggccagcttggggaggacgggggaggggcaggaaaatgatggcaccgaccagacaccgagaaaccggacctgcagcggcgtctccccatgcagctctgagccacagccgcggctgcgacagagatggggggagcagagaaagagggagggggaggcccttaaaggaacagcagctgcggtggcacagggggctgctggggacaggggacaggggccagctcttctcttggggaggaagggggcccagggctccttggccagctgggagggggccctgagcccccacaggggcctgaccctgcttcccatcagcactttgcaaatgcctggcatctcctccctcaccaagccatccctctgtggcctgccccgggtccgagctttgggtggccattccagcggaagagagcgttccctgggagagggagtaagtggtgctttctcagaaggaagagctgaaggaggggataggagcaaaaacatctcaacacagcatcctcagagccagaggccccctcacccgatggcggggaaggaagctgacattggccagagggggcacctgactgtgctgcagggctgcccatgtcctgtctgctgcaggagctccgaggtcactgcgtctgtccttcccacagggccatcaacgatcctgaggctccctgaggtcacccagt

SEQ ID NO: 28437 - DNA, 1385 bp, Artificial sequence
  DNA replication origin
cccccctcggacgtgactcggaccacatcccgcgggtcgctagggccctcccttctgctcctttcccccagcctggcgcgctctggggcgccgtgactcagccagaatgttggcaatgggggagggcggaacggggaagtggaggacgcggatggaaaagtcggaaacgaaggaagctgagtttcgcctcccaggcccagcgcgcgcggcccggggccgccccagcttccggtcttcgcggctgcagcgcgtgtcaccataggggccacatcgcgcagtcgtgcgttagcctgcctcgcccgcgggctgaatcggcgcggagccgacaccctgtcactggcccaggcgtaagggaggcggaggaaagggcatcgagaggacacgcagggagcgcgagaaggcggcggaactagcggcgcgcggaggcgagacctccccatccgagttccaggctggcaggccgggctgggtcgcgcatgcgtgcgcgctctccgccgggccgccgcagccaggctggtagtcctctgcgccacagaaaaccagaatgcgcggctatgcaccggccgctgctcggcctctggcatgcggggtcacagttcctgccaaacgtcttccttgagcctgacttccttctccaaaagaaaatccgtccccgaactgatctgcctcccagatgctgagccccctgctcctatcgtccaaatctcccctcctcacctggaccccatctggaccctgttggcccaaccccaaccccatccccaccccggcccggtcctgcaaggggcccacctgcggcgaggccgaaggagccggcagagcctggtcagcagcgagtgagctaggggttcccgggctggttataaggcagctcctgcccgccccacatgtgtccccgatcttctctaatgacccctgcccttttcccgccacggatcctctggcagggacctatatttagggaaacctgaagcccctgacattcacactatcgtggggcccggcatgggggaagggggaggaagacttgggtcggccctattgatggggagggagcccctgcccactcaccggtgcttcagaggaaattcttccttggaaatccagacggaggcccttggttgtcaagagaaataaatctttggccagggacctgtgggaaggaaaggggtgaggggactcggatcacgtggcctccctgccaccctccctggctccttctctaatctccctcctcccttgactccctgcggtgatggtggctgttctgattctctggagccctggttttttttaagaaggagagtagatactggcactacactcacctcctaaaataacggagagtccgtggacggagtgtggttgaggcacccctgcgtacc

SEQ ID NO: 28438 - DNA, 1803 bp, Artificial sequence
  DNA replication origin
aagcgccggttctcctcggtgttctcggtgccaatggactgcagccgcttggcaatgctccctgggagtgtcacatgggaattaggggatcagcctgccactcccaaccctgcaccctccacccattctgtctcctgcccgcaccagtggactcatctgcagccaggatgcccttgccaggtgccacgatgcggtgagcgatgtcagacagctccttcttctgctccggggtcagtgctggatattggtagggcatggtgctggtagtagcaagttcctggatacaggaaacagaggggaaggactagttagctagggtttcccatcatctcccgatgaccagggcccctctcctggaggtcagggaaatgttccctacctcccctgccccacacccagcaggccctggggcacttctggtccccagctctctcttacgcccaacttccctttgctaggcctgcccctgtacctttcctaactctgtctggtgctgggtgttgcccagctgagggtggagttgcccactggcaactgggggaaaggaaaaggccatagccatggacaggtgggtcatgttgaagctggacccttctggcttgcgccttgccatggggtcaccttgcctgaaaacaaaaccgaaccggagtattttagaatgtaaagatcgtgaatcaagcagagggcccaacaccctcgtgggaaagggcccagatatgggaaaggtctgtgcttcaagccacacagcaaccccggagccagatctgagattagaacccagctcttctgactgccactggggtgttccttccaatcccctcaagatcccagggctggcccgggctccaaggcttcaaggacatcccaaggtcaggcttttccccacaagggagggggcgggtggtaggaaaggggcattaggaaaaatataagagagcaaggagaagcccaggaaagggcggcggaacaagccctagcccgaggcgaggaaagcggtaagctttgccatcgtcactgttcctacggggcaagaacgtggaggagcaagcgccttcccctgaaaaatgctcccgtcgcttcgcatggctgcagctgttccgggctcagaatcaaggtcgcccgataaggagagacagggaaagtgttaagggggcatcaagcaccgcggaggggtttccctcctcgcgaagggcgccccgtttcccaggacagaaaccaagctcccacttgcgagaaccctggggctgtacatgggccggcccccacccctcactgcctcttaggatccccgccagggctaaggggccctaatcctttgccacaggggtccctgcaagaaaagggggagaatggtccttcatctcgtccggcttcctcccccgccatgactcagcgcgcgcagccgctgcattgcgcagttagaggacctcaggctggaggggccggggagcctgtgtgtgcctggtagtggggagacgctggcatgggatgggggaggcctccacgcggacgcccaacccgccactgcccccaagatccctctccacggtccctggtccccgcacgtgaagaggggcgctcacctggcacaggagaggggcgggtgtgcagggtgcggcggcagagggcggcgggctggcgagtggattcaaggagagaacgcgggactcgtcaccaggaccccttctgcggcgcgttccgagaggaacgcagccgatttagcctcggaaggggcggcgcaggaggcgggcaggcggaaggcggcgcccggccttttaaaggcaccactccgccctccgccga

SEQ ID NO: 28439 - DNA, 1856 bp, Artificial sequence
  DNA replication origin
cacggtggctcaagctggtaatcccagcactttccgaggccgaggagagtggatcacctgaggtcaggagttcgagaccagcctgaccaaaatggtgaaaccccgtctctattaaaaatgcaaaaattagctgggcgtggtgacgggtgcttgtaatcccagctactcaggtggctgaggcaggagaattgcttgaacccaggaggcggaggttgcggtttgccaaaatcgctccactgcactcccgcctgggcgacaagagcaaggaaggctctgtcttaaaaaaataaataaatgaaaatacaaaaattagccaggcgtcgtggcacatgcctgtaatcccagctacttgggaggctgaggcaggagaatcgcttgaacctgggaggcggaggttgcagtgagccgagattgtgccactgcactccagtcggggtgaaaaagcaagactccgtctcaaaaaaaaaaaaaaaaaaaaaaaaagaggccgggcacggtggtacacgcctgtggtacagcactttgggaggctgaggcaggtggatcatgaggtcaggagatcgagaccatcctggctaacacggtgaaaccccgtctccactaaaaaatacaaaaaaattagccgggcctggtggcgggcgcctgtagtcccagctattcaggaggcagaggcaagagaatggcgtgaacccgggaggcggagcttgcagtgagccgagatggcgccactggactgcagcctgggcgacagagcgagagagtgagactctgtctcaaaaagaaaaacggaagcaactaagaaatgtcaagagtgccattttggaatcagagaagtcatgctgactgaggcacaggcttggcgtgggaaaagtggactccaatctgttaacttctgaagttgtccacggcaaatatttctctgacggcacaggaagagatctgaacttggcttccctcatccattgaacaagtattaacaagtatctatatatgcctaccgtgccaggccttattctaaccactggggctgcaatatttaaaaagacaaagttggatcctccaaggactgtggtggggaaggctgacaaaacaagtaacaaaaatgtgtaacattaaaaaaaaagtgtaatgttaaaaaaaaaaagtgtaataaagttacaaagcctagccccagctcggcttgtttccctagctgaaatgggggatggccgggcgcggtggctcacgcctgtaatcccagcactttgggaggcccgaggcgggaagatagcttgtgcccaggagttcgaggtcacagtgacctatgatagccccaccgactccagcctgagcgatagagcgagaccctgtctctaatttagaaaaaagaaagttgtggccgggcgcggtggctcacgcctgtaatcccagcactttgggaggccgaagggtggtggtgggtgggggcgcggatcacctgaggtagggagttagagaccagcctgaccaacatggagaaaccccgtctctattaaaaatacaaaattagcccagcgtggtagcgcatgcctgtaatcccagctactcaggaggctgaggcaggagaattgctggaacccgggaggcggaagttgcggtgagccgagttcgtgccattgcaccccggcctgggcaacagcaaaactccgtctcaaaaaaagaaaagacagttgtttaaacatttttatgaaatgatatgggaggggactggtctagggtttctaatagcctccacatcgcccagcggcagagcccacaaaactgccactggccgccaccgggttcctccacctccttcccgatctcaggctggagaagtggtgcaggggtcgctgcga

SEQ ID NO: 28440 - DNA, 764 bp, Artificial sequence
  DNA replication origin
gttagatgggtggttgtggaagaagggcctccgctggacagaaacaggtagggggtaggggactgtttacgacagggcaaaactttctacttccccacaggtaggtggcgacgtccctgagaccaactacctcttcatgggggactttgtggaccgtggcttctatagcgtcgaaacgttcctcctgctgctggcacttaaggtggcagtccccggcttctgcacccccaacctgggcgacctcgggccgggcctgtcttagtccgttccgccctcatctcctatcgtgaccagccccaccttggagctgtgtcactggtgatggaccgattctgcttttgggggtggtcagagacttgatgggggttgaggccagcggggcagcattctgggaggggcagaggctcactgttgcgaatgtggcaggtcattgatgccactggtgggagaggcagtgtggggccagatgacaaagggcctgggtgccttgctagggacccggtctgtgtctggtaggtgaaagaagagccattaggttcatagttgagggaatgggtcagctttacattctctggaggggtcgtgtgggcctgggaggtggctgatgccacacgattcaggcaagaggtgccaggagtgtgctgggcagtggttgtgaggatggcaggctggcgggcacgaggaggtcagagagggatgtgtggagagaccgtctaggcgccagccctggcttggtggccacccccaggttcgctatcctgatc

SEQ ID NO: 28441 - DNA, 669 bp, Artificial sequence
  DNA replication origin
gaagaggagatgggcctagagggccagtggattttgtgctaggtcaggcagctggaaacacaggtctagatctgggcctgggtctcctagcaaagcctttgctcacccagccccgcccagggccaaacacaggagcccaatgtttcctgagcatggatggcttttgagttttattaacaaaaatactctggtcccagaacaacagactggtgtggcctgcaccagtgtgtgtgggggggtggggattgagcccctccagagcccatggggaggcctggtaagtggggatgctggtctgtggccccatttggccaggcagagccccttccattcacacggaggtgagagccgggaaggggaagccggccccagctggactcccagcagccttggttaggctttgaagccagaggggggtgggagtgaaatcaaggtgtgaagttgagggggtgggtgggcaggcccaaggcggccatttggtgtgggggatggggccggtggaggtgagggggctccagggctgggggaagggagcgggaggtttgtgatggaggcagaggggcccagcagtggttcagtacatgggtttggagcccacatccagatagcccccaggcgcggtgtatggtagagggaaggggcccccttggagaaagtgcggggcaaagg

SEQ ID NO: 28442 - DNA, 688 bp, Artificial sequence
  DNA replication origin
gggccggtggaggtgagggggctccagggctgggggaagggagcgggaggtttgtgatggaggcagaggggcccagcagtggttcagtacatgggtttggagcccacatccagatagcccccaggcgcggtgtatggtagagggaaggggcccccttggagaaagtgcggggcaaagggtaccgccggtggagccgctgggtacccggagccccctgacccgtgcggcagctccagaaatgcagccgagtagggggctgagcgcccggagtctggagcctccgggaagctggggctcctgacatggagagagggatgtcagagcagggcagagggacccgcagccccgcctggtcccctgtcccactcacctggtgggaaggtgactgggggccccatggaaagccgcagggtgcaggaggtaggcctcagcactggggccaccacacagaggtgccggggcagcggtggcttccccgggggctggggcctgttctggatctgattcacgaatgtctccacccagggtggagtcgcagggaccacctggtgtgtctggggagagggaagggagaggttgggctagggaggatccctgtctcaggcctggccccatcgccatcgggactacactcacctccgctcccataggcctctgtggctgctggctctgggccccgcagtttcct

SEQ ID NO: 28443 - DNA, 1866 bp, Artificial sequence
  DNA replication origin
tttttagcatggggaccagggaggactacggtgctcgggactgggctgcggcctcctcgcggccccgagtgccctgtgaaatcagctcaggccgcgtccctctagcctgcactttccctctgttcacgctgcttccctccagggcccggcctccaagtgaaggggggcggagggcggtcacctgccagaaggtctggggcgccaaggtgtgtcccgggactcttggctccgtccaggttccaggccccgccccccagcttatccctagccggggctccccaccgtgggaacggggaccagctggccggaagcgccaaactgcgtccctgtccgagccctggggatcaatcaagccgaggagttaattatgtaatgagggggcagggggtcgaggctaatgaagcctcccggggtggggagggaggggaggaggggaccgtacccaggtatccgaccccctctcggaccccttcgaggccccaggggtctccaccccagcccaactccagggccccaaagaggggaggggctgtgatcctggatctggaaggggctgagctgtgagctataaagggggcatctcgcagcaccgggggccctaagcagcgagacctgaggccagacggaactacaacatgtaccatccacgagaattgtacccgtccctgggggccggctaccgcctggggcccgcccaacctggggccgactccagcttcccacccgccctagcggagggctaccgctaccccggtgagcgttgggaccagctcctgggtaggagaataggggggctgtggccctcggctggctcctcattcttccccggcttccagaactggacacccctaaactggattgcttcctctccgggatggaggctgctccccgcaccctggccgcgcacccacctctgccccttctgccccctgccatgggcactgagccggccccatcagctccagaggccctccattccctcccgggggtcagcctgagcctggagaaccgggagctatggaaggagttcagctctgtgggaacagaaatgatcatcaccaaagctgggaggtgaggggctggccagggtccgtgtttctggtgggggtctcttgggaaaggcagagtccctggggagggggctaggactgggtggttcccgaggggctagagctctgcctaggcctagaatctgactatggcctggggcaagggttactctgtggcaggaatcaggagtcactctgtgacaagggttaagggccagtctgtggagtctgtggctgagtttagggaccaatctatggcaagggtcatgggtcagtctggggcagggtcaggaagtccctctgggttataggttagtgtgtggcttagaccagcatccagacaaggacagggggtcaagggccagcccattgaccagcatcagggaaatctggccaggattcgggatcagtatgcaactcgaataggagtcagtatatgactaggtccagggtcaccctagaggcagggacacggtcagtgtttgaccttagatgaggtctttagctggggcaggaactcaagccctagcatggaaagtcctcggccctactgcaggcagggtatattttttctaaagcaaattcatctaagagctgcagattctggtgctggagatcaggggaggagaggagggtggggacaggaagctcctagcaagaaagttagtcacccctgcttctgcaaataggctttgaggggtaggagtcatggctctgttcctaacctgctgtgtgacagatcacttaacccgtctgtcctgtttccccaaatgtaaaatgagacaagaaaaccttccagctctaagattccgccctc

SEQ ID NO: 28444 - DNA, 1443 bp, Artificial sequence
  DNA replication origin
aaatggtgactctgattatatcctaactctctaatggggatccaagtgcctgggagagaagggatgggttaagagaaaagttctacaccccttgcaaggtgcaagataaagagaatgtggtcagggatgctgacttgtgtgagctcggcctatgcaatctgaaaggctatagggtgacagcttgtcaggaggaggtgttggaaggtcaggtcaaaggctagcctggggtcagaggtgggtgactcacatatttccagcccaaagtggtcttgcagttctcgcagtggatgtcggcgacagcatggaggccggtcagcagcacccgctcctcggctggcccgcagcccacgttcaccctgtggggacatggggtagtcccagggagggtcctgccatcacagggcccaccccctcaagcactgtgtctgtcctcagcatccaagaaatgatgctcacaatttcctgcctgcaccggggaactctgggagtctcagcaggatgccaggggtcacaggtcacaacagaggtcagggaaagcaagaagggaggccagatactcacactgagttgaagaggtaggcacgcccctgactgccctggaaggactaaagggtgagagggtgggaagagaggagggggtcagggctgccggtggggagctgccaggcagcccctataggttccagccccactgtggcctggttggttaccttggagatgaggtcgtcgtggttggccaggtgagcgcggcagtgggcacagctatacctccggtgacaatcatccaagtaggcctgaaacgtcttgggctttgaaatccgcaccatggcgggggccgggggcagtggccccacgcggggagcggcccacggggagcagagggagcccagtgcctgccggggagggagtaggtgggctgtcaggacctgggccacacacatgcgaggcactcccagagccgtggggactcgctctgtcacactgggctgctctctcctttccccagagccagcagcctctccggggaccagaggcgtctcggttttgactcagtgaggaggcctcaggttgcatccatggggaaactgaggctcggaggtgcccagggtgagtcacccgcctgcttccggcctcacccttgctgacctggcagctgaagctggaggaaggggctttggaggggctgggctgtcagttcccagtttcgggggagcatgggcgggtaggcactggttggtccttgcgacctcatctggagagcagtggggttcactggtggtttagggggttcatcggggagagggtcccccacctggaggaggtaggaggcctcgccgtgaaggttgagggtcacctaggaggggaggggctctcacctgcgggcgccaaggcctcctctacgctcaggggctcttacctgcaacgcggagccttacctggact

SEQ ID NO: 28445 - DNA, 1114 bp, Artificial sequence
  DNA replication origin
aggggctcttacctgcaacgcggagccttacctggactccggggctcacctggggcgcgggggtgggggcgggcgccgggggagggggcagtcctcgcgggctgggcaggggcgcggggcgacacgcagccctgacggcgcgggcctcacctcgcctgggcgcgcggggcccggtccgccggggtgggctggcctgggagtggggggcgctcctggcgggcgccgtcccccccgggcccgggttcgcaggcgcctggacttgtttacaccgagcccagctgctgccgccgctgcggcgggagggggaggggacccgcctcctgtcccggcggccgccgtggccaatgggcgctccgcatgcaaatgagggggcgcgtcacacggcggccggcgcaggccccgaccgcccctcccccgccgcccgctcccgccggcccggaaatgcggctgcggcccgcgcgccccaggcctgctcgcattcctgcttgtggcccgcgcaggggcggggtcggaaggtctaggccgggcgcggagcgaggaagcgggtggcgctgggacgcatgctctgggggagatgagtataatgacccgcgtttgtccgccgcccgtgccccgctcaatccccgcatcaatcccgtgaggccgtttctcccgttggctccactgtaccgggggctgaggcccagggaggtctcgcggctccctaggttatccagctagtaagaggcgaagctggaattctcactgtgggcccattccatggcttttgccagagcgccagggacacactcagttcaccttctagcagggaagacccaaagatgcgcgcccctggcagccagggcgtcggaccaggcaattcctactgtccagcatcacctcctccaggcctctcggatgcctctgttgggacagctaagttcctcttcaaagactcaatttcctggtcataagctgtaaacagattctactcccgctttttcttctttgtcgcacgtctaccctatttgggaaagtttaaaccttagccaatcgggatcagctcagattgtgcggtccaaccccccagccaatggggaaaggacacagaaacaggaactgcgttagggttaaa

SEQ ID NO: 28446 - DNA, 1584 bp, Artificial sequence
  DNA replication origin
catggcccccgaacctggggcaagaagggcgggcgcgcgcggggcgggtcacgtgacagctccaggcccacgcggggccggggcaagggcggggcctggcgcgcgcggccctgcgggtgacaggcaggcgggaaggggcggggcctcgggcggggccgccgtggggaggagggcggtgggaggggaggagtggagatggcggcggcggcggctcaggggggcgggggcggggagccccgtagaaccgagggggtcggcccgggggtcccgggggaggtggagatggtgaaggggcagccgttcgacgtgggcccgcgctacacgcagttgcagtacatcggcgagggcgcgtacggcatggtcaggtgagggggcgttccgggggagggggtgccctcaggggagggggcttcgcgggagaggaggaggaggcgccgagcgctttccgggacgtggagacgcggagcgtcccgaggaggcaggagactcgggatgatcgggagcgtcccagggagggggcccctgagtgctttctgggggagggggcgctgcctacgtcctcaggggagcaggcttggaggctttgagtccacccttctgtaatgatgggaggggcatccgagtgcatgtgggggcccgcggggaccctagtgacacggggcgaggcccagaggatgagtactctcggggaggcgacatccttagtgaagaggcagtggagggcccgttttgggggaaagggtgtcttggattccccctgtgaggcagtgccagggagcctgggggagaagagccgagatcagggtggggcagggctttggccccaccaccccaggggcccagagagagatgaggcggccaggagtgccacctgcatgttttgggaggggtctgtgagtgcccccggccccaccgtgtgctctgggcctctatccctctgggacagccccgctgcccggatccctcaccctgggaccctcccctgccctgtccattctctcctgcccctcccctggctgccaccttcccagtatttgccccatggtgtgtccccagcatctgcacccccggacctgtcttgggttaaggagcctttcctgggaatgggggcgaagggttcagggccagtagaatggaaggggattgaggagaggggaagtcagtgagcggtcagtctcttcctctgtttgtaaagtcaccgaagggccgcctggctggtccccagctttctctctggagatcccaggcctccacagcaggaaggaaccagcattgtttatgatttgaccagagccagctcctgctctctcccctccctgccaaggcctgggtggggccaccaggcccggactccccctttgtaaggccacagcagcagcctctctccggtcccctcagctcggcctatgaccacgtgcgcaagactcgcgtggccatcaagaagatcagccccttcgaacatcagacctactgccagcgcacgctccgggagatccagatcctgctgcgcttccgccatgagaatgtcatcggcatccgagacattctgcgggcgtccaccctggaagccatgagagatgtgta

SEQ ID NO: 28447 - DNA, 1131 bp, Artificial sequence
  DNA replication origin
cctccctccgggacggggcggctggccgggcggggggctgaccccccccacctccctcccggaccgggcggctggccgggcggggggctgaccccccccacctccctcccggacggggccgctggccgggcggggggctgacccccccccacctccctcccggacggggcggctggccgggtggggggctgacccccccacctccctcccggacggggccgctggccgggcagaggggctcctcacttcccagtaggggtgaccaggcagaggcgcccctcacctcccggacggggcggctggccaggcgggaggctgacgccccgacctccctcccggacggggcggctggcctggcggggggctgacccccccacctccctccctgacggggcggctggcggggcgtggggctgacccccccacctccctcccggatggggctgctggcctggcggggggctgaccccccccacctccctcccggacggggtggctgccgggcggagacgctcctcacttcccagacggggtggctgctgggcggagaggctcctcatttctcagacggggcggctgccgggtggagggtctcctcacttctcagacggggtggttgccgggcagagggtctcctcacttctcagacggggcggcggggcagagatgctcctcacctcccagacggggtcgtggccgggcagaggtgctcctcacatcccagacggggcggcggggcagaggttctccccacatctcagacgatgggcggccgggcagagacgctcctcacttcctagatgtgatggcggccggaaagaggcgctcctcacctcctagatgggatggcggccggtcggagacgctcctcacctcccagactgggcagccaggcagaggggctccccacatcccagacgatgggtggccaggcagagacgctcctcacttcccagacggggttgtagcgagccgagaccacgccactgcactccagcctgggcaccaccgagcactgagtcttcacatctgttatagctgcctttgcaaaggaaaaatagtattatcttattttccaagagatatacacagagcaatttttttttctgcagggaacttgtgcaaaccaac

SEQ ID NO: 28448 - DNA, 918 bp, Artificial sequence
  DNA replication origin
gagggaggtggcggggtcagccccccgcccggccagccgccccgtccgggagggaggtgggggggtcagccccccgcccggccagccgccccgtctgggaggtgaggggcgcctctgcctggccacccctactgggaagtgaggagcccctctgccaggccagccgccccatccgggagggaggtgggggggtcggccccccgccgggccagccgccccgtccgggagggaggtgggggggtcagccccccgcccggccagccgccccgtccgggaggtgacgggcgcctctgcccggccgcccctactgggaagtaaggagcccctctgccaggccagccgccccgtccgggagggaggtggcggggtcagccccccgcccggccagccgccccgtccgggagggaggttggggggtcagcccccgcccggccagcggccccgcccgggaggtgaggggcgcctctgcccggccaccaccccgtctgggaggtgtgcccaacagctcattgagaacgggccaggatgacaatggcggctttgtggaatagaaaggcgggaaaggtggggaaaagattgagaaatcggatggttgccgtgtctgtgtagaaagaagtagacatgggagacttttcattttgttctgtactaagaaaacttctgccttgggatcctgttgatctgtgaccttacccccaaccctgtgctctctgaaacatgtgctgtgtccactcagggttaaacggattaagggcggtgcaagatgtgctttgttaaacagatgcttgaaggcagcatgctcgttaagagtcatcaccaatccctaatctcaagtaatcagggacacaaacactgcggaaggccgcagggtcctctgcctaggaaaaccagagacctttgttcacttgtttatctgct

SEQ ID NO: 28449 - DNA, 1650 bp, Artificial sequence
  DNA replication origin
ggaggaggaggaagaggaggaaggagctggaggagccggggactcgcccgctgaagatgctcttgtcaagacaatgaatgagaagcagccgtgcgcccgcctccggggtggccgcgccccttggggcggagctcttccaggcccgccctgcgctcccgggctcccgctgcggccgcctctctccccggcccctgcccgtgcaccacgttggtccccaaccatagcgcaggctgccatcccggctccgggaagcgaatctaaacttctttttaaaatgtcaaaacgcaagagcaccccattgcttctttcctccctgcgtccgcccccagcctcctcgccagcctttccctggcaggcacgaaagcgccccaggcccgcccgccaggcctcggtgcccgccccggcccggctgcgccgccccttcctcccggccccgcagacgcgagcgcagggggcgcggggggcgcggggggcgcgaggggcgcggggggcgcgggcgaggaggagccccgagcgcgctcctggacccccgggacctggctcttgcctggctctgagatctaagcatgggtggccccgggagtcgcttctcctccctggatctcctggcttcatcgggaacacccctgccctcctgctgaaataatccggcatcacgggcacctacttcgtgccaggggctacagggtcgagcaaggcaggcaagccaggcaggtttccgcccctgaagagcccagcctgggggaaggaggaggagcccacggccgctccaagccctggctttggcgaaggctcgagggcaaggaggaatagttcccacccttggattcagagaggcttctggaggcagcaacagcgggcaggaaaggcctgctctagagtcagactatgtcatgagtgcgaccgcagcctgtcacctgctgagtgaggtgtggccgctacttagcctttctcagcctcggtttctccctctgtaacagtcatacctgccacgtaagaggtatggggatgattacctaaaataacccaaggaagtcagtaaggacctcatctagaaagtggcgggtgcttaataaacgttagctctcagccatgcgtagtgactcacgcctgtaatcccagcactttgggaggccaaggctggcggatcacctgaggtcaggagttcgagaccagcctggccaacatggtaaaaccgcatctctactaaaaatacaaaaattagcgtggtgtagtgatgcacccctgtaatcccagctactgaggaggctaaggcatgagaatagcttgaaccctggaggcagaggctgcagtgagccaagattgagccactgttatcacccagtcttctctgggtgaaagagcaagaccgtctcattttaaaaaaagttagctctcatcattcttgtttaaaaagtatctgggctgggcctgaaaggattaggaagagccaacaggcaaggctagaggggtgacctgtaggctgagggacagccctgtcgtgtggagaagttcaaggaacagcaagggacgggttcaagtcccacctctgccactgactggctgtgcgatcttggccaagagggctaatctctctgaacctcattttgtcattggtaaatggggaattaataagatttgaactgccca

SEQ ID NO: 28450 - DNA, 1913 bp, Artificial sequence
  DNA replication origin
ggttggggaccaacgtggtgcacgggcaggggccggggagagaggcggccgcagcgggagcccgggagcgcagggcgggcctggaagagctccgccccaaggggcgcggccaccccggaggcgggcgcacggctgcttctcattcattgtcttgacaagagcatcttcagcgggcgagtccccggctcctccagctccttcctcctcttcctcctcctcctccacctccggcttttgggggatcactgtcctctctcggcagcaggtgaggctgggcctgggaggcgcgggtgggccggggcgagggccacctgtggggcggcgcgcgcgtgggagccgcgggctgcgggggcgcgcggctgtcaccgcgacccagccagcgccggggccaggtagcgggcgcagcagcccgtggggggacgctgcttggagtgggggccgccggggccccagagcgctctgcggaggcgagggctagggaccaccgcggccaagatggaggtgggtggccgggggtcagcacagtgtcgagggcccgactccccacggaattgagtctcggggagggtggggacgagggcagggtggggtgagcggggcagctgccctgggcttggagacaggaaggggttgagagcaaaacaagaaaagaccaagttcccctttccgtggtttccgggcctggtacctgtggtgggggaggaggcagggtggggcgatggcttcctgtcccccacctctggtccggggctcccctctctccagatacaggctgctcctcaagactggggctcttcacatacgctcctcaccgctctttgggcaggccgacctagcagcctcttcgggagtcctggggtggccgggggtgctggagcccccagtgagtaggcgaggctgaggctaggggcagaggctctgggcatggcaccctccaagcggcagcacaggccccttccctgagcaggaaggtgatgcggtggcacaaggtcgcccctggagttccttgctccccacccagacactgggggaaaccatcctacctggacctcagagcagtcggagtggcctctcccttcctgtgtgcagtttacatgggggtggagatggctcttaagggcacctgcttttctgagcggaggcgagaggcagaggtatggggaggaggagatacctggacctgagccagagacctgctggggaagctatcctgccgcctcactcccctcaggcagcccccacgccacttcctcctgtgtccagccccatgccagcaggcgagggaggccagctcctgtccctgcctttaggaagcgctgtgtgggtgtgagggaggtgggctctggacacggtaactaagagagaacccaccctcggagccatctgggctgatgacgcctgagtctgaaccattaggaaggacgggctctgcatccatcagccagtcagtcaacaaacatgcagtggggcaacaccacgccaggctctgttgcagaggctgagggtacagattgagagggtggctcagagtggcctggggccagggagaagggggcttgcaggttagagggaaggagaggctggggaaggcaagcaggcatcagccacagagggaagaatagggagcccctggagatgatgctgggaccttaaaagccagactgaggggtgtcctgggggaggtggggaccactggaagatcagagttgacctgaagggagaaatgctcttatgctgtgtgcccccagaatgagccggcaggtggtccgctccagcaagttccgccacgtgtttggacagccggccaaggccgaccagtgctatgaagatgtgcgcgtctcacagaccacctgggacagtggcttctgtgctgtcaaccctaagtttgtggccctgatctgtgaggccagcgg

SEQ ID NO: 28451 - DNA, 1590 bp, Artificial sequence
  DNA replication origin
tccagcaagttccgccacgtgtttggacagccggccaaggccgaccagtgctatgaagatgtgcgcgtctcacagaccacctgggacagtggcttctgtgctgtcaaccctaagtttgtggccctgatctgtgaggccagcgggggaggggccttcctggtgctgcccctgggcaaggtgagcccctggggccctggggggagcagctcctccaccggacccatggctctgtgcaggtcctgattaggtgacggtcaccaggccttccagggcctgtgttgccatctggaaaactgagctgggccccatgagccttacacttcctccagctcctctgtgctgtggctgtgtggaaactgacgctcagaaggagccaacacaagatgggtcacaccagtgaccaggactacagacagtcctgcagacccatgatcagccctcctgagcctcagcctggggctttctccccatggaaacacagagggggttgggatggggtctgggggccctggcagcgttctcagggttgggagggactctggctctgggcctgtctgaggacctagcaactctgtcccccagctcgcaggcagggatgatgcaagaggtgctctcccccacccgcagccctgccctcccctggagcctgctgccccctccgctggctggctgctgccccgcacccccagcacactcctgtgctctttggggggtaagacaggaaggggagatgggccccaagttgttaccttaaaagggctgatggaagcaaagagaagaggaagtggttgtcggggtgagagctgggcccgcgccccacatggctgtcacacaggaagccctgctgaagcagctgtccccggaagaagccatttccaaacctctgctcctgcctggggccagttgggacaggctccctggcccctctccttttgggaggacccacccctgcagccccaccactcacactcgctctctggggagctgcctccacccccccagcccccatacacctgtcctggctccagggccagttgtgcccatggaagcctcactcggggaagctggggtgggggtgccaaccctaagggcagagacagactgagacagagaccggcgggaactctgccagggtcttgcacggcccccaacctctgccatgcgtggccagccctcctggggtttgcccaggccattttgggactggaacaagagaagaacaacccgcccccgtccccaccccaggccctggtccagctcccagggacaccacagctttcctctctgggcctctctgaaggaggtgtggggaggttggattgggtttgggaggcaaaagcacctccaaggccctgctgtgcctttagactggacgtgtggacaagaatgcgcccacggtctgtggccacacagcccctgtgctagacatcgcctggtgcccgcacaatgacaacgtcattgccagtggctccgaggactgcacagtcatggtgagtggtggtggggacccaggggctgggagaggggctctaggatgggatctgacatttggagtcctgaagactcactggcccctcctctgcaggtgtg

SEQ ID NO: 28452 - DNA, 857 bp, Artificial sequence
  DNA replication origin
cgcccccgtccccaccccaggccctggtccagctcccagggacaccacagctttcctctctgggcctctctgaaggaggtgtggggaggttggattgggtttgggaggcaaaagcacctccaaggccctgctgtgcctttagactggacgtgtggacaagaatgcgcccacggtctgtggccacacagcccctgtgctagacatcgcctggtgcccgcacaatgacaacgtcattgccagtggctccgaggactgcacagtcatggtgagtggtggtggggacccaggggctgggagaggggctctaggatgggatctgacatttggagtcctgaagactcactggcccctcctctgcaggtgtgggagatcccagatgggggcctgatgctgcccctgcgggagcccgtcgtcaccctggagggccacaccaagcgtgtgggcattgtggcctggcacaccacagcccagaacgtgctgctcagtgcaggtgctgcgggaggaggggcttgggggtggctcgtggcctgcagtggatgagggcaggaggctcatggcttctgacactgtggggaacgtgcaggttgtgacaacgtgatcatggtgtgggacgtgggcactggggcggccatgctgacactgggcccagaggtgcacccagacacgatctacagtgtggactggagccgagatggaggcctcatttgtacctcctgccgtgacaagcgcgtgcgcatcatcgagccccgcaaaggcactgtcgtagctgtgagtcgccatctaccctgacctttgaccctacagcctttatccttcttatccaccatcagccaggcccttggatgctgccctccctc

SEQ ID NO: 28453 - DNA, 966 bp, Artificial sequence
  DNA replication origin
ccggtgctgcattaggcccagctcctccctggctccccttaccccagcctctgctgagccccatccctagagccctggccttgggccctttagtcgctcagctggttgctgcctggagacctgcaggcctatcaatctgaaacctgtgttctgaggcctcaggattaccattcccggacccacaaagattcccaatgttgtgagtttgaggtgccccaaacaccagccccaccccaccctcccagttttattccctggcttcccagccctctcaccgagctgggagtgccactggcctctggtgctgccctcctgcgcccggtgtccaggccccggttgaccctcagctcccggctctttgggggtacgtagccatccttgagggagatgaggaggggcccagcatcccgaccccccagccactcctcagccgtgagggcagggtcgggccctgcggtgggtgggtacaggtcctcctggaacaggtccgactgtgggcaaggccagggatagtgaggaaagcgcttatgccaggacaccccccacaagaccgcaaagtcagtgcccagcctggagcccagggtggggcgggggagcatcacctttcgaggcactgtcatggcaatgggctcacacctccgctcgtgcagcttgtagaacctgtgggaaggggaaggtgagcggggcccacagtctggttgggtgggcttgggactgcccactgcccaaggagcatgctgcggtcagggccgggggtcagtcacctggcgatctcacacttgttcacctccaggccacgtttgggcatgtagcccatgccccgctgggactccttggaactgaacatggagagatagtgcaggaaaggggcctcggaagtgatctcaaagtaccggattgagctgtcaccctgtaggtggcaggtgtggagggagggtcaataccagcggatgcccactgccctgg

SEQ ID NO: 28454 - DNA, 1860 bp, Artificial sequence
  DNA replication origin
ctcaaacaacaaaaaacaaataaaacaaacaaggtcctagcaaccctactaacctgttatgaagactgatacaggggcatcacctgccccaattttctgactcaggtcagccttatattcctactctaatctcacccctatccccgtcccacacccactattcttaaaacctccatggtcctccgggggcagctgtagacacattaagcccagggctatggggccactggaaccttctccagtgggtctgaaaacatcagcattccaggagttgatgagcccctacctgggcaccactccctcttgggcctgagaaggccggggggaacctgcaaggaatatgtggaattctatatggtgcctctgatactgcggtaatgtcagggagaggtttgttcaactggtcagggccctgaaaccccgatcactttctcatctctgcatcttgaaggctagcagagaggaggaaccctgagctctctaggaggtgggtaggtggtggcagtacagactcctagatgtctaaacggagttgcagagagaaggctttctcggtagaccctggaagggacttttacggtagaactttcattttacaagcagggatagaggcctagatggggacagagacgtgtccaaggtaaaacaatggacggaggcagggcagggagaggccaggtcctagactcggcctcagcacccctcccacacacacatcgacacagaagctggtccagatttataatttaatggctgtgcagatcccagtccctcatttctgtcgctcacgtgcccactggtctggggtcagggttttctgttcaaaggcatggatgtgcgggagctcttctgctaggcacgcgttcaccagcctggggcgagagatggggttaggaaaaggccagcggtgatcgcacaccccgaggctagggtgacccaagagactggtgtccccaaggttgtagtccccaggccgtgggaacacgtacttggagagagggtctacatcgaaatactcgaagcaggggtcacgaaggcgggatcctcaaggtccctgagccacgccagggggagtgcgggagtcaggttgcaggggtagggggagtggctggggttgtggtacaggagctaggcaaggtgctcccagggccttacctgtgtctctgaagcagcggtttcccctcgaacttggccgacaccaccaggactcggaagctacaggagcaacggttgagggtcgtgtcctccacctcctaccgagcggaagaatatgaatggtgccgaacccgccccccgagctcttttccccttgtccggcggctcaactcaccacatgctccgcctccaggtcccgctgcagcttctcgcggaggtattcggcgctgagttccatggcggcagtccagctggaacggcagcccagcagggacacaaccccagctcgggcgccggccacgctaccttgctgccttacaggagccacttccgctggaaaactcacttccgcccttactaaggcgtacgtcaacgcagtacttccgccctcaagcagccgggctttccagcggtccaggcttttcgcgcttgccatgtgtcagccaatcagagcctgaggaaggtgggactcgggcggagccgatgctgaatggtacgcgctcgccgactggacagcagtctggcttccgcggtcggacttctacacccgcctccagacaggagaggggcacgtaccggcgctacggcttcctgcaggctgcctccggatagtccccgagagcttgttccgaagcaagcaccctgcagccctagcgatccagccctcccctggaccctaggtcacggcaatcaaccccctgctgt

SEQ ID NO: 28455 - DNA, 1038 bp, Artificial sequence
  DNA replication origin
ccaggcttttcgcgcttgccatgtgtcagccaatcagagcctgaggaaggtgggactcgggcggagccgatgctgaatggtacgcgctcgccgactggacagcagtctggcttccgcggtcggacttctacacccgcctccagacaggagaggggcacgtaccggcgctacggcttcctgcaggctgcctccggatagtccccgagagcttgttccgaagcaagcaccctgcagccctagcgatccagccctcccctggaccctaggtcacggcaatcaaccccctgctgtggttcccgaaccccaaggcccgatgggtcccgcgggggtcgcggcgaggccagggcgctttttcggcgtctacctgctctactgcctgaacccccggtaccggggccgcgtctacgtggggttcactgtcaacactgctcgtcgggtccagcagcacaatgggggccgcaaaaaaggcggggcctggcggaccagcgggcgagggccctggtgagagggggaggccttctgtgccgggaggaaggcgtcccagaggaggcggaccccgcggggcacaggcctgttgagaaggaccggccaggactgtgacagaggcggggcgtctgtggtggggacggggcctgtcgcaggggaggagcgtgacggggaggcggtgcccggggcatctccgcggcggaactcagggaaggagctagctggggcgggggtgatgatccaggctgggttccagcatagggctcttggtgggcacgctggggtcgggtggaatgcaggagagagaggaggtgggacaggtgggtacctgggctggaggcagggcctgaggtgggcaggtgcagagggctgcacttctcggctgaagccgggaatgaggaccccgctctcgggtgggattggaggggacccgcggctgaggcgctgggctgcgacagggacatcaccgttctcctcctcagggagatggtgctcgtcgtgcacggcttcccgtcctccgtggccgcccttcgggtaaggaaggagaccggg

SEQ ID NO: 28456 - DNA, 812 bp, Artificial sequence
  DNA replication origin
aggaccccgctctcgggtgggattggaggggacccgcggctgaggcgctgggctgcgacagggacatcaccgttctcctcctcagggagatggtgctcgtcgtgcacggcttcccgtcctccgtggccgcccttcgggtaaggaaggagaccgggcagcggcggccgggtgagggcttgggttccgcccctcgctccgagccgccctgatgcccctgtacgccgcccgcagtttgagtgggcttggcagcacccgcacgcctcgcgccgcctggcgcacgtggggcctcgcctgcgaggagagacagccttcgctttccacctgcgcgtgctggcgcacatgctgcgcgcaccgccctgggctcgcctcccgctcacgctgcgctgggtgcgcccagacctccgccaggacctctgcctcccgccgccgccgcacgtgcctctggccttcgggcctccaccgccccaggccccggccccaaggcgccgcgcaggtccctttgatgacgcggagcctgagccagaccagggggatccaggggcctgctgctccctgtgcgcccagaccatccaggtgaggtccccccgaggaatggatggctctagagtccagacgacttcggatccagctctttcttgagggaaacccactgacacgctttggccaccctatccccatctctaagatgctgatgctataggacttacggccattcctgagcaaagcaggccctgctcagggccttcaccatttccccttcaaagaaaaggttcttccctaggccatcagtactccgctgcactccagtgtgg

SEQ ID NO: 28457 - DNA, 1396 bp, Artificial sequence
  DNA replication origin
cccatccacggccttcacccgggcagccaccttgtctccaggtctggccacgtagtctcctgaggcagggatggccccacagaggggtgggggcctgtgagtggaacaaaggatcagtcccagcccctgggcaccagccccttcctcgcagctgctgccctcacttgtcaccaggcttcccaatccacaggggcagggtcatggccgactgctgcagcagggtcatcagcacccctctgcgcatggtcttccggggtggctccaagtcattgtagagacccgcgatcttggccactgtgggaagaaagggaggcctgaggccccagggacaggggctggccctgaccccccagcatgctgaactgagctgctggaggagcacctgggagcccccagctcccgagtgagcccgagggcacagcaggactgtgacctgatctgccaggtgtcctacaggggctgctgcgctcaactacatatgggtgagacggcagcacaccaggcacccaggggaaggaaccagggagggacaaagcgggttctgaggtgctggtgaggttctcttcttgatgtcggtgctgacacagaagtgtgtttcgttagtgaaaagttcctaaaattcgaagggtcccgcgggaatcggggcgaggccgggtgcctcttcagcgtccagctgctctactgcctgaatccctggtacccgggccctgtctacgtggggctcactgtcaaccctgttcgtccagcagcacaatggtggccgcaaaaaaggcggggcttggcggaccattggccgaggtccctgttaagagggggagggtctctgtgcccggaggaaggctccctggaggaggcggaaccggggggcacaagcctgctgagagggacccactaggtctgtgacgtgcgcgggacgtcccgggcgaggcctgttggtggggggaggctgtcgcaggggaggagcctaacggggaggcggtgccctgggaatctcggcgttagaactccggagagcagctggctgaggcgagggtgatgatccaggctggggtccagcgcaggggtcttggggggcacgctggggtcgggtggagcgcaggagggagaggaatgagaacaggtgggtacctgggctggaggcgggacctgaggtgggcaggtgcagggggcgtgccttcaggcagttgcggggccagggctcggctgaagctgggagtgaggaccccgttctccggtgggataggaggggacccgcgatgctgggctgcgctggcggtagggcgcggcggggctcacaggaacattcctgttctcctccccatggagattgtgctcgtcgtgcacggcttcccatccgccgcggccgcccttcgggtaaagaagaagaccgggcggc

SEQ ID NO: 28458 - DNA, 1189 bp, Artificial sequence
  DNA replication origin
ggtgagtctcccaagccttccaagaattgtgtgaattcagaggcaagcgggcaggtgggagtgtgggagaagctgaggcgtccggcttccaggcagaggagaagctgctcacatgctagggccacaggcccctcctccctcctctggaagccccttgactggcaggaccacaggcaactagctctgcctccgccctcagcaaccaacagaaggcacccttgactcagactttgtattgcattccagtaaaaagccccagacccgcagtggatggcatagaaaaaaggtgggaggggggttacacagctcaatcctgtgaggcaggggcgacgattattcacatcttagagatgaggaaatggaggtggggggggggtaaaatccttgcccccagggactaagctggccagtgtcctgtgagcatgggcagtgattgactgagtcacagcctcacccctgcagccagatctgaacttcctcatagctcagcaacccccgccagatcactgaatctctgcagggcaagccctttactcactcacagtagaggccaggaccatcgtctgttattttattaactgtttcttggccattggctctatgtgggactttgttctacagcagtgatgagagctgcccccaggcagtttagtacacaggttcggaaggggtttaatgagatgcataaaatttgtagtatggcagaaaataataagggttcaggaaaggggggcgggcagggaagtgcacaagaaagagccgcaattttattgtattttatttttttagagacagggtcttgctgtttcccccaggctggagtgcaatggagtgatcatagctcacttcagcctccaactcctgggctcaagcgatcctcccacctcagcctcccccgtagctgggactacaggcatatgccaccatgcccggcttctcagagctgcaattttaaattgggagccagggaagacctccctgtggaggtggcaggttatcaagactgaagatgtagagaagaaccttccagtcaaagggaaaaggcaggtcctgctgtgctcaggaatggccagaagtactatcatccatccccatcttagagatgtggacagggccgcaacagtgtcagggcgtttcctggctcctcaacagcaggatccgaagtcgtctggaggatgtgccgctctgc

SEQ ID NO: 28459 - DNA, 1086 bp, Artificial sequence
  DNA replication origin
ggaacccggaacggccgtcctcttcccccgccctccgccgccgcctcctcctcctccttctcggcttcctcctcagccccgggccggagcggggtgtcggcggcggccggttcgggcggcggcgcttggccatgtcgtgtcggggaaggtaatgagccgcagagccccggggtctcggctgagcagcggcggcaccaactattcgcggagctggaatgactggcaacccaggtgggtgaccggcccgggaccccgccccgacctcccgggctccgcctcgggcgggccgaggcctagggccgcggggctgggaggcgcggcctaggccctccacccaccggagccgggcgcggcttcctgggtctcctcctccccggctaggggaggaaggccgcggggaggcgaggcctaagtgcctctcccctccctgcttgttcagcccggggctgaagccgagccccggggctcccggcggtggcactgacctagggtcgggaccaggaggtgagaaagaggcgggggtggtggggggggcattccacttaccgcctccccctgaccccgagttgggagatcctgagagtccaggaccctccctgttactcattcactttctcggttccccagtctttcagccgccacgtgagagctcttgtagcctctgttcctttctgtgacccccacatgttaatattgaaaaaaccaaaacaaaactccagccaaggcattgctctgactttaggcagaacattcattagtggagcatgagatgagattgtgtgactgttgatgggatcgacccactctggtcttgggcgatggaagttttccctaagtgcaaggccggttactctggtgaatcgtaattcatacctggacacttgagtgaactctttgggcacccacttagaagtctagagaatttcctcttttatggaggatttgatctcagaccgttttggggcttagttagatttgaatatattaggaacattaactttttaaataaatgtaatttcctatctttttgatcaatggggggagggtagctgtgcctaatttaggattgatttattctaacctctc

SEQ ID NO: 28460 - DNA, 1986 bp, Artificial sequence
  DNA replication origin
ggggctgaggaggaagccgagaaggaggaggaggaggcggcggcggagggcgggggaagaggacggccgttccgggttccgcctgagcccgcagggcaggacgagggagcggcgcggtgagagaggcggatgaaggcgaggcgacgtctcttccagggccgtgcgcggcccacgacgctggggccccggaggacgaggaggacgaggagcaggcggtggcggcagctcctcacgctcacacggccactgcttccccgcctcccggctccgcccgccgcgccgccgctgtcgtacggcaagctgggagcgagaggcggggtcggccccgccgggcctggggagagaggcgggtcctgtcggcggggcggggccgatagcaggcagccccgccccccacggccccaggctcttggacggcgaagctgggcatggtggtgggcaactgtaatcccagctactcaggaggctgaggcaggagaattgcttgaacctgggaggcagaggttgcagtgagctgagatcacgccattgcactctagcccaggcaacagaagtgaaactctgcctaaaaaaaaaagaaaagaaaagaaagaaagaaaggtggccccgttaatgtttatgccaagacagccggcatgacctggaagtgtcccaagccacagggcatcttgtttccggggaggatgaatgaatcaaatcgcacctattttgaggcaagcaaggactctgtgacttcaggagccctggtgggtggacagaagctccctgctcccccagcctgtctacccagcagcgctttggccagtcccattcctgtacttctgagcctgcctgtcagtccctcctcacacgcacaccgtggctttgtgcctggtactgagtgtcccggagccccaaaccacagggtcaaccccatgaaagaaaccgggactctgctctcatccactcgcccccaccccccgcgtaatcccctggtgctcacacagccccaccgtaaagtttttgtagctccctggcagacttgtgctcctgtttgccagatcaaagcccagtgacctgagcggcctgtccccagcagaggccactagtccctgtggacccaccccattgggaaaggcatgggttgaactttaaccattaggctcagggattgggatgagtttctacaaaaagaggtgggtacacgccagtccacagtggtcctgatcaaagtgagaacagacagcagggaacatcaccctcttcagattggagtcagtgggaacagacctaagatgttggggaagaacacttggaagacctcagctttctcctgggttgagcagatgtgggcccctctctggagtcgttcgatgaggccagggtgatggtgttctcagcgttcctgtgcgcggcgaaccagcagtaacacttgtaagtagagcctcaaatttcccaaatgcaactggatccttgtcttagctgatggggtctttcaagatgagagagtagagaccatcccgagccacacgggttcagatttccactctgtttctattttttttttttttttaagatggagtctcgctctatggcccaggctggagtacagtggcgcgatctcagcggctcaccacaacctccacctcccgggttcaagcgattctcctgcctcagcttcctgactagctgggactacagacgcatgccaccactcctggctaattttttgtatttttagtagagacagggtttcaccacgttagccaggctggtctcgaactcctgacctcgcgatccgcccgtctcagcctcccaaagtgctgggattacaggcgtcagccaccacgcccggccctctttttttctttttttgatgaagttttgctcttttgcccaggctatagtgcaatggcatgatctcggctcactgcaacatctgccccccaggttcaagtgaatctcctgcctcagcctccaaagtaactgggactacaggcacccacc

SEQ ID NO: 28461 - DNA, 890 bp, Artificial sequence
  DNA replication origin
tggccctggtcctgctgcgccacacgctgggctcagtggagaagctgcgctcctgccaaggcatgtatgagaccatggagcagctgcgtaacctgccccagcagtgcatgcaggaagacttcctggtgcatgaggtaggcctgtgccctcaacgcagcccctgcctgcctcagcccgctcccaccctcagctccattctggtacgcatttcctctctgtgcaggtgaccaatctgccggtgacagaagcactgattgagcgggagaatgcagcccagctcaagaagtggcgggaaacgcggggggagctgcagtatcggccctcacggcgactgcatgggtcccgggccatccacgaggagcgccggcggcaacagccacccctgggcccctcctccagcctcctcagcctccctggcctcaagagccgaggctcccgggcagctggaggggccccgtccccgccgccccccgtccgcagagccagtgctgggcctgccccagggcctgtggtcactgctgagggactgcatccatcccttccctcacccactggcaatagcacccccttgggttccagcaaggagacccggaagcaggagaaggagcggcagaaacaggagaaggagcggcagaaacaggagaaggagcgggagaaggagcggcagaagcaggagaaagagcgagagaagcaggaaaaggagcgagagaagcaggagaaggagcggcagaagcaggagaagaaggctcaaggccggaagctttcgctgcgtcgaaaggcagatgggcccccaggcccccatgatggtggggacaggccctcagccgaggcccggcaggacgcttacttctgacctctgccctggggctggactgcatggcccccctctt

SEQ ID NO: 28462 - DNA, 926 bp, Artificial sequence
  DNA replication origin
cgccctggtcctgggccgggaggggcaggggggatctcaccctacagtggtgatgggggagctccctgctccctgcttctcaggccccacccctcctccttgttcttgctcttctcagcaagccttttggtgcctggtgcagatctgcgacaagtacctcccaggttactacagtgcagggctggtgagtgtctggaggctgggtgcatccggggctgtggcgtttcctccaggctgcaggcaggtccttgccttgccccaccctggccttcccggcttctgcccacagggccggccagttctcccctgatgggggcacagctgacttggccctcttctcatggcttgtcccacctgcaggaggccattcagctggacggggagatcttttttgcactcctgcgccgggcctccccgctggcgcatcgccacctgcggcggcagcgcattgaccctgtgctctacatgacggagtggttcatgtgcatcttcgcccgcaccctgccctgggcgtcggtgctgcgtgtctgggacatgtttttctgtgaaggtacttctgtggccctccaggccatgaggggctggggtttctgtggtggctaccaggggttctgtcatatttctggtggtccatggacaaaaggtacttgttgggtggaggtttcaccataagcagctgggggctggagaaacaggcctgattttagttctgccaccaacccagagcctgctctccctgccaagatcctgagactgatagcagctcatgtactttcacagggcctcagtttcctcatctgagattggcagtagatggggatgggggctgtgagtctatcctgatcaggacaggctgagatcttgggtctgaccaccccatgctctctactctccacccctgcaggcgttaagatcatcttccgggt

SEQ ID NO: 28463 - DNA, 930 bp, Artificial sequence
  DNA replication origin
gtgcagtggtgtgatcttggctcactgcaacctctgcctcccagattcccagattcaagtgattctcccacctcagcctcccaagtacctgggatcacaggtgcccgccaccacacctggctaatttttgtatttttggtagagacggggttttgccatgttggccaggctggtctcgaactcctgacctcaggtgatccacccaccttggcctcccaaagtgctaggattacaggcgcgagctactgcgcctggtgaagagactttttttttttttaaactcaaataacagcatgtgggtatgcttgtgggaacggtggagagagaaattgatagtgcaggagcaaggggagggttgttggagtggtggcctgtacacgcgagaggggatgggatcctgggcccaagtggaaaggaagtgcttgccaggatcacagactcttcacccatagcaacagggagaaggcagggacacggaagcaggcaggtgggtgatgggtgtgggtgcttgtggaagttacatatttattttaatatgcattaggtaaaataaccatatcaaacctgtcatttcgtggatgcttttgcaaagtggagaaaaaatgtcaactaaatagtagggtggtatgcagataaaatacaaatgaagatcacacttgaatgcctggagttttgggaaaagctattctgggaagtggtcaggaggaggatgtgtgagactggaggcagggagaggatctgggaggtcattttttatgggcaagaaatggaggtctgagctgcgaatggctgtggaggtggagaggagcaggcaggaatggaattcagggtgcagcgctgcttaggcttggagtaaggggctcttttctgatgtggggctgagtgaatagaagtcctggacacggcagtggggcaccctcaagaagagca

SEQ ID NO: 28464 - DNA, 1868 bp, Artificial sequence
  DNA replication origin
acccctgccccgcctctgcgcgcccagcggccgctccgcccccggcgcgcgccgagccgcgcccttcgccctctcccctttctcggctggcctcgccgggaggcccgaggggcggcgccttctgcggcctccccggcggggggatgtgaggggcggcccgcggccatggagacgggcacggcgcccctggtggccccgccgcgccgtcatggcgcccccgcggccccctcgccgccgccccggggttcccgggccgggcccgtcgtggtggtggctccgggacctccagtgactacggccacttcggcccccgtcaccctggtggcccccggggaggcgcggcccgcctgggtcccggggtcggccgagacctctgctccggccccggccccagccccggccccagccccggctgtcacgggcagcacggtggtggtgctgaccctggaggcctcgcccgaagccccaaagccgcagctcccctccggcccggaatccccagagcccgcggcagtggctggagttgagacatcgagggctctggccgcaggggcagactcgccgaagacagaggaggctcgaccctcacccgccccaggaccagggacccccaccgggacccctaccaggaccccttccagaacggctcctggtgccctgaccgccaaacccccgcttgcccccaagccgggaaccacagtggcctcaggagtgactgcacggagtgcatcaggacaagtgacaggtgggcatggagctgccgcagcaacatcagcatcagcaggacaggctcctgaggacccctcaggccctggcacaggcccctctgggacttgtgaggctccggtagctgtcgtgaccgtgaccccagctccggagcctgctgaaaactctcaagacctgggctccacgtccagcctgggacctggcatctctgggcctcgagggcaggccccggacacgctgagttacttggactccgtgagcctcatgtctgggaccttggagtccttggcggatgatgtgagctccatgggctcagattcagagataaacgggctggccctgcgcaagacggacaagtatggcttccttgggggcagccagtactcgggcagcctgtgagtaccagtgggcacccagcgggaccgcctcggggaagcaaaggttgggggagggcgaaacgaaaacgatacactttgcccagactctggcagcccagcctcctctgaggatccacggggtgatcagcgcgagctgccgtgtcttgagcatcctgaggtgcctgtgacattggcatgttagtggagtttcagaccaggggtcaagaggtctgggtttaagccttgcctttgatgggttgtgtgcccttgagctagtggcttccccatttccgtgcctcagttttttcctctataaagtggattgaatgagatgatacctgaggtcatccctgctctttgatggggaactccagctacaggccggatattctggagggttggttgggcgagggttctggtagagacccttggtcccttagggtggatagcctgggaggggtgcaggcatctcccttcccccatagccctaggtcccagggatggagtagagaggtggggaagtctggctgatggaagggagactgtgcagtcaggatcccgctgtgaaacagggcagtcttgtatctgcactgaagtaaagggtgggagaggcctcttccccatttcctcatctccccagccgggctgactctttcctagttctctccggggcctgagtcactcccgaggtagggggtgattgcctctgacttcttccttccccctctctggatcctgcccgttgttcctgtgcccctttgacct

SEQ ID NO: 28465 - DNA, 1023 bp, Artificial sequence
  DNA replication origin
cccgggggccaccagggtgacgggggccgaagtggccgtagtcactggaggtcccggagccaccaccacgacgggcccggcccgggaaccccggggcggcggcgagggggccgcgggggcgccatgacggcgcggcggggccaccaggggcgccgtgcccgtctccatggccgcgggccgcccctcacatccccccgccggggaggccgcagaaggcgccgcccctcgggcctcccggcgaggccagccgagaaaggggagagggcgaagggcgcggctcggcgcgcgccgggggcggagcggccgctgggcgcgcagaggcggggcaggggtcggggggcgccgcgcgccggggtctctctcgagccctctcaccccctcgcgcgctctcgccaccgccccctccctcctgcttgggggcgagccgccgacctcgcgcctgcgcacacgccgcagagccggctccgcgccagcgtctcggcgttccacgcctgcgcgcggactggctcatcgcgctccttttttctcccgcctagtcagaggatttggacgaatagtgggagagagagaactgggcttctgccaatcgttggaatcgtgggcggggctggaggcgaaaaaggggtgggtcatctggaaagaggaaacggagaaagctagggctgtaagaccaatcagaggacgaggaaaggcagggggcgatgggacgaaagaaataaccaatagaaacgcaggggtctgaacctcctggccaatgaatatgactgaagggtgaatgaccgcggaagggcggaggaggaggcagggctgtgcgagtaagaggtggggcctggaggcttcttaaccaataggaatggtaaaaagggagccaatgaaaaggggagcaggtggaggtcaaattgacaggcagtgatgtctatttaggcggtgacagacagcatccgcagtcaataggaagagctgaagaattctttaggtctcccaaaatggtcagtaaggaatgacagctgggaggaggcgggg

SEQ ID NO: 28466 - DNA, 1472 bp, Artificial sequence
  DNA replication origin
ctttctgtgaggtgccttgatagccagtggcagctcactttattctggccaagagccagcttggctgattgtgtgactttgatgtaccctctcttctccctctgggcctcagtgacccagtcccctccatgcagcagaagtctggaaaaatagtggctgaggaagccccaagttggcaaggacaaccatctccttctcctcccgctccctctaggacccgatgtcctgaggaagatgcctccccctgccctgtcccccctcctccaggcccatgccgatacctctaagacattttcttttctgggcactgaggccccagccacctgttgtctctaagaagagagaaggagccaccctaaacttagcagctgcccttagcctcccacaccagcccctccctgcctcagacagcagctgcctcgccttatagggttaccacgggggtccaggccagggaggagcccacttattactgggttctgggagaggaggaggactccaaaaaggggaatgggaggagagctcaggaagcttgggtcaaacgggagatgggaaaggtgaggagaaggagatcagacactgagtgggaattgacaggacatggggctgagttgggagtgagggaccttagaggactcagaaaccaaggaggagctgagaagtcgggagctaggtctcactggaattccaggatggtggatgctatatggaaatcagaatatgggggtcagagaaagaagagggcgtttagaagttggaaggttggagctcataacgtcaggtctttatgcttgtgatctaaggacaacctggagcgctcatgagattgaggtcgggattctcagtggaacatgaggagcacagagggatgtggcagtgaggggagaggggttgacgggactggggccttggatccccaaaagaatagtaacacacatatggggagttcatggtattagggattcatggatttggggtttgagatccccactagaagaaatggagggggtactcagagggataaggtctgaggaactggagcctgggttctggggaggagctcagatagatgggaactgaggagagggacttggaggttgggattcccgcaggaaatgggtgaagcagagatatgggttgcttataggatctgggggctctggctattgccacctgggcctggagtgttggggttagttgggggccgagatcggagaattatagagtaaaggatgagagtactgggtcagggcactggatctgtggtggggctcagggtcccacagaccaccagagtgtggggctcaggagctgaacgaagaataggggaccggaaaggactcgagagggggcagcgcggcactcattggttgagggctgcactaatgcccccgccccttctccgtgctgtccccagctgtcaccctcccataaggcttgtctccggttgtcaccgactatccctgggctgg

SEQ ID NO: 28467 - DNA, 946 bp, Artificial sequence
  DNA replication origin
tgggattacaggcatgagccaccgcgccgagccaagagggattttttgaggcaagatgctttgtggtctcaggttttgtgctgggccttggtttcccctctgtaaaagggagatgtagttcccatcccacagaacttgccttataactaatagagacaggaatgaatgcagaaactgacataccagagctggtcaggagcccagaagtggagggcgcagcagccctgtctaggagtatgggagtggcttcacgagggccagggagtcaggtgcaggtggaggagcagatgtgctgggcggagggcatggcctgagcaaaggcctggagagcggaagatcagaagtgttcaggtggccagaattgtgatggggctggtgaccagcccctgaggggcctttgccaggcacaggacggagaccctggggaaccttggaaaggtttcatgcagaagaaggatgtgatctagtatgagtctagaatattttctctgggtactggtgtggaggctggaactcaagaggggaggaaaagaccctaaaaggacagccagctggtcactttctgtgaggtgccttgatagccagtggcagctcactttattctggccaagagccagcttggctgattgtgtgactttgatgtaccctctcttctccctctgggcctcagtgacccagtcccctccatgcagcagaagtctggaaaaatagtggctgaggaagccccaagttggcaaggacaaccatctccttctcctcccgctccctctaggacccgatgtcctgaggaagatgcctccccctgccctgtcccccctcctccaggcccatgccgatacctctaagacattttcttttctgggcactgaggccccagccacctgttgtctctaagaagagagaaggagccaccctaaacttagcagctgcccttagcctcccacac

SEQ ID NO: 28468 - DNA, 907 bp, Artificial sequence
  DNA replication origin
aggaccaggagtaggggcacccgcgggcctccgctgcccgacgcttctgttcggcccgacctccaccccggctcccaataaaatttaactgatctttgtttcttatgggcggcgccttcagagtgtctgcgcgagggcctcaggtgggagcgccccacaaatgaatggatgcggcctggaggcctgcgggggtcggccccacaatctacgcccgccgcctttttccgcaaggaaggagaaggctcgcgtggccgcgggaagctcagtttttattgaagacagagtctgggagaagaagggggactccggaagacagtgatgcggtcggagattgtgcaggccccgggccgggaagtgggcggtgtctgggtgggcgggaccagcgccggggcggggctacggactcaggctgggagaacctccccctagcccgcgcgagggcggcacccgcggaggtcccggggggcgctgggcagtgtggggcgcggggattggacaagaggccgactgaaggcggagccgaggtaaggccgggcggggcgtggcctcagagggcgtctgactgctcgccctgggcctggctctgctgcatttgggcctgcatcttctccagcatctcttgcatgcggcgcagctgtgcagggcgagattgcaggcggtgacctggcgaagccagagggggacctggggcatcggtcggggggaagcgaggtgcgtgctcacctcttcgtctttctcgcggatcagcttctcggtgtccgccagaggcagcatgggcagcgggatctctgtggcgctctggcgggaaagcttactgcgggacagtgggaaggggacaggaatcaggagcgggacctgaggttgtgggtgaggcccaggaggcagggcctggggcgaggttggggtc

SEQ ID NO: 28469 - DNA, 913 bp, Artificial sequence
  DNA replication origin
cagtatctctgtgtctcactgtctctggtcatgaaatgtctgtcattgtggcccgtttcacactgtctctatatctgtttcccctgagatccgggatcagttgaaggaagaggagatccacatctaccagttccccgaatgtgactctgatgaagatgaagacttcaagaggcaggatgcagagatgaaggtgtgggaaacaaagaaggaaggcaggccgggcacggtggctcacgtctgtaatcccagcactttgggaggctgagacgggaggatcccctgaggtcaggagttccagaccagcctgggcaacatggcgagaccccacctctactaaaaatacacaaatttgccaggtgtgatggtgggcgcctgtaattccagctactcgggaggctgaggcaggagaatcacttgaacactccagcctgggcaatggagtgagaccctgtctcaaaaaaaaaaaaaaaaaaaaaaaaaagaggaaggggcaggaagcagaggaggcgggtgtggagattgaagctgggaaagagaaagtttctgccgtgtgagccaatggtgaacccctgccccctgccctccaggaaagcatcccttttgcagtcgtgggatcatgcgaggtggtgagggatggcgggaaccggccggtgaggggacgccgctactcctgggggaccgtggagggtgagtgaggccaggcaggggtcctaaggccagcagggagcccggggcctctgggtcaggcgcactcaacatgtgaagttggggtgggctttggtcccaggggatcctaggaggaaaggggggtcgctgggctgcagaccgcggaccctccgctagagtggcagcaggactttcctgtagacccgacccttacgggtgggttggacccgaaactccctgacgttcg

SEQ ID NO: 28470 - DNA, 1516 bp, Artificial sequence
  DNA replication origin
ggcgtcgggtcccaggtacgggcgcggctcccggtgccccctgcccgcgccgccggccgcccctgcacctgctgctcctcccagcgcgcagccgccgctctcaccttgccggccgcctccggctccgccaccccggcgccctccggagctcctcagcggggtgcaggcgcccgagccgccagcggctccgggatgcaggctccgcgccaagccgggagcgggctcggacccaggcgtcccgggggcggccaccgggggcggggacgggaagcggaagcgcggggccgcacggagccgctctaggaccttggaggagctgcgggcctgtgggggtcgcccgcgtcggcggtagctctgtggccggcgggcggcagcgtgcggcccaggggctactctaagccgaggccggcggcccgaactcggtggtattaaccgtgtgcctcctgggctgcagctgggtggtgaggcccgaggctcttcgtaattgtggctgtgtgtctccagccacccgcgccgacctccccggccggccgacagcgccagccactccgacctgggagagacaaagaaagagggatccaaagacggacccggggaaaggggtgggggagagaccaaggcagacaaagggcggcggagaccccagacggggcggggcggggcgccgagacgtgggaaacaaagcggggctggtccgagaggccgagggcccggggtgggggtgggtatggaatgggggctgggctggggagaccgaggcaggagcagaggctagaggcagacaccgggtaaatgctgctggagagatggaatcagacctggggcccggaacagagaccctgagccagagactcacatcagagccctgagtcacagaggacgcaaaggcagagagagaccgagggacagcggctgaccaaaaataaggggagccaaagattagccgctagagacagagacgtagaaacggataagagataaagtcattgacgcagagtccgaggagcagtaagaggctgggagcctggagagtaacaggcccagaagcagaggaacaaaagacgatagtgagcgaaacgggcagagacaaagagaaagagacacaaagaaagaggcggccagaaagactccggacaggtcggcagccctatagaggccaggctcagggagaggctgaagaacaagccctgtttcccatcctggtgggcccctggctggagctgtgtttccaggttcccaggccctaggagcaagatcccagtatccgctctctgggcgggcttggttttggggtggagagagtgtctggaggtgtcttcagcccctctgccaatgatggtgggggtaactgtggtttatgcattaattcacatttattagcatcttagtgctaagccaagagttggggataaaaagttgaaacacctgcaagatttgtccttggagagctaccagtctaaaggagcaagtacacaaatcactgaaattagagaatttagctgggcctggtggcctg

SEQ ID NO: 28471 - DNA, 1073 bp, Artificial sequence
  DNA replication origin
gtccccgcccccggtggccgcccccgggacgcctgggtccgagcccgctcccggcttggcgcggagcctgcatcccggagccgctggcggctcgggcgcctgcaccccgctgaggagctccggagggcgccggggtggcggagccggaggcggccggcaaggtgagagcggcggctgcgcgctgggaggagcagcaggtgcaggggcggccggcggcgcgggcagggggcaccgggagccgcgcccgtacctgggacccgacgccgcccggtgcccgcgctggccggcagagggcagcggcagggcgccgcgggccacacatggctgcgtgaccgcgggatgctgtctgtccccttgctcagggcggcgtgccggcgatggagcgcgcggtagagccttggggcccagatctccaccgcccggaggagagggagccacagagaggcgcccgcacaggtgagggcctcggccgtgcgccgccacggacaggtaacggccggtggggactgcgatgcttggctgtggccggccgagatcctggaagatcggacgtgagctgtgcctctggggagatagggggaggggagctttcggagcaccaactgtgcgccaggccgggaggggctcttcacggcctctgtcccctccctcacggccttcctcatccttactgcctctgccctacttcaggcttcattctgttttatcctggcaattgcagtagcctcctctctgcccctttctctccactgatgcattctctcgccagcttgatctaagtccagatataatcctgtgtctcttctggaaaaccttccctagcgtcccccagtctcctaattaaaagccttagctagtgtccaatccaaaccgtgcgtgctcaggttagtcccaacatcctttgacaccttatcttccattccactccattattttctcttcgctctgccgtaatgccggttcctatttccttatctcctatctctcttgtgacaacatagttattctagttattctgcacccacaattataaccattgatactttaatcttatctctcctaccaccctaagc

SEQ ID NO: 28472 - DNA, 1321 bp, Artificial sequence
  DNA replication origin
ggtggggctatatgttcggaccaatgaccggccgtccctgcggtcccgccccctccccgcccccggagccgcggcctcgctgagtgcccagccgcccggcgcccaggcctggggcaccgcgagtgccgaaccttcggctggtgagtgcgcaccccctccccggggtttccgccccgatcccgcctccagcccgtgccccagagctccaggtcgccgacccgggccctggggagtgactcagcgcaaggatggtggcgacttgcgggggctggagattcgaactgttcaaggccttgaatgctgggatgagtggggtgaacgcgagccctcggagctggtcccggggctgtgccagagcgtggggccgggctggggtggacgggagaggaccagattcggagaccagggcagggcgggagaagccacggctgcactgccttgctgggccagggccacggtgggcgggggggggggtgggggggggcgggtcctgagcttctgatccagctccccgcctcaggacaccaagatgcctggcgaacagcaggcagaggaagaggaggaggaagagatgcaggaggagatggtgctgctggtgaagggtgaggaggatgagggtgaggagaagtatgaggtggtgaaactcaagatccccatggacaacaaggaggtatgtgtcacacacaccctggggcacactgtccccaaacctggtccaggcccagcctccctcagatagaagccagggatcttgcccctacttttcccagaatctcggatctaaaacctcaggattggcccatccttctgccctactgcctgggcttccatcatacaaaagtcacgcctactgtcccaggcttcctgctgggtgcaggagattaaactccgtccttggatcccccatggagcttgatgttagactgaagggtaaccacacagttagaatcccgtgtgatggctgcaggtacagggggatgatgaagcctagaagtgggaacttaactcagatttagaggttggggaaaggtcaggttagttcaacagcaacagtaacaatagctaacccttgcctagcattttctatgtgccaggcactgttctaagcacctcgattctatgatgtcggtagcatttattccattttacagatgaggagactgaggcccagggcagtttggtaactggccacaggtctcaaagtaaaaggatggcttatgtgagactagtaggagtctggggtcagaagtggggtgatggacccagtcagaggaaatggctcttttattattactgttgttattgtttgagacagggtctc

SEQ ID NO: 28473 - DNA, 1958 bp, Artificial sequence
  DNA replication origin
ctctgagcgaagcgcgtgccgcagtcggcgcaagcgtagggccgctcgcccgtgtgcgtgcgtcggtggcgcgccaggcacgagctgccgccaaaggcgcgtccgcagtccgggcacgcgtacggcttctcgcccgtgtgcacgcgcaggtgctgtgcgtagttggagctctgcgcgaagcggcggccgcagtgcgcgcatgcgtacggcttctcgcccgtgtgccgccgccggtgctgccgcaggttcgaggcggccgagaagcgtttgtcgcactcggggcactcgtagggccgctcgcccgtgtgcgtgcggccgtgtttggtcagcgccgacttctgtgagaagcgccgcccgcactcggtgcacccgaagggccgttcgcccgtgtgcgtgcgcgcgtgcttcgccagcgtggagcggcgcgcgaaggcgcggccgcagtcggggcacgcgtggggacgcgccgggtcggcggacggcgcgggcgcctcgcccgggacctgcggggagagggggataggtcagcccttagcggcaggccccggagccagagacctgggtctccacaggctgctccctctgtgagcctcagttccccatctatgaaataggaaaggccacggtgctgcctcccaggatggctgtgcgcatccagtgagataatgcgcgtaacgcacacatcacaaagcccagtggcgttctagctatttttattaattcaaccaatatttactgagggcatgcagtgtcctagactgttctaggcacggggattccgcattaaataaaaagcattaaaaaattcctgctttcagaaataatggataaggaatgctggtattggggatgctacagatttaaacagggttgtcaagacactttaccgatatgataacatgagcaaagacttaaaggaggtgacagagcaggctacgtggatagccctctgaggagcactgcagagggaacggcagggcgcagaggcgggagttgcctgctgttccagaaatggcaagaaaaattggttaaagcagaatgcatgatggggggagtcacggatgtagtggtggagatctcttggcatatagggccttgtatttgttatatttggcttttttttttttttttttttttaagagacagggtcttgccgtggcccaggcttggtcccgaacctcctggctcaagcagtccctcctgactcagccttctgagtagctggagttacaggcacataccactgtgcctggctctggcttttattataaaggagacagggacctgtaagaggagatgtcagagggctttgagcagggaagtgaccatatcctacacatttaaaaaggctcccctcaggctactggggttgaaaaccaaatgaaggagttggagagagcagaagcagaagcccagtgaggaggccactacagccacctggcaagagaagatagtggctcatacccaggtgacagaagtggacggtggatggtggaggtggtgagaagtgattggcttctggatctatttgcagtgtgagacaatagatttaataagagattagatatgaggtgtgaagaaaaagagatcaaaatgacttcaaggtttttgagcttagcaactgcaaaggtggagttgccatttacagagatgaggacggtgggaggagcaagttgagaggggagatctgttttggatggtgtcacggcttcttgacatatctggagctcagaagcgaggcctagactggagatgttaattgagaagctgtcaacctatagatggtttataaagccttgagaatgagtggatgagatcatccaggggatgggcagacagaacctagggcagcaagatggggagaagccagggagggaggagagcaggagaggggcatcctggaagccaggccaggaccaagtccaggctcttaatcagctttgaatagcaaacaccta

SEQ ID NO: 28474 - DNA, 1538 bp, Artificial sequence
  DNA replication origin
ggactgcggacgcgcctttggcggcagctcgtgcctggcgcgccaccgacgcacgcacacgggcgagcggccctacgcttgcgccgactgcggcacgcgcttcgctcagagctcggcgctggccaagcaccggcgcgtgcacacgggcgagaagccgcaccgctgcgctgtgtgtggccgtcgcttcggccaccgctccaacctggcggagcacgcgcgcacgcacacaggcgagcggccctacccctgcgccgagtgcggccgccgcttccgcctaagctcgcacttcattcgccaccgacgcgcgcacatgcggcgccgcctgtatatttgcgccggctgcggcagggacttcaagctgccccctggcgccacggccgccactgccaccgagcgttgcccggagtgtgagggcagctgagtcccgcagggctgcggaggggcgcgctggggcttcgacctggctgcactaacccaggctcctcctcgccccggcctccgggtctgggaaattgaggggacggcaggcccggctgccctggaactgggagacagggagaatcccctgccggggtccctggaaacagtgcccaccccacatcactacattccctcggcccgtgttagtgaataaagtattatatcctcaccccacccgtgcctgtgagtgaggtgggtgggagaggaagaaagttggggttctccaggctcaggtgccaagtgagttgtcaaggaaccaaatggggatgtaaacctaaaaggggttcccggcacctcggtttgtgttggttggaggtgatcgcacacttggcccttggttacgtcctcataaccttagacctgaaagggcccataaatatactatgttcacgatcagacacgcactgcattcggcagagctccagtgagcaaggcacgaccctcagatctcagtctagtgaaggagagaaaactgtaataacactacgttaaaggttttaactgctttgttatgtaagcttacccagcccggcgcacagtgactcacgcctgtaatcccagcactttgggagggcgaggctagcagatcacttgaggttaggagttcgataccagcctggccaacatggtgaaacccggtctctactaaaaatacaaaaattaactgggtgtggtggcgggcgcctgtaatcccagctactgagggggctgaggcatgagaatcacttgaacctgggagacagaggttgcaatgaaccgagatagtgccattgcactccggcctgggcaacagaggaagactgcctcaaacaaacaaaaaacaacaaaccaaaccaaaccaaaccaaaaaaatctcaaagcgattggacctagcagctcatgcctgtaatctccagcactttgggaggcggaggcaggaggatctcttgaagtcaagagtttgagatcagcctggagaacaaagtgagacccccatctattaaaaaaagaaaaaaaaaggctgggcatggtgaggcacacttgtagtcacagcaaatgaggaggctgaggtgggagga

SEQ ID NO: 28475 - DNA, 1086 bp, Artificial sequence
  DNA replication origin
ggagaatccctgcaggtaatatttgacttttgcttcatattaatctgagtggaaaataaaagggccctcttctcctctcgcttccctgccgggcaggcgccatggcggaagcctcggcgacgggcgcctgcggagaggcgatggcagcggcggaaggctcctcgggcccggcgggcttgactctgggccggagcttctcgaactaccggcccttcgagccccaggcgttgggcctcagcccgagctggcggctgacgggcttctccggcatgaagggctgaggctgcaaggtcccgcaggaggcgctgctcaaactcctggcgggactgacgcggccggacgtgcggcccccgctgggccggggcctggtgggtggccaggaagaggcgtcccaggaagccggcctgccggcaggagcgggccccagccccacctttccagccctgggcatcgggatggactcctgcgtcatccccctgaggcacgggggcctgtcactggtgcagaccacggacttcttttaccccttggtagaagatccctacatgatggggcgcatagcttgtgccaacgtgctgagtgacctctacgccatggggattactgagtgtgacaacatgttgatgttactcagcgtcagccagagtatgagtgaggaggaacgcgaaaaggtaacgccactcatggtcaaaggctttcgggatgcggctgaggaaggagggacggcagtgaccggtgggcaaacggtggtcaacccttggattataatcggtggagttgccactgtagtatgccaaccaaatgagttcataatgccggacagcgccgtcgttggggacgtgctggtgttaaccaaaccgttaggaacccaggttgctgtcaatgcccaccaatggctggataatcctgaaagatggaataaagtaaagatggtggtctccagagaagaggtggagctggcctatcaggaagccatgttcaatatggctaccctcaacagaactgctgcaggtttaatgcacacatttaatgcccatgcggccacagatatcacaggctttggcattctaggacactcccagaacc

SEQ ID NO: 28476 - DNA, 1379 bp, Artificial sequence
  DNA replication origin
cagcagctaccaatctaagctaacccactctaattaggtaatcccctgccctcccccctccctgctctagcagttgccaagccaggcacccaccaaggagccgcggctgaggccagccctccgctgacctctctccatttctcccagggcctcccgctgccggcctggcctccctccaacccacttcccacaagtctccagggcatgtcacttcctccaccctggttctcttcttccagcatcctcagctcctccattctcctgcggcttctccactatcctccctaaaggttcctctagctccctggccccttatcttctgcccacacctcccacccctgctggggccccaggtcagcgccggcccgccgcgtgggtccgctggtggcggatgaggtcggagctctgggagaaggcctttccgcagtcatcgcacttgtaaggccgctcgccactgtggacccggtgatgctgcagaagcgtggaggagcggcagaagcccttgccgcacacggcgcacctgtagggccgctcgcccgtgtgggagcgctggtgctggatgagagtggaggagcgattgaaggtcttgccgcagtcggggcagctgtaggtgcggcctggcaggtgggtgcgggcgtggatggccagcaccgagctctggccaaagcgcttgccgcactcagggcacttgaagggcttctcccgggcgtggctgcgggcatgggggataagggccgaccgctgggagaagctcttgccgcagatgccacagctgaagggcctctgaccggtgtgcaccctctgatggctgcgcagggacgagttctggctatagcacttgccgcactcggtgcagctgtagggccgctcgtggctgtgggtgcgctggtgtcgcaggaggtaggagctgtcgccgaaggccttgccacaatgtgggcacttgtagggcttctggccagagtgagtgcgctggtggcgaagcaggtaagagctgtcggcgaaggccttgccgcaacggggacatttgtagggccgctcgccagtgtgggtgcgctggtgtttgatgaggtcagagctctgggagaaggccttgctgcagacctcacatttgtagggcttctcaccggtgtggatgcgctggtgctggatcagggtggagccccgcccgaagctcttcccgcagatgccacagatgttaggccgagggccctgcccacccctggcccggccaccccgccgacctggacctcgaagggctcctgtgagacccaggggattctgaagcatctcaaactgcggtgtagacagcagggcccctgtgggcatctcaaaaggtggccctatgggcaggtcccctgtgggctgctccccaaacccct

SEQ ID NO: 28477 - DNA, 1130 bp, Artificial sequence
  DNA replication origin
cctccagcccagggttaatgccaacgagtttccacctccagcggctcctagagaggccgcggcgcgagccggcggggggacctggccgcggacggacacttcctgtgcgggggagggtgggggggtgctgggcggccgttggacagtgcagcccagcccggggccggggtccagaaggtgggggctcgggcgggagcgggggccgggggccgccggggtagtcgcgaagcccctcatccccgaggccgcgacgcgcgggggccagtgagggccacggggaggccgagaccttgggagggggcggggccgcgggcaggggaggggcccggcgcgctggagaggcgcggggtcaagacgtccggcctcgggggcccgggctgggccgccgagtcccctgggcggcgctgagcgggcgggaggcgggggcccgcggctcggggcaaccgaggccgggtcgcgggatcggccgccatcgccgccgccgctgcactgggagcccgcggggatggagcgggaggcgttgccgtggggcctcgagccccaggatgtgcagagttctgacgaaatgaggagccccgaagggtacctcagaggtgaggagggagcgcccgtccgaggagtggacttgcgcgcaggagaaggggctgtggctccagggagggagcgagggcccggggctgggacacctgggactcgaaggaggggccggcggggactggggtgtcttgggtcagctgaggggggcgtgggaatttcagcacttgtctaggggccagcgaccctgcatgtgaggtgggaggtgtgtggttgctaatggaccaaatgaccttccaggtctcacacgatctggattctctcatcctgcaggcaacatgagtgagaatgaggaagaggaaatttctcagcaagaaggcagtggggactatgaagtcgaagagataccatttgggcttgaaccccagagccctgggtttgagccacaaagcccagagtttgaaccccaaagccccagatttgagcctgaaagcccggggtttgagtcccgaagccctgggcttgtgcccccaagccctgagtttgcacccagaagccctgaatcagattctcagagccctgagtttgaatcccag

SEQ ID NO: 28478 - DNA, 969 bp, Artificial sequence
  DNA replication origin
gaagtgtccgtccgcggccaggtccccccgccggctcgcgccgcggcctctctaggagccgctggaggtggaaactcgttggcattaaccctgggctggaggggcccggccacggggtgggtgaggaccggacgccccggagcccgcggggctaccggggcagtgtgtgtgcctatgttctaggtctccgtccctccagaggcccgtctgtccatctcccgggccccgcgtcgtcggtgcgtgtggccaagggcgaggcgacaagcgagaccaaggtcagcgagaaggagcgacgcttcccggcgccagcgggggcggtgtctcgctccctcccctcccgggcctccgggtcagctccggcagcgcctcgggaaccgggacggactccccttggcctcgccgaggtccttgagcctgggaccccctccaggaactccgctccccggcacctgcgcgcgcccgctcccgttcctccggcccccacccagctcggctcccctgatcctcctcctccctcctccctcctcgagggctaggatagttgccaaggagacagccccgccccggctcccagaggcacagcttctccgccccaggaagcccggcggttggccgatggggctcgtgctctagccgccccgcctcctccaaccccgcggacggctgggcgttaatggtcgccagggaacgccaggcgccttcctgattggccgggagtgctgtggtcgggtccgcctcccctgtcggccagaagcgccttcaggaggtagtgggagggaggtgccaggcatctcccctccagcccggcctgtgccatcaaaacttttcccgcccccacttagcctccattatgttttatgaaagccagaagatctgaggacagacacccttcctcctcgtcagcctcacaccccttgcctctcccctccaccttccccagcgcctgagtttaactcaatccctggcagc

SEQ ID NO: 28479 - DNA, 1188 bp, Artificial sequence
  DNA replication origin
ccccgcggacaggagtcagggtcacagacagccccccagggcgccggcccctacgcccctcgcccccgggccgatggacccattggtgcttggccatgccggtcttcaggccgaagcagcggccacactgcgggcagcggtagggcttctcgccagtgtgaacgcgcaggtgagaagtcagcgccgtgcggcgcatgaaggcccgaccacactcgggacagcggtggggccgctccccacgatggatggcccggtgtttgctcagggaggaagcgtggccgaagcccttgccgcagtctgcgcagtggaagggcttctcgcccctgtggctgtaaatgtgctccaccagtgtggagcgccaggcgaagctcttcccgcacacgtagcagccgtgacgctggtcagctcgggggacaggggggtgggcaaaaaagcgggggcgactccggcgccgggccttggacagctgctccaacccggcaaagggggcttggggagccttcagcccaggagacccggcggccacagggtcgggcttctccagggctcccgtcccttccctttgtctttcctcttccttgtttctggaatctgctgaaagataaggaggcgagagttcaggcttggctcatcctggtcattgaatcccacagcccgcgtggacagggacaggcctgctggacccccgactgctcctaggagatggaggagtgacacctgttcctcggctgcagagccagacagagcctggagggagggaacagtccattccgcctccgggctggggaaatgtcaccgcgggggaagggcagagatgacgtgaacatctgggcctgatctggaataagaagcggacacctggggatattccaggcagaaggaacagcaccaagaaaggcagaaccaggagggcatggccaagttcagtggggctggatactctgcaaaagctgaggcaagaactaaaggaaggaaatgggagggcgggatgtgggggcataggaaccatagtgcaggaaaacgactggagcgggtcatgatgtggaggtagagtcaacagaacctagaggccgggtgcagtggctcatgcctgtaatcccagtgctttgggaggccgagatagaggatcgctagagttcgagaccagctcgggcaacacaccaagacctctacctctttaaaattttt

SEQ ID NO: 28480 - DNA, 728 bp, Artificial sequence
  DNA replication origin
cctgggcagccggatcccacagttcggccttctcctccacccaggagatgagcgccggcttgctgcctccgactcctgggggagaagaacgcaaaccccacgctgcgaggaggccgcctgcccggccccggggcccccaactccacacgcagctcccagaggcgcggcagggcctgtggaggcgcagggcccaggcaagcaggtggggctctcaccgagcgcgcccaggtggccgtaggtctcccgcatcacgtcccggtacagggccctctgcgcgggccgcaggcagccccactcctcccgggagaagtacacggccacgtcggcgaagctcacggccccgggctttctccactcggatcccgccccgtttgggtcccggggagggagcggggccagaggcggcgccatggggactgtcagccccagcgacggatcggtcatctcccctggccaggcctgggcatgcggaacctcccgcgcccgagaacacttccccggcccggtaccaagggaaggagggacgtcagtagagcccccgaaggcccactagaggggatggaaactaagggccgatggctgcgagtccatggtcagaactggacgatgtcttcaaataaaacggcggcagcgcgacctctcgacctttgcccctgcgcaattgtacccacgacgacgcccccctccccgcgcccccgctccaggcccagttctctccttgccctaat

SEQ ID NO: 28481 - DNA, 1143 bp, Artificial sequence
  DNA replication origin
cacggcggtgtcagataggggtattaacggggattggtaggggttggtctcctggggcaacgttgatttttggactgaggaaaaccagggtgtgcaggcgcccatccagttagaggggaggcaaatataagttgaggtactgcataggaaaagtatgccttggtttgttagagagaactggtgtgtatgctaaaaagatatacattttgttattttcatgcatttatacttctggggtcccggctagggctgctgctgtaagtggttgtaaaggggtgtttggtttaggctgggaggcttttgggttcttttttttgccagtgtaagaggaagcgttttgtttccactaagatgcatgtgggagtgttgttgaatgttgggagaaggagacagtcccgggtggtgggtgtagggtaaggatggtgcatggagaggggagtcaagggaagagggataaacaggggaggtgttggccattacagtacccttaatttttgttaaggaggtggaggctagagaaataaagcctgtcttttttgttggcggctttgagagtagtatgttcggtgggaggtttgagttgtagggtaaagttgcagtttggaattcaggtggctgaggggaatgccagagggtagatgtcattggatgcacagcagtgctggataggataagattttgtgggttgttatggctcctaatacgggtttatcacagctgtggtagggggataggttgcgtaaatagggatgtaaggttgtaacagctggacccaactcattagctaactgaggggagatttctgttaatgcctgcatgtcgagttcgagggggctgttaatgaggatttcgggatggtaggttacttgggtggaagtccagttacaggctgaggcagggattgcattgtatattgtggagaggagggatagaggaggttcctggaggtaggggtttagcttcaattactcggccaaggaaaacaactgcatacccagcaattttgggggagccagtgggtacggaagaggagctatctataaatagctggtcattggggttggtgagaggctgggaggaaatgtttagaaagtgtggctgcaggtgatctaggatgttagtataagaatgagtagaagggga

SEQ ID NO: 28482 - DNA, 1765 bp, Artificial sequence
  DNA replication origin
ctagattctgggacctccctgcaggccgccgcagaggttcgggcccctgagcccatctcgggcctcccgtaatgtctagatagtcacttttaaggccgtcacccacactcctggaatatctccgggtacagctggaagcccacgggcgggtccaggtctccgtggccaggggtcagggtcacagacagacgcccggcgacccggcccctgtggcccccggccccgggccgatgaacccactggtgtttggccacggctgacttctggccaaagcggcggccgcactgcgggcaggggtagggcttctcgccgctgtgggtgcgcctgtgggctgccatctccgagctctggcggaagcagcgcccgcagtccgggcacgggtagggcttctcgccggtgtgggtgcgcacgtggcgccgcaggtccgaggggtaggcgaaggcgcggccacagtccgggcaggggaagggggtctcgccgctgtgcacgcgccggtgctggtagagggcagagctctggctgaagcggcggccacagtcggcgcagccatagggtttctcgccggtgtggacgcgcaggtgcgaagtcagcgccgagcgctgcgtgaaggcccggccacactccagacagcggtggggccgctccccacgatggatggcccggtgtttgctcagggaggaagcgtggccgaagcccttgccgcagtcagtgcagtggaagggcttctcgccagtgtgactgtagacgtgctccaccagtgtggagcgccaggcaaagctcttcccgcacacgtagcagccatgacgctggtcagctcgggggacaggggggtgggcacagagggaggggcgtccccggtgcggtgccttggacagctgctcccaaccataagggggcccggccgagggggcttggggagacttcagcccaggagacccggcggccacagggtcgggcttctccagggctcccgtcccttccctttgtctttcctttttcttgtttctggaatctgctgagagataaagaggggagagttcaggctcggctcatcctggtccttgaatcccacagcccgcgtggacagggacaggcctgctggatccccggctgctcctgggagatggaggagtgacacctgttcctcggctgcagagccagacagagccgggagggagagaacagcccattccgcctcggggctggggaaatgtcacggtgggggaagggcagagatgacatgaacatctgggcctgatccagaaggaggaacggacacctgaggatgttccaggcagcaggaacagcaccaagaaaggcagaaccaggagggcatggccaagttcagtggggctggatactctgcaaaggctgagggcaagaaatgaaagaaaaaaaggggggcggacggggagaaaggaaccagcctgcaggtgaacggcaggggtgggtcctgaggtggaggtagagtcaacagagtttaagagactgggcgtgggggctcaaggcggtaatcccagcgctttgggaggtagagaaggaggatcagcctaggatttcaggaccagcctgggcaacacaccgagagccaagaccccctctataaaatatatatattacataacaatttaaaacaattaggccagacgcagtgggtcactttggaaggccgaagcaggcgaatcgcttagctccaggagttaaagaccagcctgggcgacatagtgaaaccctgtctctactaaaaatacaaaaaattggctgg

SEQ ID NO: 28483 - DNA, 1189 bp, Artificial sequence
  DNA replication origin
cgttagtttccacgccctctagtgcgccctcgggggccctagtaacctccctccttcccttgggcccgggccggggaggctttctcgggcgcaggaggttccgcaggcccaggccaggccaggggaggcagccgatccgtcgtcggggttgacagttaccatggcgccgcctctggccccgctccctccccgggacccaaacggggccggacccgagtggagggagccgggggctgtgagcttcgcggacgtggccgtgtacttctgccgggaggagtggggctgcttgcggccagcgcagagggccctgtaccgggacgtgatgcgggagacctacggccacctgagcgctctcggtgagagccccacctgctcgcctgagccctgcgcccccacaggccctgccgcgcctctgggagctgcgcgtgaagttgggggccccggggccgggcaggtggcctccccgcagcgtggggtttgcgttcttcttccctaggaatcggaggcaacaagccagctctcatctcctgggtggaggaggaggccgaactgtggggtccggctgcccaggatccggaggtggcgaaatgtcagacacaaacggacccaggtggagtatcgggtgctcagtcccatggggacttctctgttcctgtcccatcccggtaccctctgccacctccagctacctgcttagcagtttcctctctgaactgccttctcaactgcgacgacgaggctgagcccctgcgtggctcccagatgcagcctagaaaggagctgtgatgggggctctggccctgccatacccgcctctgagtcctcacctctgcgtggtcactacactctgggggctttttttggtgtttttgttttagagacagggtctcgctttgttgtctaggctgagtgcagtggcggcatcatagctcactgtagcctggaactcccgggcttaagcagtccttccacctgggcctccagagtagctaagactgtacaggtgctcgccacgaagcctgggtaatttttttttttagacagagttttactccgttgcccaggctggagtgcagtggtgccatctcagttcactgcaacctcccactcccaggttcaagtaattctcctgtatcaacctcccaagtagctgggattacaggcgcccgccaccaagcctgcttaattt

SEQ ID NO: 28484 - DNA, 872 bp, Artificial sequence
  DNA replication origin
attcaactaaagagcccaccaagagctaaaaggcagttggaggcaactctgactcccatacacagtaagggaggagaccatccctcatattgtcttacgcccaatttctgcctccaaagaaagaagaagtaaaaactcaaaggcagaaatggaatccacaggcagacagcctggcgccacaccctgggcctggtaaagatcgacctctgacctaatcagttttgttatttatagattacagacattgtatagaaaagcactgtgaaaatccctgtcctgtcctgtcctgttctaattaccagtgcctgcagcacccagtcacatatcccctgcttgttcaatggatcacgaccctctcacggggacccccttagagttgtgagcccttaaaagggacagggattgctcactcggggagtcggtttttgagatgtgagtcttgccgatgctcccagccgaataaaacccttccttcaactcggtgtctgaggggttttgtctgtggcttgtcctgctacaacaggacatgtatgaagtcacgtggagcacagaatagaccatcagaaagtgagagagaggtctgggggagagttggtgacatttactagataaagaccctaggggaagcagattggggcaagaaagggatgagttggatttgagtagaggagccttgggccatctgtccaggggcaggatgtgaggggaggtgagagcccggctgcagctacagggagactggcaattgggaggcgtcctgagcagcacatgggagaagctcctagaagagaggaccctctgactttctcaaccttaccctactctccccactgcctccgccatctagaaacttccagaatttcaggccccaa

SEQ ID NO: 28485 - DNA, 1065 bp, Artificial sequence
  DNA replication origin
gtcaaataatggcgcccttaagagcagcctgtgacaattgaagggtggtcgccatattttcagaaggcaccttccgggtcccttaacccgggtgtctatgtccaagcggccatgaagtgaataaacactgaggaattatatttgtccctatcagaatcctcgaatccctagcagccagtccctgctacttcggttgcctcggctgcgttcggacgccacggctgggcggggccgcccttcctgtggacaacgacagctgaggccgggagcggggaggcggcggctccagggacctggcggccgccgatcggggctgcgaggccccatggcgccgcccccagccccgctcctggcgccgaggcccggggagacccggcctggttgcaggaagcccgggactgtgagcttcgcggacgtggccgtgtacttctccccggaggagtggggctgtctgcggcccgcgcagagggctctgtaccgggacgtgatgcaggagacctacggccacctgggcgcgctcggtgagagccccgggtccgagccccctcctccttcaccgggttcacaggggagatgatgtagaagggccgagaggactgtgagccctaatcccgcactcttgcaccaacaccagcagccacctcccgttcccagggcttcaggtaccccctcgggagtgttttcacccgcatccatttcattcaggcagcagcactgcagccccttccaggttgagtataagctccgagggggtgccctcagcctggaggggaatgccatcttcccacgatggcctctcaggcccgcgctgtgatccctgttctctcccaggattcccaggccccaaaccagccctcatctcttggatggaacaggagagtgaggcttggagccccgccgcccaggatcctgagaagggggaaagactgggaggagctcggagaggtgagggatagtcccgggtccccccacttggttttccagggcttcctgtctagcagagtttcttttcaggcccccacttccagcatccctaaagaaattcaactgtgttgggtactagag

SEQ ID NO: 28486 - DNA, 1371 bp, Artificial sequence
  DNA replication origin
gttctgactctgccctgtatgacctggggctcctccttcccttttctgggaccctccataaaatgaaatgaacgtaggcagtccttccccttctaatgggcgttgcccctctgactggagcccccgatagcagatctagggctacagtttggggccttggggctacacttgtggacagccagagaccacctctggcggaagcaccggccacactcgaggcaggggaaaggcttctcccccgtgtgcagcagctggtgctgggccaggtggctccactgagcaaaacgcttggagcaaaggtcgcaggcatagggccgctcgcccgagtgcacgcgccggtggctggccagcagtgaggggtaggcaaagcggcgaccacagtcgtcgcaggcgtgcagcttctcctctgtgtgcgtgctgcgatggatggccagggagccgctccgccggaaggcacgcccacagtctgggcaggggtagggcttctctccggtgtgcaagagctggtgctggagcagcgtgctgcgctgggagaagcgggcctcacagtgctcgcaggcatagggacgctccccagagtgcacacgccggtgactgaccaggcgagaggaggaggagaagcgccgctcgcagtccgggcacgggtagggcttctcgcccgtgtggatgcgctggtggatgacgagggccgtgcgctggcggaagcggcggttgcactcgaggcaagtgtagggcttctctcccgtgtgtgtacgctggtggatggctagcagggaggggtaggcgaagcgacgtccacagctagggcactggtggggtttttcacctgtgtgtgtggtccggtgattggccaaggaccggctcctccggaagcagcgaccacagtcagggcagtgatagggcttctcccctgtatggatgacctggtgctgggagaggttcttgcgctgggagaaacgtttgccacactggtcacaaacataggggcactcgccggagtgtgcccgccggtgactgaccagcagggatggataggaaaagcggcgcccacagtctgggcaagggtaaggcttttttagattctgggcgcacttgtggctctccagggcctgatgatcagggaaggtacagccgcagtcagggcagatggggcccccggacgtctgcctaggaatcagtcggggtttgctgggcctccggcctcgcttcccctttcggggtgcctccttaggcgggaatacttccttctccccattcttctttctggttctgctttctatagaaatacagaagcattaatttaacaaatactgggctcctgctcttgtcaattacattataggttacaagaccaatagactcaccccctgg

SEQ ID NO: 28487 - DNA, 1670 bp, Artificial sequence
  DNA replication origin
tcctgcctcaaattaaaaaaaaaaaattaaaaaagaaaagaagtactggtttggaccagggaatctggggaaggagaactagtgcagacatgggctttggttaagcggtcagggcaccttcatagcgctgcaagaagccactacatgcccacttcctccccaccaacagcccagcttccagtaaagggtccatgacgcagctcctccaagcagcagcgtcccaccctgatcccttactcctcaggactatttacacctcccccatcctgcgggccccacttgagacagtggttcctgagagccgggccccactagcaagccaaggtatattcttggcctcctgcaaagatgcccctgtcctatagacctctgcgcggaccgtgggcacccccacttctccaggaagaagtaggtgggcaacactcaggggaagtcaagcttagcgcccccagtctcctccccacttcggctcggtcccatctctccaggacaaggcgccagcaacggagccacaggccgcaccagcccgtctttgatcccgggtgttcggactcagggcctccaccaccccctcctaaactcggaccctgggccgtgggaacccagtttaggaacccaggaagatgccggaaccttcctcaaacgaggccactctaggaaattgggaatttcacatatcgttagcactcagtcgacgtttattggcctaagaacgaaagaaccggaagatgcccttaaaaagcgtggcggcactctagcttcaatcggttgcctcaacatatcaagaaacctggcattgtatatggccctcaaaagatgacgccacccggtccaccacggttcaacgaggactaagacatctgccctcaaccatcatggcggcgccactcagtttggcttcctgcccctagggatgatggccgccaggtggcttcacttagtttctcaccaccccggaagacggggaccggcgattgggcggtgtccagaggctccgagaagaaggccatcggcggttgggcagcgttgggtaagcttggtttttaaaggagccggaggtgggagctgcggaagacccgggatccacgggaggcggcggtgagcagcccttgggggagggcaaggagtggctggagagagggcgggagtgggggcggggaaggaaacttctgaaccatctggtcccgggccgggggagaccgctgggcggggacgcgaggagggaaggggcgtctgtgggcgggacctcccgggattggagtgaagagggtatctgcttgacagtggatccctggggatctacgctgagttcggagatgctccagctcgggccgcccctgtctgagcggagctttgcggcgctgaagcttacaggggaaggaaaagcctcgcccggcgtctgattggcggaaccgcgctgtaggattctttcctcagggatccagtctaggggatctggtgggatggagggtcgtcgatgtatggagtattgctttggagtcctcggccactcgctgggagaggaggaggatcgcagagggatccagcggaaatagcctcccaggaccgggatccccgtggatcccgggggatctcggggcataatctgcagggacaaaggcctcgggaggctcgggccgcgggagaactggggccgctgcattctgggt

SEQ ID NO: 28488 - DNA, 1131 bp, Artificial sequence
  DNA replication origin
tcaaatcttggattgggttacgtcggattggctccgcccttccccccagtcttgtgactcgactggttagaagtaggtgtttggggcggttactacagggccccgcctcttcctgctgtttgtttattggccggtctcctgatggcgtcgaggcgaggggcggagacgcggggcctgaggcgttgggggcggttggccgccggggggcgcgcggctgcaagaggttccgttccacagccagttaagtcatcgccgcctttccgccgctcggcgcggcccacagacagcctggcgtctcgcgcacgcgcgtggcggcgccgccgtcaggctggctgcttgcgagtcgttccgcggcccggggtggcccgagcggccgcgtgctgtgcctgcgcctgcgccggccgcactaacaggcagccgcgtcccttccaggcgcggctgctggcagcggtcccgagtgctagcaattcgaaaacgccttgcacctgcatgagcgcttctccgcgtttgtgactgcgtttggtaataattccatgaaggagatgctgtcagccccattttactgggacggaaaggaatgcgcgcacagacgggctggtagtctcctagccacgtctatgtcagccactgccctgtgatgcctctcagttatgaaagatgcaccccactgctcaatgtgactggcttaaaaaaaaagagacagccatttctggccttcggttgcccgggttaccgttttaaaagtggacagcgcgctgacatgcctgccttgctttctcgtccataaaatgactaattccctgtcgcagggacatgtgcaggtcaagcacctatgacagtcgtcgtgagtgcttcattatggcccattactcttagctctttgttttgttttgtttttttgggggggacagagtctggctgtgttccctaagctggagtgcagtggtgcgatctcagctcattacaacctctgcctctcgggttcaagtgaattctcctggctcagcctcctgagtagctgggattacaggtacacaccaagacacccagctaatatttgtatttttagtggagacggggtttcaccatgttggccaagctggtctcgaactcctaggctcctgtgatcca

SEQ ID NO: 28489 - DNA, 1579 bp, Artificial sequence
  DNA replication origin
cacattgagcagtggggtgcatctttcataactgagaggcatcacagggcagtggctgacatagacgtggctaggagactaccagcccgtctgtgcgcgcattcctttccgtcccagtaaaatggggctgacagcatctccttcatggaattattaccaaacgcagtcacaaacgcggagaagcgctcatgcaggtgcaaggcgttttcgaattgctagcactcgggaccgctgccagcagccgcgcctggaagggacgcggctgcctgttagtgcggccggcgcaggcgcaggcacagcacgcggccgctcgggccaccccgggccgcggaacgactcgcaagcagccagcctgacggcggcgccgccacgcgcgtgcgcgagacgccaggctgtctgtgggccgcgccgagcggcggaaaggcggcgatgacttaactggctgtggaacggaacctcttgcagccgcgcgccccccggcggccaaccgcccccaacgcctcaggccccgcgtctccgcccctcgcctcgacgccatcaggagaccggccaataaacaaacagcaggaagaggcggggccctgtagtaaccgccccaaacacctacttctaaccagtcgagtcacaagactggggggaagggcggagccaatccgacgtaacccaatccaagatttgagggcggttacatgcacccactccctcgggtttggctccgcccctcaccttgacgtagccctcccagcctatcaacgactgcgcccgttgggggtgaggggaagggggcggagcgtgggaggaggccgagagaggaaggaggcgtaggctgaggaggaagagggaggaggggtagggaagtcctggcggagaagcgccctaagactccaaaggagacaacaggagtttgtgctggagctcccccgctgcccatcggccgttccggatcccctaaggcccaagtcggacagagacggaggaaaggaggaagagacttttatgtcggcggacaggggagctgtacccgtcaccgttgcctcacatccggggctttggagggctggcctcgctgccccgccccgcctcgcgcctttcatggcgaccggaggcggaggctggaggagctgggcccggaggaggcccctttaaatctccttaaaggggtggccactgaactcggcggactgcaacgccagccttaaaggggaagccgccgagcagacgctgacaaattgagaactgtgccgttgggagaactggggcgagtggggtttttctttacgtcctcctcccccacacacaagaagtcttttaaattcaacttaaaggggaagtggccgcttgtggaggactagaaactaactccgagcccttaaagggacggcctgctgttagaaggaccctggactccttaaaggggtggcctctttgagccggaggacttgagacacttttaaaggggaggtctgcgtttcggggcgagctttcggccccttttaaaggggtggcccttcctcttcctcggggagacttgcatcgacccctggcagggggtggccaccgcactaggccgccggacact

SEQ ID NO: 28490 - DNA, 2130 bp, Artificial sequence
  DNA replication origin
ggcaagctcggggccagcagatccggctttaaaggagaagccgtggccctctcgtcactgtgcagccgccagcgccgcgcctgcgaccccgggcctgcggacaggccgcttcgggccccgccgcctccggatgcggcgctgagggcggtcgccatggagacggcagcggccgcggccccgggtccgggctgggcagcagagggggagcgccgacggcggcgctgctcgcgccgagaccgagaccgggagcagcggcgccgccgaggtccaggcggcgacgcgccccgggccctgttggccgccccgcgcggctcctcgtcctcgtcgtcgccgccgccgcccgccaggccttggtcgtcagcttcgtctggagagcggcctgggggcccgagacgccggcggccccgtccgagacctcgacccccgcgaccccgagctcggaagcggcctgccggctcgggcagccgcggggaggaagaggaggaggaggaggaggaggggggcgcagacgacggcgaagccgaggaggagcctgaggaggaggaagaggaggaggaggacttgatcgatggcttcgccatcgccagcttcgccaccctcgaggccttgcaggtggggcctaatggggctaggagactttgggggtttccgaggggcagcaaggagggggcagtgcccctagtgggtggagttgaggggggaatgctggcaccccaaaccagagcaaccggctcctctggccaggcctctgccccgccctggggtgggaggaggtagagctcgtctctggggacccggtttcccggcccgaggggtacttcggcaacctggtcacccctagaggggttgggagcttgcccttttccatctatctcagccccacctcctcctccacagaaggatgcatctcttcagcccccagagcgactggaacatcggctgaagcattctgggaagcggaaaagggggggctccagtggggccaccggggagccaggggacagctctgatcgagagcctggccggccccctggggatcgggcccgaaaatggcccaataagcggagaagaaaagaggtgaggttgtcccttaaaactctttaggcagaatgtatttcccacagccccgtttttcatcagcaacgccactgccccttgtaaacagagaccccagtttctaagggcaaagaggcaagcagggcaaatttgagcccttactcatccgggtctgacgaaggcctgtctacagtcaggtgcacctccttttgcctggttctgtgtctacttcaaacgttttgataattcagagaggcgtcaaaggaatatagttgggtcgtaaattaattgtggttcctgcccttcctcgaggtggtggcagtccagcagaaaagaaatagccagcaagcaaacacctagaccttaatttgagaagctacagaagacaaagatggggagagatgctacagaaacccacatgaggaagccgcttgtgctgcctgggggatgggaggagagttgtggttggggaaagccccctaggatgtcttagtcaggtcctgaagtatagtcagaagtttgctaagaaaagacacggggaaaagttgttttgggcaagagcatgaagacgtgaggacccggcgtatttagagaatggtgagagcactgggacccgggtgggcagtggcgggagaagcagctggaaggagaggctgagagtagatcctggaggcccatgagcgccctgctgggagctgcgactttcccagctgcctcagcagccgcctccctcacctctggactctggtcttcctcaggcgtcctcccgtcactctctggaagctggatacatagtaagtgctatccacctgtcctggcccctccctgctccaccctgggcctcttccctctcgtgacacctctgtctttccttctccccagtgtgacgcggaaagtgatctggacgagagggtgagtggggctagagcttgggtgggcagtgtcactgcttgtaaaagggactgcagcataaaggtcttctgcgtgcagcagacagccttcccttgagtgagaaacatggcttaggttgagtcaggattaggtttttgggaggaacgggggtggattgggagg

SEQ ID NO: 28491 - DNA, 1267 bp, Artificial sequence
  DNA replication origin
ctggtggaactggaaggccaggggccgggccgagccccctgcccccaccacctcagggccaccctgggcattcaggtagcgagagttcaggtcctggccgatcaggtcctgctctgtgggaggggacgggagaaggctttaatgctgtcgccacatcagcctccttgggcccaggtgactgccttccctctggcctcgagccactccctcctcaagccctgctgtctgctgaggctcaggtgccccaaagccaactgggcccgagcccggggtgatggccccccaccccccggccaggaccccaaactcaccagaaagggcgttagcggctgaggccccagggtgccctggcacctgcagcaggggtgggggtgggggcagggtggggccaggggagaacaaggaggggtggtggggtggtggggggggccgcagcccgggagggggaaagctgtgggtggacaaaggcaggggcagtgagggcgtcgggggccggtgggtgagctgcgcggacgaggaggaggcagatgaggaggaggaggacgaagaggatgatgaggggggaggctgagccacgggaggggccggggccttggggggcggccgtgaagagctggggagagaagtggggagatgagtgaggggttgggaggtgccagctctgacgggagggggtcagaagcctgggtgataccgtgaccctggttctccaacacgggaggtggcagaacccagccccaggaccgccccccaccgagggaatccgttctcagactgaggcgcctcccacacccagcaacccctatttctccctgtctaggtctctgcatccacgcagctgcctctgccatctctggccagatgactttccctttctgactcaaccacagcacagaacagatcattcatgttgacgcttaattagaacaagccacctggggtcccaccctacaacagtggaagcagcaccacactggcctggcctgggagtcaggagacctgaattctaggcccatcttgccatgaatgcccggggtgaccttgagcaagtcactgcccctctctgagccttagttttctcaataataacaatgacaatgacggtgacaaaatagagcatcaatagtaagtgtcaatagttcttaccctgtggcaagcacctgctgtaggccaagtgctggcacctgctttaaaagctaatccaagtctccaacattccacgccaccttccccactgctgcccagcaaagtaaccatctgaactgca

SEQ ID NO: 28492 - DNA, 648 bp, Artificial sequence
  DNA replication origin
tcctcattgggctggcgatgaggctcggaggcctctggggagggcatggcttctgggggaaggcccgggtccctggctggcagcttactcttcccttctcttccctagtttgagaaatatccaggaaagatggaaggccttttccgacataatgtgagtgtgtgtgtgcgtgtgcgtatggggtgtgtggtgtgggcgtggatgcatccatgcttgtgaccctgactgctggggtccagtcttcagcacaaaagcaagagccttgagcctgggacagctccctggggggctttagggtggaggcccgtggactgacgggcaggctggacttgggctgcgcctccacccccacctgtactagtcccccttctctccacagccgtacacggccttccctcccgcagtgcccgggctgcctccgggcctcccgccggccgtctcctttggctccctgcagggggccttccagcccaaggtgagctcccaatccagacaccaccaccgcctaccatcttgacaaacccagacacgccgggtccaagcacccttctcccattccccaaagtcgtgcccatcctcctgccctgccctgctgcacccagttttctccaaagccatgatccctccctgcccagtgtcccagcttgg

SEQ ID NO: 28493 - DNA, 992 bp, Artificial sequence
  DNA replication origin
cagccccctcgggcctgaggttccctgtctatagcctgaggcccagcttgtgcccactcagcctcatcagaatctcccacctctctgccccaggtgccgtccacgctgcagccaaccctttcacggcagctcccggggcccacggacccttcctgagccccagcacccacattggtaagagccaagggcgtgttgggcaacccaggctttgtccctgacttccaggagatggaaatcagacccagcaggcagctggaatgcaggatagacctggttccacttgcttagtgaccttgggcaggttactctaccccctctgagccttgatttcctcatctgtaaaatgagtagggaagggcagggtgacttcagtctctgccagctggagccctgtctcccagtagccagtggcaggggcagtacgccacctggaaggggaaggtggggaggccatgctggcccaggggagagcatggccactgactcctaggatcttggcaggcttcttggggaggtttcacctgggtttgggtggacaaggaagagttgagcctggtggcttggagaaaggtgttcctggctggggacgtggtgacattccagtggcgggataggttagttgttctgtctggctgtgtgacgcatgcatgaagttagggtcaggtcgggaagggccctgcatgtcaggtggggggaagccaacaaggtcttcaggcttgctgcggagcggagatctgctgtgatgggtccaggcggctggtgttggggagttggggagaagagcgtgacttcatgtcaaggaagccctgggttggtaccgctccctggctagatgaccaccagcaagtcatttcacctctctgagcctctctgttttatcatcttcaagtgggcatgatcctaaccacctcttgggctttttgtgaggttaaccgacagggtgcttgtcaaagctcaacaccttcctggcccaaggaagtgctcagcacatg

SEQ ID NO: 28494 - DNA, 1402 bp, Artificial sequence
  DNA replication origin
ggagaaatttaatgttttgctcagtgtcttactgggttgcttgaatcctacatactatgtattcctggattatagaaaaacagtgtgaaaaacttcagtgcccaaccctcgaacccatccctccagaaatggcagaccaacttgcccagtggatggcagggaggaaaaccttggcgggatacggacagtactgtcctcatccctcccttaccccaggacccacacaccccaccctggtccaacccaccccacacacactcaaagaggagccgggggtctcattgtaacactcgtttttatataaatattcgcaagtcatgttacagaagaagccccaccagggaaaaaagtcaacgttagggttttgttagattgacccctgccttctaggttgggccccagcctggaggcgcctgctgctttgggaaggctggggttgctgccgtgaggctgccgaagaagctgcctgtgtcgcccacccctgggccgacccccttctttggtgtgtggtacatggtgaccttctctggccacccttagcctggggcagggttttggagaacagggttcagggaagcagggcccaggagtcctgggggcacttggaaatggggtgaaggggactgagccattaagaggtggtggagtctgagatttagaggctgagcctttgggggtgggggcagagtgaacgggaacatgttgggggaaccggggctgtcagccaagtaggaagcttctgcccttccctccagcccaggtccccaggtcctgccccctgttggtcatctcctgctggccccaccttcccagggagaagcctgactgtcccttcccggctcttccccctgcagtcccctttccccacagagaggccagaggctaggaacacagcaccagtctgagggtttaattaaccaggaagggaactgttgggaggggcacccctgtaaaaatgtacaaaaggtcttggggctatgtgaaaggggtgataaatatgtacatggaaccccccttccttgagcccctcctcccccagccctcggagggcatgaggacttgggtggtaggtgaacgggagggggcactttggcctctggcttagtgagcccttggggaggcaggcccagggcctagaggcccttacaggggcaaaggtgtacctcaggaggccccatggcccccgagatgagccacactcccatgcacacgcccctctcccttctctagaggctgtgacctctgctctcccagtgaccctacactccatgtgatgcttggtcttgtgggggttgaggcttctgttcccaggttccatgacctcagaggtggctggtgaggttatgacctttgccctccagccctggcttaaaacctcagccctaggacctggttaaaggaa

SEQ ID NO: 28495 - DNA, 1737 bp, Artificial sequence
  DNA replication origin
gaggcggagcgagccggctgcgcgcacggcccaggggctcccgccagaacccgagcccacgcacacaagggtcgcggggctgggaagctcgtcatccaagcccgtcagggagcccccccatcacccgaccgcgaaaggctgagagaagggagggttcgtgccaccaggtcctggtcccccggctagatgtggtgggcgcgcgccccgactactcgtcccacgccccccttcctcttcccgcgcgcccctgaggggtgactgggttggtgggcgggcaggagcgcacctgggtccgtcctctcagggctcgctcgctcgctcgctcgctcaggcacgcgtgcgcagaagggcgggaagggagaggagacacgccggggcccagcgccggccggcctgaccccctcagtctgtctctatgggcgcgcgccgacagcctcgcgcaccggccccggggccccggctgagggtgcgcgcgcagcaccccgggaaggtgggggggaggcggtggcggaaagatgcgcgcgcagtcagccgtcatgggagggggaactgtggggcgttcgccatcttgtctccctctccttacctgcgtcctcgggggcgtgcgcaccaccccccctcccgcctaggaggggggagggccccctcttggccaccgccttcgcggcctttaaactcccctggagactgcggctactgccaccgccttgcctccactgcctcttcgcgcagcacacagatgcggacggtgggtgggaaaaagggcagacgctactcccagcgaaccgccgctgccgctcccgaggcctcaccaaaatggccgccgccgtctcggccgccaccaccaccactaccaccaccactcgctcggaatcgctatcgccggcgcggcccgtcttctcgcgagagacagtaactggagggtgggggaacggggaggctcgcgtgctagcgtagggtgcagcacggtgcgcaaggcagcctgggaggtgtagtctcccagaggctgcgcgctcgcccttcctcggagcgcctttaccgtttgcccctagatctacctggggctgcattgcggctgccagctcggaccaccgccacctccctttttatttacagatcacccagtaagctgcagcaagttagcagtggaacctgggcctcccgattcccatggcagcccacttctgtagcgctgcttcgttttacgcgaggatggtttcctgatagctttcaaacacctttgccatctcttcgcaaactttctagattaagaatccctttgagaatctgatacctttaccccagaatagaacaataaataacagctaccttctactgacactacttggtgccttgattatttcttttaatcctaactgctccattttacaaacgaattgaggctcaggcgttaaaacacagtgacagatcctgaagtcaagattcctagccaagcagtctaagccacaagaatgcactcgctgtcataaaattttaccacctaaagcccccgctaagaggccaggttaggaagccctgatgaagctccccttcctccattcagtttagctcttccctgcgaagaggattgttggtcccattttacagatgaagtttgggttgaaagaaaagtggatgatgcccatcttttctagaccctcctcccatcacccccagaagaggggatcccaggccagagcctgaattggacctagccttgtgccattaactccttgc

SEQ ID NO: 28496 - DNA, 1247 bp, Artificial sequence
  DNA replication origin
cggcgcgcgcccatagagacagactgagggggtcaggccggccggcgctgggccccggcgtgtctcctctcccttcccgcccttctgcgcacgcgtgcctgagcgagcgagcgagcgagcgagccctgagaggacggacccaggtgcgctcctgcccgcccaccaacccagtcacccctcaggggcgcgcgggaagaggaaggggggcgtgggacgagtagtcggggcgcgcgcccaccacatctagccgggggaccaggacctggtggcacgaaccctcccttctctcagcctttcgcggtcgggtgatgggggggctccctgacgggcttggatgacgagcttcccagccccgcgacccttgtgtgcgtgggctcgggttctggcgggagcccctgggccgtgcgcgcagccggctcgctccgcctccagccgcgcacgcgcgggcccctcccccgcccggcgcgcacgttgggtggggtgggagtctggagggggcggggctatctcagggctagtggcaacttgggcagaggtcaggggtcacgcgaggtcagtccgtcgggagggctagggagatggtcacgaaacctgaagtcaagagttaaggcttgttggcttctggtgagctcgggtcttgggaacgtgtggcggagtagggagtgaatcaaagccggcactgtggtttaggaatttccttaaacactggggaagcatttccgggcctcctgcgggttcacactgcctgtttccggcgcgtggttcttggcagtgcggcctctcgcttttgactgctcctgagtctccttttgctgtggttcttgtatttggggaagtgtctcaaggcgcaggtatgggatatacagcgccctgccctgaatcctgggcggattttcctgtgaccagcctgtttgttgactcttcccgggagttccactctcacttctgcgttcagccctcactggaaaggcccgcaggcaggtagcacctttctgaggttctggatgtgacagcttttttttgctgtattttttttttgtcttccattctgtggttggagcctttacacttaaaatttttgaactttctttcttcactcctttcctgctcctgcccccaggcaggatcgtatgtccctccggaattcacaaaacatgatttgcatttccctgaaatgtgagattttcctactactgtagtttttctgtttctagtcttttaactgatttgggtatatttaaacgtct

SEQ ID NO: 28497 - DNA, 1040 bp, Artificial sequence
  DNA replication origin
actaaattcaacagccaccaataaatcccaggccaccttaacctcttcactggacaggcatgggctgcaggcatagccaatgttctcaaacacccaacacgtcactttacaaggtactgcaaaagcattaagaaatggaagctgggctcggtggactttgggaggccgaggcgggcggatcacatggtcaggagttccagaccagcctgaccaacatggtgaaaccccatctctactaaaaatacagaaattagccacgtgtggtggcgtgagcctgtaatcccagctactcaggagtctgaggcagagaattgcttgaaccaggaggcagaggttgtagtaagccaagattgtgccattgcactcagaaggaaggagggagagaaggaaggaaggaaggaaggagggagggagggagggagggaaggcagggaagggagggagggagggagggaagggagggagggagggaaggagggtggaaaacagggctgggcacggtggctcacacctgtaatcctagcacttttggaggctgaggcgggtggattaccagaggtcaggagtttgagaccagcctaacctacatggtgaaaccccatctctactaaaaacacagaaaattagctgggcgtggtggcggacgcctgtaatcctagctactcaagaggctgaggcaggagaatcacttgaacccaggaggtggaggttgcagtgagccaacaccacaccactgcactccagcctgggcaacaaaagcgaaactctgggccaggcgcggtggttcacacctgtcattccagcacttttgagaggctgagtaaggcggggatcacgaggtcaaagatgaagaccatcctggcaaacatggtgaaaccccatctctactaaaaacacaaaaattagccaggcgtggtggcgcgcacctgtagtcccagctactcaggaggctgaggcagaagaattgtttgaacccgggaggcggaggttgcagtgagccaagatcacaccactgcatttcagcctggtgacagagcgag

SEQ ID NO: 28498 - DNA, 826 bp, Artificial sequence
  DNA replication origin
aggctaaggtgggtggatcacctgaggtcaggagtttgagaccaacctggccaacatggtgaaaccccgtctctactgaaaatacaaaaattagctgggcgtggtggcgggagcctgtaatcccagctactcaggaggttgaggcacgagaatcgcttgaacctgggaggcgtgggaggcggaggttgcagtgagccgagatcgcgccactgcattccagcttggatgacagggtgactctgtctcggaaaggaaaaggaaaaaaaaaatttatatacatacatatatatatatatatatagcatatgatttcaaattctgatcgtttcagagcctcagtgatttcatgcacataaacaactccctatttaccctccattttcagaacaagtgtggcaaactcacttatgcaataaatgtgagctaccactaaattcaacagccaccaataaatcccaggccaccttaacctcttcactggacaggcatgggctgcaggcatagccaatgttctcaaacacccaacacgtcactttacaaggtactgcaaaagcattaagaaatggaagctgggctcggtggactttgggaggccgaggcgggcggatcacatggtcaggagttccagaccagcctgaccaacatggtgaaaccccatctctactaaaaatacagaaattagccacgtgtggtggcgtgagcctgtaatcccagctactcaggagtctgaggcagagaattgcttgaaccaggaggcagaggttgtagtaagccaagattgtgccattgcactcagaaggaaggagggagagaaggaaggaaggaa

SEQ ID NO: 28499 - DNA, 974 bp, Artificial sequence
  DNA replication origin
ctagggccagtgtctgcgtagaagccgggctcgggagaggtgacggaaccggggctggtagcatagtttgagttgatgatggagccaacacaggggttggagctggtaccggtgaagctgaggctaaagaggttcctggagtagacgatggagccataactggaaccggagtctgtgatgaagccaggacaggagcagcacctggcgatggtgccaggaccggaagaggagccagaggaggagctggagaaggagccagaattgctgtctgtggagccgccataggagccagaggggtggctagagcctgagatgcagaagatgctggagccagaagggaagcctgagctggagctggatttggtgctgacggaaaaggactggccagagccgaagctggcaccaggacaggtgagcatgctggggccacggttgagttcaaccctggaacatgtgaagaggtgggagccaacaacagagggtgaccaggtgtctgagatgaagacagggatggagctgtggccaaacctagagtcaaggctgatgctgacggggaagcaccagatggtgccaaggagggaggtccaggagccgctgggacaacaggtgccaatggtggagtcacactggtcaacagagctgggcccgaagcagaaacagtcaagggggctgagatggggatggtgagtggagccgaggctggggcaggaagtgtggtggggacagagatggggagtgaagatgacaatggaactgagactgtagaggacacaggactagcaaggggagaggagttgggaattggcattggagaagaggctggcccagggagggaggatggcacgtggagaggagaagagatggtcaagggggcagctccgggggctgaagctgtggagagagaggatgagttagccccagaattcttttcctgagcctttctactccctgtcccatctttcccatacccccaa

SEQ ID NO: 28500 - DNA, 987 bp, Artificial sequence
  DNA replication origin
gtggctgaagatgaggtggatggagctgcaacctcagctgtaacgagttcctgtggcttctctgggctggaggttggggtcttggcctctgtcagctcttccgaggtcctgtcagcctccagtggctcctgaagtggctcatcagatgctgctgagggtgggagctccaggccattgctctcactcacacacaggggcaactcctcaccttcaggcagcactgtaagggtggtcccctcagcagaatctggtgcctcctgctcttgaccattggggatgctgccagcctccaaggtcaggctgggtgcagaaggggtgagagaaaggttcttctctgacacaggcaggatctccacagcaactggcaacagatctttagggggcacaagagaaagtgaggaggtttctgaactggccacagaagccagctccagggactctggagatgccaatgcctgggcacacagctctgcctcaggcctcaagcccaaggggagattagtgactgaggcagagatgggcacagaaggtggaccaagcaagagaggagaggaaggagttacaagacaggtttgggctggaggcggtgtatgagctggtggaggggtacaggcaggaggaggggtgcaggcaggagaagaacaaggaggaatctgtgaaggagggggaggagaaggcaagatatggacagggagaatggttattggatttggggctgaaatgggtactggggcagaaactgggacaggaacaagggcaggaattgcagccggagctgaagctggagtgggtcgaggcctaggtgctggcctgggaactcgctccctggcaggactgcagcggggtggtgtggtggtgctgcgagtttgatgggcggatatgacaggagtgtggtttgccccttgagtctcagcccgggctccacgaagacgctcactgacacgagtccccggcctctcaggggctttggcctttttactgcgccgg

SEQ ID NO: 28501 - DNA, 780 bp, Artificial sequence
  DNA replication origin
tgggtcagccccattggtttttcccttcaaggtggatgagggtgcctcatccacacctctcccagcatctgctggagacctgttcttcttggggggcctccccctccgacgtttcacagcaggtggggtgatggcgagcagtgctccgtctccattctcggggctgccaccaccagtcacccccagctcaatgtgacggcgagcaatgaagggctgctggggtggagtgggcagtgaggatgaaggagcagcttcacagggcccaccaatgggaggggaggattctggccctgacatgctgcggacagacgggcttcccgggctggcactagtctcagagaccccaggcactagggtgctggcagctccccgctgctgccgccgccgccgcaccagttccttttcctctaccacagttaccagccgtcctggcagctttcgaagcactttggggcctggtggttgtcctggccgaccagtcccttgacccctaatttccacatcagcactggtgcgacgccgaggaggtcgggcaggtgaaggaccctcaggcgaggaagtggctgaagatgaggtggatggagctgcaacctcagctgtaacgagttcctgtggcttctctgggctggaggttggggtcttggcctctgtcagctcttccgaggtcctgtcagcctccagtggctcctgaagtggctcatcagatgctgctgagggtgggagctccaggccattgctctcactcacacacaggggcaactcctcaccttcaggcagcac

SEQ ID NO: 28502 - DNA, 1240 bp, Artificial sequence
  DNA replication origin
gggggggtgggggaaggacccggactggggagaccccgcagaagagcctgggggcgggaggatggcagggcagggaggggagtggggagatgtgcccaggaggcagggggaaggggcgcaagggcaggcggctgttgccgcgcaggcgcattcgggcgggcgcaggaaggggacgggggtctagcgcaggctcacctgagggggcaggcagaggagccagggtcgacgcgagctgcgctgtcgccgggtttgcctgcagtcgctcaccttaacccccggcggcgggcgacaacccaaggctccgcctccatcctgcccgccaatggtcagcgccgcccgaagactgaggctcagaagcccttccaattggaaaccggccgcccaattggggctggggcgtgagtcggcgctcggctggacctaaggctgcaacgcgacgccggggcgcggcttcagacgcggccaatcaccgagtggcatctgcgggacagcagagggcggagcttgttgtcacgtgggcttggaggcctggaatgggacccggaagttgggtttactgggaaacgtgatctctgggtggcggggaagcaggaccttcccgcgcctctagttcccagacttgagcagggttccctcggtctcctccaagcatccctaactgaattcagcattttctcttttttcagacagggtctcgctctgtagcccacgctgaggctgcagtgtagtggcgcgatcatagctcactgcagccttgaacttcggggctcaagcgatcctcccgcctcagcctcccaaaatgctgggattacaggcttgagccacaacgcccagcaagctcttttcaatattagcagcctggcccaaagcgcctgtcctgagtacactccagcccttaaaacatttggacacacgcagcttggactccagcttggcctcttagttcggacttaaaatgccagaggaagccttttctgtgtccgcttcaactcctcctaaatacatccaaagccctagcgtttactatctgggatttacacactttctcaatcttccaccctctcccaaaagccttgtatcacactctgttctaaacccaccaggttgttagattctgccaggagtgactcagtgcatagctcaaacctggcattcactaacaaatttttatgaccgtctaagacctaggaactagactgagagcaatgaaacaacacacacacccctaccctgtggaggt

SEQ ID NO: 28503 - DNA, 1604 bp, Artificial sequence
  DNA replication origin
ctgcccttgcgccccttccccctgcctcctgggcacatctccccactcccctccctgccctgccatcctcccgcccccaggctcttctgcggggtctccccagtccgggtccttcccccacccccccccaccccccaggaccctggcgccccagctgcaagggctgcgcccccgggagccgccatgcgggtcgtctcagagcctgtgggcctccctgccctcactgccctcctcctccgcgcaggcccccgcctccttcaggatgacgctggacgtggggccggaggatgagctgcccgactgggccgccgccaaagagttttaccagaagtacgaccctaaggacgtcatcggcaggtaaggccgcggccagggaaacggaggtccaaagaggtcgagccccagcattcccgcttccgtttgaaggctggagagttcgcgggtggtggtggtggtggtggtggtggtggtggtggtggtggtggtggtggtggtggtggtggtggtggtggtggtggtggtggtggtggtgctgctgctgctgctgctgctggtggtgctggtgctggtggtggtggtgctggtgctggtggtggtgctggtggtggtggtgctggtggtggtgctggtggtggtgctggtggtggtgtgtgtgtgtgtgtgtgtctttcggtggtggtggtgctggtgctggtggtgctggtggtggtggtgtgtgtgtctgtgtgtgtgtgtgtgtctttcaagttcaggttttctcaggagaagactggatagttggttttgtttgtttgtttgtttgtttttgagacggagtctcgctctgtcgcccaggccggaatgcagtggcgcgatctcggctcactacaacctctgcctcctgggttcaagtgattctcctgcctcagcctcccgagtagctgggattacaggcgcgcgccaccacgccggctaatttatatttttagtagaggcgggcgtttcaccatattggccacgctggtcttgaactcctgatctcgtgatctgcccgcctcagcctcccaaagtgctgggattacaggcgtgagccaccgcgcctggttgactgaatagttctaaatgggaagaatcagtgatcagtggagaacacctagtgactagactcttaccttgggtcaaccccattttttcacggattcattcatttatgccttcaacacaaagctcaacacggggagggcagaaaagatgcgtatgccctggaggtactccacccgaagtgactgaaattggcacgtgaacgttaaaaaggcatcaggctagataggtagaggtctgtatcaagtgctatgggattccagaaaagcacaccttctcaggaggagtcacctttgggctgggtcttgaggtatgagtaggagttcaggggggggtctttaaaatcgcaaaaatgtatgcgtgtggtagatgtctccagctttcatcagattctcaaagaggctcattaaagctgggtcataattaaaacatggcctcaaactcagatgcccttagtggttgcgcaggaaattgaaactgtgaagtggccaagagtaagagagtaggaagtgttgtggaaggtg

SEQ ID NO: 28504 - DNA, 787 bp, Artificial sequence
  DNA replication origin
aggagtacaaggtggggctgtgggccaagttgtgccctatccacctgagaattgtagatgcaggattgctgagactagtggagagtctggggaccctggaagtaatgtagggcagcagaaagtgggcagcacagtggtcacagagtcaaatgctgtttgctgtacatgtactgtgagccaggcacagtgcttggctgggtgtgggttgggaggctaggaactggccctggtctctgacttcttgaaactgacagtcaggggaggaggcagccaagtaattctctcatcccagatgtgtaatatgatggcagaggccagaggggctgaggggactcaggggaggcccttcccctggccctggggtcagcaggcttcctggagtgaatgtcaccacagcagacctgaagaataggccagacgtggctgtgaggaacgggagtgagtagctttaggcaaagggaacagcagatgtggacgcttgagcggaggggttgctgggacagcaccggaggttgtaatcagaggagccaatgtggagaggttgggccgtgtcacctcctgaagagtgcggtacgccaggttgagacctcaaagggttttaaacaggagagtgatgtggttagatttgttgttggttttgggctggaagaggtagactggaggcagggaaattgttaaggtattgcagtcactgaggcagaaaccagagtagatgggttcaggagacatttcagaggcagaattgcttggactcgggggtggatcgaatgcatggagtgagggaaag

SEQ ID NO: 28505 - DNA, 926 bp, Artificial sequence
  DNA replication origin
acgcttgagcggaggggttgctgggacagcaccggaggttgtaatcagaggagccaatgtggagaggttgggccgtgtcacctcctgaagagtgcggtacgccaggttgagacctcaaagggttttaaacaggagagtgatgtggttagatttgttgttggttttgggctggaagaggtagactggaggcagggaaattgttaaggtattgcagtcactgaggcagaaaccagagtagatgggttcaggagacatttcagaggcagaattgcttggactcgggggtggatcgaatgcatggagtgagggaaagggaacacttggaggactcctggtttcctggtttgagaaactaggtggatagttagtaccatttagggggttaggaggcctgcgggggagcaggttctatgggatggtgtcaaaggatgctgagaaggtgcctgtgggacccctttgggaggctgggaaggtgctcaaggcaaaagggccgggctggagaacaggcttggggaatgtcagtagaggcagaggtggaagccacatatgacttggtcatcccttggaagcagttgagccttgaagggcagaggcagctggaggcagccatggggtagaggcaggcttgggagcctgttcagtgctggtgtgtagggtcctgggagacaggagtgatggcagggaggctgctgaggcggcaggctgggctgggattttagcaggctggaggagcactgttgggggatgctgagttgagtcaatccatgtctggagttggaggtgagaccctcctggtggcggaagagaggtctcaggctaagaagggacccacggcagggtctctggccagtgtcgaggctgggcccagttgagggtagagagaacagatttctagttgcattgccattccagctgtgacttagcaa

SEQ ID NO: 28506 - DNA, 1254 bp, Artificial sequence
  DNA replication origin
tgccaggatgtcagcccttgtgccctcactgtgtggagaggcgaggctcagagaagggcagccaattgcccaagatccacagcaagtccgtgaaggaaaccagaatggccaggaactcaagcatgttttgtgcccactccatcccaatctcaggcctgcctcagtgctcagtctcctgggccctgggcctggccatgggggattgggggaatcctgccccagccagaaagtgtctccccacctttcctgtacccctctgaccacaacccagggcaggttcagtgtctccttcccttccccacctggaaaggggggtgggaggagaggagaagcaagtaatgaaggctactctacattctctgtgtgccaagccctggggacactgaggtctatcaggagtcccagtgctggagaaatctgcaggaaagtgactacagcagaagagcagacacagggcagtgactgcctcagagatttcgcagaagggctgtggacccagagatggtgcctgccacagtggagggtcaggaagctttccggggaaagtgacctgaaggatgagggctgcaagaagacccaagagtaggtgtatcggctgggggtgggatggaggacaggggtgcataacagttgggtatgggcttagagcagagaggggactatgggaagacagaggcagagagcagagcccacagtgtggagcccctggaggagctcggggaaggtaccacttggggatatttgagagtgacatgatctctcttctctccacaagaacagtggtgattctccaggtctggagctcaggaaagaggagtggctggagcagttaggtccttatcagcttagctatagccataaccatgaataaacacacacaaagtggcaaagtagaaggtctagtttaggggtggaggaagaggaccagcagaagacagtatgagaaaaaccaggacaggacagcgtagcaccgtcggatgcaagggaagttttgagaagacagcggtctacatcaggcaacccactggccaatcacaggcagtgcccaaggtctggctgaaacgggcatgtccaccactgatgccaacatctgttcactcccaagaagacagccaaggtcggggtgggcccaggagtagttttggtctgccagtccctgggcagcagcccagggtaccgctgccactgggaccactaggggtggtaagcagtcaaaaaattaaggcaaatcctcccggcaccggagcctcatgg

SEQ ID NO: 28507 - DNA, 1080 bp, Artificial sequence
  DNA replication origin
ttgggagtcatgtgagactcatgctcatgggaggctggcaggagacaggtgatgaggacagctcatggggagcctgctggcagtgagaataggctggagaaattcctgggacccagaggtttcccaggctagaaaaggaggagttggacccagggactaggcctgctggtctgcacccatgagctggaaccatactccccaccaaagccctcctatccccactcctgcccggaccctccttctactccttttgtcctgctttcttgaggctgtttcccaagcctagcctggcactgaataggtgctccagaaactttgttgaatgaatgaatgagtgagatgtccctagcccctggaacacctgtttggtctaatgcctttaaagatcagtttgcaaggggatggcagcaaaggagcaggagttccaagtggccccctggtaaaataaataaataaataaataaataaataaataaaaacagccagctgtcactccaaaaatggtgagatgagttcaggatgagggaatggggccacaggaacaaagcgcttgaaggaggtcccacaccatttacaccctgcagagaatccctgggtggggcctggaaactttggatggctgtgtgaggtgggcgctgtgtgcacaggggcagtggggcaagggagacatggcaggaggcgctgagaggtgaccaaggtgaagcaagactggctgcaccctgccaaagagcggtaggagagacagaagttagcgtttaggaagtaaattaatttcttcatctctgcagctacttaagctccgagaatcccccctccccgcctgtaagtgtctttggggtggtggaagcggagacctctgccacactgggggctgcctgatgtccggtccgggaaggatgccctgctgtgtttgctcgggacaggtaagagtttgtggacctcgatggtctccaaaaaattctcccctagtggtccagagtaggagggaaagggttaatgacagggccgacacagagcatggacgtgggaagaccgagggaggccgaggcgctgggagcccaggcgccaggcacgccagcc

SEQ ID NO: 28508 - DNA, 1738 bp, Artificial sequence
  DNA replication origin
ggtgaccctgacatggaggcggcgggaatgcggccgcccggcccggcccccccaccgcttggctccggacttctgctcccccggagccgcgacccccgtcccgctgctgatacagagcctgggcatccgcccctgccccggcccccggggtcccggctccttccagcactgccaggctcctccagggctgcgctggcagcgctggtccccggccccggccgatccctcttcccagaatccccaggctcccctcccccgccaccgacccccgcgcttcccagaatcctcggccctccgcgccccccgcccgcccccaccccggccacagccccgggcgcgggtggggggctcaggcccgggctcccggcccccgcctcccgggccccattgttccccggcggccgtcccgggcactccaggccaccccccgggaacccaggcgtccccaactcacggctctggggtctgggaaaagccggaaggcggaatccagccccaggggacttaaccccttcagtgccctgcctcgggggacggactgggcgccgaggactctggggtccttctcaaggggtgattccaggctgaggacccggggaccagttcagggtgactgggacggagcaggaagtgaccccagcttcccgggcccctctagcctggagtcagagcatcagctctatgggatttaaccctttgcctcccgcagcctggggaaaaaaggggacagcggtgggagcagggaggaggctgggacgacgcccctgtccccgtctccagtgggagcaggcagcgtgggcatctgggagagccccgatgcccgcgagggtccctgggcttctggccgctcttcatttcgcaggggctccgccggccgcgcccggaaagccctatctcagatttggcggctgctgatcccctgaggccagtctttgtttggactaaccctgggatggggctggggtgggagcaggggctggcagagcagacctgagagggaacaccctacgcactaaacatggccttaatgcttgatggaagtcatggctgcaggagttgggactgcaggaacaagcacagccgggaaggatttgcaatagcctgtgttccagcccctcttctccaaacacctcccctcagaggaggaaactgaggctcacggtggcaggaaagaagccagtgggggttccctggccaaggagggagaacctcttttctcatagctcagagggcacccggctcacagcagaagaaacctttaaaaacccaggaacactggtggcctctcaacgtccaagttatctatgctcgcaatttttacagcctttctttcttgtcttccttatcacagtcccatgggataaggttgcccatcatccccatttcaccggggaggaaaccaaggtgtgagaagcgactggtgtacttaaggccacctgattctttcagttcaacacactgcattattattcctgggcactgtggttaacactggggtgggcatacctctgagatgcatggaaattgggctttctacccttgggaagtttggtattgtgtatgtgttacaaacacagaggaatcctgggagcgtgcagagggctctgtccagagactgagaggctggggggaagaataaaccaaaggtcagaaattactaaaggcagctgggtgcggtggctcacgcctgtaatcccaaccctttgggagaccaaggcaggcggatcacttgaggtca

SEQ ID NO: 28509 - DNA, 979 bp, Artificial sequence
  DNA replication origin
tcggaccacatccagtgcctgaggccgccttgctagaggcctaggggaggggtgcactgggctgcctcgcccacctcctcacgcacccatgcggccaccctcccagcggtctgagtgtgccatgcgaggcgcctgccaccccgggagaggcgccgagtcccgagtcctgccggcactgagcctccgggtccacagcgggcaagggccgtggcggggacaagcgcaggggacccgccggcctcccgccttctgcagcaccacgagatgcccacgtggcacctggacgtccatgcatatgttgaggcccgtgcacgcgcagagaccccagcgcagaagccgccccgcacgccagggcttatgtatgccagcgctgggagacctccagcgcccgaggacatacggcaagtggttccaccagggtgtcagcctagcaggccaacctgggaacccatgtggacaagcggcctttcagcccaggcgcccgcctcgggtggaggcgtggagacttctggcgcagccctgagctggtggcctaacctacctggaaaatcctagcccgagaagcagcgcgagtgagccttttgggtggttccaaggcccttcaccaagctctcacttcctgacttcaccgttgggtctgttgtactaggaaataataacgcctcccatttatcaagggtttactctgtaccaggcattgtgactgatgtaatttagttctcactgcatccctgtggcatggatattctcattatctgcattttgcagatggagaaattgagtctctgagaggttaaggaacctgcccaaagtcagcaatgcagtaccacttcttgtgctgggacacagcggggttaaggccgtgggttaacagggcctccatttatggagagcattcatttttctctggtgaattacagaaaacgctttctacactgaagtgagtagatactccctgggatgaaagtcaacattcgta

SEQ ID NO: 28510 - DNA, 1417 bp, Artificial sequence
  DNA replication origin
cagggagattctgcaggagtcggaaggcgccttgaggagggtgcacaagacggggagcaggtatagggatgagctggtaggttagactctggagaagacaggacttagaggagagagctcctgggaggtacctggtcctacctctctcttggcccagccgtgggggctgagcctcctcagggaccccttctgggggtccggcaggtgacacagggcggctgggctggggggtgcccccaggactgggctctgtgcccttttgcagggaaccttccgaatggaaactctggttgctgttctcatctgcgggagcaagagccgagatggttggcctgagatccctagtacactccttcagtccccacagccccccgcgtttcaggatccctacctaccattaagatccagcaggatgagagggccaccccctcggggactggcgcccctgccccgacgttcccggccacgggatctctctgccccgccacctgcccgccttcgctcctgggggttagaggattagggtcagagctcttggaaagccccaccatacacctaaggaaactgaggcactgagaagcaaaagggctcaaactcagggggtgtggagcagaaaagagggcaaaaggggaggagctgctaatgatggttcccgtctgtcctgctgcatctgaggtctcggggagctggaggtagaggtcagcgtggggaggaacttgcctgaggttgcacagatgcagggccttgtgggaatgggggttgctcacctcctcctggggatccaccactggcacccacttgaagatacgaagggaagtgtcgcccacagtcacccatcgcttctccctgtgggagggtggggggctgggtcagagaggcctgaggggagacccacccccctaggagctggacacatctgggggtacctgcagaggttgaggaggcacaggaggatagcaacagttttgctaatggggcatagttacatggaggaagagagtcctgcaaaccccagggcataggcggtgggtgcctctagagagaggatatgatttggggccctggctctgcggacccctggggcacacatggggggcgtggctatgggcctggcccgggatcagagccctgcagatcctggggcgcacctgcaggaggggtgtcaaagctttagggggcggggcacaagagggggctcccgctctgggaggacacggctggggatcacgctttgtagacccccaggagtagccaggcgaacggggacagagccctgtggatccagggcaaagctagtgggtggagatacaccgaacacccggggcccagagctggcgagggcagcgtagacgcctttggtgctggtggtcccgctgtgtcccgtccctggcccccgagcagcgctcaccatctccgg

SEQ ID NO: 28511 - DNA, 1333 bp, Artificial sequence
  DNA replication origin
cccgtccctggcccccgagcagcgctcaccatctccggaccttctcgatggtcgccatcaccttcttgatgtcatccttggcccggctccgggtctcggcccgtacagtccggccggccatgctggcggggctggggccggggccgagcccgcggcggggccgcctcccgtccggcgggctcaggctccgcgccaggcccgggcgccgcgctctcggcctgccgtcccccctggagttggccgcgccctctctcgtccccaacgcctccgcaagtccccgccccgtttcctgccgccgcgccccgccccggcctgtccccggagcggcccggtggcgcgggcggccagagcccaggcctggaagcccggccggccccgccccgacccgggcccgcccccttggagcgcctggacgctcagcgccccctgcccgccgccgagagcgggagttggggacggacgcgcgagttggggacggagagcgggagttgcgaccggacgcgcgaggcagggccgaggccgtgtgttcagaccacgtgggcgcggggtgcgcgacagggtctgtgtcctgcgctgcgtgagccgcggtgggtgtccgcgaaacgctgtgtgtggagtgcgtgcgtgtgtccgccctcgccaggctgttggtctacaccgcccaacttactcagtcatccattcattcaacagtcttgttaactgagtgccaattacgctccaggcgctgcgaatacgagtgggtctccaccaccagaatggctaaagtgaaaaagaccgcaccgtgtggaggcgagaaagtagagcgactggacctctcttgtatttctgggggagtgtaaattggtagagacattttggaaaactggcagttttctaatgaagccgaacatatgccacctctgtgatccagcagttccactcctaggctgtcaacacccagcagaaatgtgtaggtgtgagcatcaagagggtgcatgggaatgttcagagccctttcataacagccccaaactggaaataacccatcaacagaatggaaaatgaatgatgccctactcactaccatgcacatagacacagcaacgggattgacatgcccggctacacacagcaacatagacaagtcgcatgatgaaatcttgagtgacagaagccaaatgcaacagtacatactagatggttccaggtgtattacgttcagaaccagacaaaactaatttatagtgcaccaaagtcaagatagtgatcgcccttagggttgggaggggacgaggggagagcttctgggagctgatccagttctgttgtgtaatctggtgctggttccctg

SEQ ID NO: 28512 - DNA, 778 bp, Artificial sequence
  DNA replication origin
ggctgctttgggtgtaaagctgaggagacaggagagggaactgccggactggcaggacaggaatgcgcaggccctctctctagtctggggcgcggcttgcgagggaggctacgatgggggccgtcaggcttggggcatgtttgtccagacatacatctcctggcctatcttagatggcttccaatctcattgtcacacccaccaggagggagacagatacactgctctcctcttcttagcaggcctagtaacaatcacaccccgccccccacccccaggagaacaagctacagagacctggacaggaagtcacacccatacgtcaaccccattaacctggtgtagacggaaaggaaggcacatagggatgatccatacttggtttctggcccccgcgaggggctcgcggtctgtcgaggaagcccatagacaacagaagctaatggggtttgtgaatgaagacgaggaggcccgtgtgtgtgtgcgcttgcgtgtgtctgcgtgtgtgcgtgcatgcggacgtgtgtgcgtgtgagcatgcgtgtgtgcgagtggatttgtgtgcgtgtgagtgtgcaggtgtgcgcgtgtgtgcatgtgcgcgtgcatgtgtgtgcgtgtgttcgtgtgagtgggtgtgtgtattgccgtgagcaattgctggaataaaagaagaaagagtttaactggagagggcacagcagatagaattgagccagacaattggtagggcccacaatcacatgtgtattaactgtaaatatttattgggcattta

SEQ ID NO: 28513 - DNA, 1648 bp, Artificial sequence
  DNA replication origin
ccaggtctctgtagcttgttctcctgggggtggggggcggggtgtgattgttactaggcctgctaagaagaggagagcagtgtatctgtctccctcctggtgggtgtgacaatgagattggaagccatctaagataggccaggagatgtatgtctggacaaacatgccccaagcctgacggcccccatcgtagcctccctcgcaagccgcgccccagactagagagagggcctgcgcattcctgtcctgccagtccggcagttccctctcctgtctcctcagctttacacccaaagcagccgctgcctcaggtccaagcctgagcccgcggcagaacattgggctgcctcccaggccctgacacccccagccccgaggtcctgtccacccggcagacaacttgccttccccctcgggccccttcccccactaggccccacggacgaggagctgagctcagggccaaggaatcctgtctcaaaagggggggtaggatgaaatgtttggggtctgggctctgattggctgcgcccgggccacgcccccagccctttcccctttctcccccctcgaaaggggggcgtgaagggagccgggatcagccaggggccagcatgagccggagggagggaagtctgggtaaggggctgagggaccggacgccgggtcgctgaggggcgcaggagtcagagggattgggagctgggggtctgggtttccgccacccccgggtccgggaggggagcggccttggcggggaagggcagggctccggtgtcaggtaacgagtgagcgggtgagttgtgagaaacagcaggcgctagggtttagaggaggcctggggctgaggtttcagggacctgggctcagggcttagatcaccggttcgagtacacccagggggaggactggggtcggggctggggcaggacccctgcgtccactgagtctcgggaaagaatcagagctggggggctgaaggaaggggtagagtaagggaaggcagtcttggagtcacaggaagtagtgagtgacaacaggagacgaaagtctgggctgctgaggatcgcgactggtgctgggaaacttcgggggtggggcgggggcggggcaccgggtcaggactacattccccagcacgcatcgggcgcgcgctgtgcgtttcgggaaatggagtccctcccggggcgccagacactggctcttgcggaccttgattcgctgactagccaggccagcgccttgcatggatggggcatcagggagagaaatggaaatggaagtcagtctccctatctgtaaaatgggccttcaaggcacattttgatatgaagttctgtacttcgatgatgttgaagtccactagcagtcactgaggtagaaatatgtaagccctgtcttcaaagggctctcaggctaaggcagatacacacagaaaagccgttaaaagagctaccctggaactcatgcaaatggccttaagtcaaaggaaggagttcgtttataaaggagaagtgattctggaggcttcactgaggaggcagtacagtcatgcactgcataacaacatttggtcaacaggtggaccgcacagacaatggaggtcccataagattctatgcatttttagcctgggcaacatggcgaa

SEQ ID NO: 28514 - DNA, 1471 bp, Artificial sequence
  DNA replication origin
agcccccgggcagcagctggcccaggtcgccctcggtgcggctcagccactcgcggtagaggccgcaaacgcggagccccagcaccttggcggggaagaccccggtggcggaggcggctgaggcggtggcggcggggggctcggcccggggcccgcggttggcggcgcccagcgcggccagcaaggcctccacggcggcgcccagggcccgggcctggcgcgccgcgtcctccaggcggcgcagcaggcgcggcgcgcgcgggttcagctcggcctggcggcgacacactgcgtccagcagcgggggcagcgcggccagcgccgccgcgtccagccgcagccgctcgtgcactggcagccccgcgtggctcggagccggggcgctcaggccggccaccggcagccgcggcggcgagaagctgggcagcccgaaggggtctccctggagctgcacctgcggagacacggccggcgggtcagcggggccccggagcacgggcagggggctgttaactgggctctccaacccgctctctgggggtgtcagtttcctcatcttgcagatgataatccctcctaacagagctgctctgtttaaggcaaaacaaagtggcatgcgcttgacaccaatgcctgtttcttcctccctaaactggacccagactgggccagtttaggtcagcactttgggaggccaaggtgagataatcacttgagcccaggggttcgagaccagcctaggcaacacagcaagaccacagctctaaaaaaaaaaaaaaaaaaaaaaatagcgagtgtggtggcgcatgtctgtagttccagctgttccggaggctgaggctgaggtgggaggattgcttgagcccaggaggtcaaggcttcaatgagctatgatggcaccactgccctccagcctgggtgagagtcagaccctgtctcaataaataaataaataggacctaataacagcagcaacttcataaagcagttatgaccatgtcaagtgttcaagacagggcctggtcccaggaagagttcagtaaaaatgtcagctcttttattaaagttaccttacagaccagagttcaaatcctatcttcaccacttactagctgtgcagtttggggcaaaaccacttcccttctctgagcctcagccttctcatctgtacaatgaatggggaagcttcctgtcctgtcttcatggaaatcatataagatagtccaggggccaagggggcttcattcccttccctatcctccccaacctctgtacctgcattgagcaggggctcaatgaatcaacatcatatgaatgaacaaatgaaagataaatgtggggctgggcacggtgactcacgcctgtaatccaggcactctgggaggccaaggcaggcagatcagctgaagtcaggagttcaagacccacctggccaacatggtgaaaccctatctctactaaaaatacaaaa

SEQ ID NO: 28515 - DNA, 1388 bp, Artificial sequence
  DNA replication origin
ctgccttcctgtctctgtctgcctcattcgctgtatgaagagcccgcctttctaagcggataggcttccttcttcctgctgaagttcattggctcccctccttggcctgtctctctggggctactgttccacttcctgtcctcaggggctccacttcctgatccatggaagcccaattcttgaagaactaaggactgcatcacatctgtttcctgttaggacacatccacttcctgttctgggctggcagagggcaccactggccaggggctgtcagcctcctatttatactgctgggcttcttgggcatgtctgggggactaggctgcatcccaagggtccttttctccctaaagctgtctccccattttcaacaactatatatacaagtaactttagtttcttttttatttttaaacattttatttacaaaaaattaatttattttcagaaataaaactcttttaaggtgttgcttgttttgtctccacagatctgctgggaggcagtggaggtgtgcagggacagggcagaggggctgaaggaaaggaggacatcaaagggacagggctgaggcccaaagggatggggtgtggcagactggggatgtaggtggagtgagcctgaggaaggtggctgagatgcagagtagccttccccccataggaccagcaggcacgcccctggccagggaagcacagagagacagccagatggggacaaggagagaaggtgtcacctccttgagataaggctgagatgtacacatgtgctcacacagggccacgagaaggcaggaagtggggatggaaaaaacagagacaccccaagagctgggtaaagggggaggccaaagggaactgaggcaggcccaaggaaggagggagagcaagaaaatggtagactcagacggagttaccatgcagacgaggagggtccaagagttaagagaacggggcaggcaaagcaaagagaggctgggaaagtggctcacgcctgcaatcccagcacttagggaggctgaagcgggaggatcgcttgagccccggagttcaagaccagcctgggcaacatggcgaaacctcgtctctacaaaaaattaaataaaaaattagccggctgtggtggcgcgtgcctgtagtcccagctgctggggaagctgaggcggaaggatggcttgagcccaggaggttgaggctgcagtgctgggatcgcgccactgcaccccagcctgggcgacagagaccctgcccgtcccctcccctctcccccacaaaaagcaaagaaggccgaggcaatggagacagctaagagcagacagacagacaccgacagcggcagagaaagacaaagaagcggaaggagagacggaacccagcgggaggagg

SEQ ID NO: 28516 - DNA, 1066 bp, Artificial sequence
  DNA replication origin
cacccgcactgatccccactggtgacataaatccttcccctccactcgcgagtgaaagcttgggactacatttcccgccaggctgttcagaagccggtggcggagagaggagaaaagagtctttccgtttccgtcgcctcgcaatttggcgtgtccgccgggattcacatttcaacagcgacgtcctttctctgttggactcggcaaggaactacatttcccagcaggcaccggcgcagaggtcgaggggcgaggtcgccatctttttcgtagtcctctccctcatttccgcagggaagaggccagacgcctggactacacatcccatgtcgcagtcgccccggccctgcagccgccatctttgccggtggccccgccccatccccttccattgtctcgacttgagatgatagacgggagccgggagactgcaactcccgtcaggccgtgcgccactggtgggggggatttcgagaccacaggcgggcgaggtgcccaaggtggtggaaagcggagaccgggagaggctaggtagcctgccatctttacggtagtctcctcgtcctcctggttccgccattcttaaggaacactggaaggctataaaactactaatcccatcgcacctcgtaagatcgactactagtcaggtgtatgtccctcttccgccatcttgcttgtagtcctctttccttttcacctttccattgttcctgacgagtagaaatggcagcgggaaggcagcagatggactgcgactcccgtcaggtaccacacacgcggagggttgtggacaggagggcgtgtgagtgcctgggaaggaggtcgggtcgggggagaaggccatcttgtttgtagtcatcgttccctctccttctcgatgttctgcaactgggagcctcggggcaacgggactctaactcccggcatcctcggctcccggctgggcacgccctccgccgtcctgtttgtagttcccgctgtccccagcgtcctattgttcccccgtagcatcagtggccgcaggactacaactcccgtcgagccctgcgtgcgttcgtcctgg

SEQ ID NO: 28517 - DNA, 786 bp, Artificial sequence
  DNA replication origin
tccaggggcgggcccaggggaggggggcaggttacagcgacccccccctccccgggaaccggcggtgggcgggcttgaaccccggaaacggtggggggggcccaggcctggcactggacccctgggcagtggggtccgggaaggggccagttaaagggccaggggcgctggggagaggcggggcggggtggggggaggggagctgggactcggacccgggactgagtgggccccgggcagaagctgagcaccctgcgcccaaggagcccccgttggcctgggggggctgagggactgagcctcccagagcaggacctccccctggaagggccgcgccgcagcccgtgggagggcctcgcccccggcgccccccatctccactcgccgccgtcccggcctccgccggagggaggggccgagcgccctcggggggccgtggaccccggcgttctgagcgttccgcgccccgcgccgcccggcccccccgccgccgatggccgccgacccgccgggagctgccgagaagggagagatggctcccgggacacgtgtgaggtgggttcatgcggctcctcctcacccccagacctgggcagcgcccactcccattcatcctcagcccggcctctctctaccttccccgcccccagcctcaccctctctctactccaaactcatctccagccctccttcctatgacctctccaccctggggaactggccctccttcctagaccctgcttccccttgaaagcccccacccccgcctgcagtcgccgccctcca

SEQ ID NO: 28518 - DNA, 1460 bp, Artificial sequence
  DNA replication origin
cggcgccccccatctccactcgccgccgtcccggcctccgccggagggaggggccgagcgccctcggggggccgtggaccccggcgttctgagcgttccgcgccccgcgccgcccggcccccccgccgccgatggccgccgacccgccgggagctgccgagaagggagagatggctcccgggacacgtgtgaggtgggttcatgcggctcctcctcacccccagacctgggcagcgcccactcccattcatcctcagcccggcctctctctaccttccccgcccccagcctcaccctctctctactccaaactcatctccagccctccttcctatgacctctccaccctggggaactggccctccttcctagaccctgcttccccttgaaagcccccacccccgcctgcagtcgccgccctccaggcccctcccctggagcgctggagggccccttagccccatggatgggtatgaaagtccccggaaagggggaatctggggtaagactgactgggaagagaccctccaggcttctaattccacatgggatcttggaggatctggtttccatgggagggggagcccaagggattctagatgattagggatgaaagcagcccgggaagctgggggtcctaggactgagcccatcctcagttctgggaagatgtcaggctggattctagaatcccaaggaatttgggagattgcccaggtggacctgagggatccaagaggagggtgtcctggaggagggaaccctgtggggaacaagaggggctgagatcttgggctgagaagggtctctgaagaagcatctccagggctgtcagagctctggggagttagtgggcagaggagatcgttagggacttgggggcaaggatctcgctggatctggtgaggataactgggttgaggggaagagagattggatggctgctgtggatgaaaaggttggtggggcgggggggaggaaaagtccggagcttccgtctaggaatctctgggtatctgggaggtgaatctgggcagtttaccccagattgaggttggggagagcctgggatattctacactcggataacaggggaagagttgggatctctccaagctaacaccacggacaaggagtgcctggcctttccaaggagctccggtgtggggatggcagaggagagggcctcggtgtcccctcctgctccctgggctagggaagggaccctgaggaggcggtagaggagcgaggccaggaagcagttcttgggctcctcttgagctgctgcagggagacaggccttgagtagaggattggcccccagatacacagaagggggtgacctccttgtccccctgaggaagagggcaggctctagctgcctgtaggtggagggacctgtcaggggtctcccaggccagggccccagtgggcccatctgaccctgccaccatccacct

SEQ ID NO: 28519 - DNA, 2381 bp, Artificial sequence
  DNA replication origin
ccctaacccacccagggctcccaaagcttcctgcagtgccagctcacctcacctgtcccccccctcctccacactgagcatgctctatcctccccccacccaactcctgaactacatctcccaacagtccttggggaacccacagagcacgctcccaggcccacacagccccacagaaccagccaggactacagctcccagaattcctcaggacaagcctagtgagcgtgctccgtggctcacctttttccttggggtgggaggctcattccctgcctccctttcctttcgtttggggggcccaggcacgtcctccggggggggcccggcaggcagggggcccttgcgcctgggcgggggcggtggaagcggtggctcctctgtcagcttccatccgctccccaagctggcgccctcctcgccgttgtcggccctacggcggccaggcccctcacctgaatcctaggcgggacagaagctgggggtgaggacctgcacagctccccaacacccacctacccacagctcagcccagcccagcccctaccttgctggtgcggccttcctgggtgcagcgagggcactcccagcagttggggatctctgcattgatgacaccctcagccttccccatctgtaggcaggagggcagtgagtggggggttggccaggaagcccagagccagggtgatcccccactctctgctccctgacaatctgccccaccccagacgccggggtcccagggccatcaccttcaggcagccggggtggacgatctcgttgcagattgtacactccatgaggctcaaaccaaatttctcttcctctccctccaccgtgtcctccttcccagcctccccacacaagaggcacacagctgtgtgtgggagcacgggctgttgggggagaggggacatcaggggccccgaaagctaacaacaggggaaagacccttccttctagggaccctggccaggtgacggatgaggtgcagcacccacgggtcaagctgggtctgatcctgagtttgctccttttgggagtgtgacctcaagcaactgatttaacctccttaagtctccgtttctgcatctgcagaatggggctaagaatctttccctcgcaggactcttgggagagcaaaataatacgcgagagacactgatatgtagctgttatcacctgtgactgttatagctggacccagggccagtgggaccctgaaattacagctggctttggagaggaggacagtaacactcagagggtggggaagacagcttagggtgataccaaggtcgctccatgagcagcccaagggttgctctgaatcccacaatgaatccggttttggcaagaccccctgggaacactagggaagccactagtcttggggaagtgggggcagcctcagacagtgtgactttgaggaagacagtggtaggactgagtcataacaaggatgcggcaggatcaaggaagatgcaggtagggggagaaggaaaagtgaggcaaggggttgggggataaaggaaaagaagtgaggggctgaggggtgaagagaccaaccaggaaagagtggcaggaggaagagagggaggtggcagagtggggagggggacgcaggatgcagctggctcctcgcggctgctggggaggggccgtgctctggagcccagggaggctcaaaggatgaggaaggcagggcggaaacccatgcttccccgatccctactgtgtgctgggccttgtggtagacacactcgcatccatgccattgtttaatctttacaactcagcaaaggaaacattttacagagaaggaacctgaggttcattcagcatgatttgctcaaggtcacataaagggtgagcttagcctcaaatccaagaccaccctgggtgaggaagaggccagagaagggcaagacctgttggaagggggccatctctggggatgggccccctcctgcacagagacatcttggggggtgatagagcaggggctgggcattctgcgggggtgtgactctgagagctgggaagagcctgaaagtggggactgggtcagatccttctgtgcacctggacactgcccccagcttggagctgaggacaaaaatggatactgacacaaactagtgaatgaagggaagaaatgaacgagtgaacaaacagccactccacagtacaggctgggaggcagtcaccagccattccaagaaggtattgggaagggtgggcagagcccaaaggtgggggcagaactcacggcagtgcactgccggagcaggcacgactgcttcatgcgcccgggccccccgaacttcttcatgtctcggcagaagtggcaatccccgcactcagttcgcacacag

SEQ ID NO: 28520 - DNA, 1060 bp, Artificial sequence
  DNA replication origin
cgtccaccccggctgcctgaaggtgatggccctgggaccccggcgtctggggtggggcagattgtcagggagcagagagtgggggatcaccctggctctgggcttcctggccaaccccccactcactgccctcctgcctacagatggggaaggctgagggtgtcatcaatgcagagatccccaactgctgggagtgccctcgctgcacccaggaaggccgcaccagcaaggtaggggctgggctgggctgagctgtgggtaggtgggtgttggggagctgtgcaggtcctcacccccagcttctgtcccgcctaggattcaggtgaggggcctggccgccgtagggccgacaacggcgaggagggcgccagcttggggagcggatggaagctgacagaggagccaccgcttccaccgcccccgcccaggcgcaagggccccctgcctgccgggccccccccggaggacgtgcctgggccccccaaacgaaaggaaagggaggcagggaatgagcctcccaccccaaggaaaaaggtgagccacggagcacgctcactaggcttgtcctgaggaattctgggagctgtagtcctggctggttctgtggggctgtgtgggcctgggagcgtgctctgtgggttccccaaggactgttgggagatgtagttcaggagttgggtggggggaggatagagcatgctcagtgtggaggaggggggggacaggtgaggtgagctggcactgcaggaagctttgggagccctgggtgggttagggaggcaggagagagcatgctcagatcatccctgcatgagaggagggaggggctggagagggcctgaggggaggaaagaggagatggagcatgctcagtgggctaggacgctgggtgcaaggtgagcatgctcagagttatccctgggacgggggcttctgggacttgtagtctaagaggagggcatggaccttagatttctggcccatgagggcctaatggggtctctcccttcctccatatctccctctcaccctggtaggtgaaaggaggccgagagaggca

SEQ ID NO: 28521 - DNA, 1460 bp, Artificial sequence
  DNA replication origin
gatggagcatgctcagtgggctaggacgctgggtgcaaggtgagcatgctcagagttatccctgggacgggggcttctgggacttgtagtctaagaggagggcatggaccttagatttctggcccatgagggcctaatggggtctctcccttcctccatatctccctctcaccctggtaggtgaaaggaggccgagagaggcacctgaagaaggtgggtggagacgcctgcctcctccgaggatcggacccaggcggcccgggcctgctgccccccagggttctgaatccgagccaggctttctcatcctgccaccctgggctccctcccgagaactgggaggtgtgccggggacctcctccctccccttcccaccttcccttgccccacccttcaccctggagcccaagacctgtcccttcctgctcaccttgttctgccccagccccacttggccacggtgggtgtccggacacctgggatgagttgggtgggagggtgggttgagtccaggccacaggagcccctgacttcccaaaaacccttagggctcatctgacctacttgcctcatctttccaagccttacaggggagagaactgagttcaaatttctgtccgaccgtttactctttgtatgatcctagcagcttgtcagccaccctgagccttagtttctttatccatgtagtggagatgctgctgcctgccttgcccccttatcccgcagaagtgtataagtcttacgaggttctgaaaggcaatgagctttgtaagctataaaatttacccagattgaagggaaataaggcccagagaggtttgaagacttgtccaagtcacacagtaaagccagaattgaggtattacttggcacggacactcaacacaggagtccgcctgattgggtccaaatcctgcctctgctgtttgtcagtttgtaaccttggacaagtcactttgtgcctttaagcctcggtttcctcatgtctgaaaagagtggcccaggtcaccactgtgttagaatactgtgaggatggaatgagtcagccgatgcggggtgctgctcgtggggccaatcactgttaccctcagttgatagacagacgcctgctccagctggtccgtgtagtggatgatgaagcaggggcttcccacagccatccagagttgagggcaagccaggattcaaagcagggtctctcatttctccattccctactgcttttggaactgcctaagccatgcaaacccataagggctggaaattattttattttattttatttttgagacagagtctcgctctgtcgcccgtactggagtgcagtggcgtgatctcggcccgctgaaacctccacctcccaggttgaagcaattctgcctcagcctcccgagtagctgggactacaggcttgtgccaccatgcccagtttatttttgtatttttagtagagacag

SEQ ID NO: 28522 - DNA, 1030 bp, Artificial sequence
  DNA replication origin
ggcaaaagatcatacatcagtacttgtgagttagagcaagagcctagccagataattggaggagctcatggccagaggtgtgcccccgagtagagaacgaggcaggagggaatgtggtaagccaaggaggatgctggtgagaggccgtgggagatcaaggaccaggaagtggtggttggattttgctaccaggaggccttagtgtcctcagctgtgctctgggggttgggggtccaaagccagattgaatggagtcgagaacatcagcttccaggcagggacttgattcgtttgttcctgttgtgttcctggtgtctaatggcacctggcggacagtgggcagtgagatcatcttcgctgaatgagtgaaggacaagagagcaggatgcagtgtggaaggatgtacagagggtggcgctggagaggcgtgtgtaggggacagcaggaggctgcaggctttcctgtctggtggcttccatcttttcttggaactgaaagggaagtgatcccttaagagtgaagagtgaagagtggagagagggcagcagggaaggcgtgcaggggttattgagatgcaaggaagagggttggggcttttgaggacatggacagagagaaggcagcaaggaagggactggaatacaaggtgatcatggtcgggtagggtctggaggtggacagattggagggcagtggtagcatcggggcccagagagctacaagaggtcggaactggcagtgcttggagccctaggggccgtgagccttcagagggcagtaagggctggtccagctccctgttcccgggggcttctgcaagagggagggttaggattggaattgagggtttgcaggtcggcctagtaggagaggactcattgcggggtggctggagtccaggaggaagtgaatgggttaggggactttggcatcaagccacatgtctctgggacgacggcacaccttggctcttagagctttccctgcctcttgtctcagtgtcattctccagcttagaaagaacccacct

SEQ ID NO: 28523 - DNA, 1096 bp, Artificial sequence
  DNA replication origin
ctgtctgccccgccccccgccccttccacctcccccagcccctggctcccatatcctgtgtgtgtcctttccccattctcccccccaacacttgcaccataacccccctcccaccgtcccttcggctcagcaccctccagtacctctgacccactcccccaggggatggacaatgaagcaggtagcaggggcaggacataggaaggagaaacccccagagatatcagtgcaggggggaaagaagggggtggctggcttgagtccctgggtgggaatcccaagtcactgacactcaggaatcccagggtggtgaggtgggaacctggcctcccagcaggggtgaaatgaagccggaggtccaggctcctgtcgagtccgggggagggtggggggcgcccaactagctgtccttgagaagcagcttctcctcagggcagcggaaggggccagggggcccggcagctgccagccgggcacaagcttcgggtgagagctggcggcaggagcgcaggtctaggcggcgtagacgagggcagcggcggaacagcgggaggcagtggtccgttaggcggtggcaacctggggatggggcagtggagctgagaccaggcaggtgagcaaggggttggcactggccgtggggatccacaggctggcaggacggatgggggaccgtgcttaccagcaagattgaggtgcaccagggtctcgcggagtggggacgtgggggccgtgaggaggtgaacactggggtccccgacgtgggcgcagtggctcaggtccagggcgctcagctggggtgcgtgacgcagcaggagacgcagggaggcatctgtcagctccaaacctgccagacgcagttctgccaccccctgcagccgaccacggctctctgtttgccctgggcagccagatgagaggtcagcactcctggccactcccatccctgcgcccaggtatccagaccatctgccctccacctgcttcccacataagtgagtgacctggtgcactctgtggcttgctcttctcaaaaacaccctcatggcctgacctcatctgtccactcctcacatcacctcctcggaggccttcc

SEQ ID NO: 28524 - DNA, 1087 bp, Artificial sequence
  DNA replication origin
ccctgcgtctcctgctgcgtcacgcaccccagctgagcgccctggacctgagccactgcgcccacgtcggggaccccagtgttcacctcctcacggcccccacgtccccactccgcgagaccctggtgcacctcaatcttgctggtaagcacggtcccccatccgtcctgccagcctgtggatccccacggccagtgccaaccccttgctcacctgcctggtctcagctccactgccccatccccaggttgccaccgcctaacggaccactgcctcccgctgttccgccgctgccctcgtctacgccgcctagacctgcgctcctgccgccagctctcacccgaagcttgtgcccggctggcagctgccgggccccctggccccttccgctgccctgaggagaagctgcttctcaaggacagctagttgggcgccccccaccctcccccggactcgacaggagcctggacctccggcttcatttcacccctgctgggaggccaggttcccacctcaccaccctgggattcctgagtgtcagtgacttgggattcccacccagggactcaagccagccacccccttctttcccccctgcactgatatctctgggggtttctccttcctatgtcctgcccctgctacctgcttcattgtccatcccctgggggagtgggtcagaggtactggagggtgctgagccgaagggacggtgggaggggggttatggtgcaagtgttgggggggagaatggggaaaggacacacacaggatatgggagccaggggctgggggaggtggaaggggcggggggcggggcagacagcagaccaccaagggttcagggaacaaagaccagttacttggagtggggggtgggggtggggccacaaaaggaaaaccggaggagcaattggggatccaggtgtcagaggtaggggaaccaggggcaagctggggctgagctggaggtggggatgagagcaggtgtggggacagcaatacccccttgggggtcacctctctgcttcccccctccccaggcttcagttccttccccctgaccctgactccttgaacgtcactg

SEQ ID NO: 28525 - DNA, 903 bp, Artificial sequence
  DNA replication origin
aggtactggagggtgctgagccgaagggacggtgggaggggggttatggtgcaagtgttgggggggagaatggggaaaggacacacacaggatatgggagccaggggctgggggaggtggaaggggcggggggcggggcagacagcagaccaccaagggttcagggaacaaagaccagttacttggagtggggggtgggggtggggccacaaaaggaaaaccggaggagcaattggggatccaggtgtcagaggtaggggaaccaggggcaagctggggctgagctggaggtggggatgagagcaggtgtggggacagcaatacccccttgggggtcacctctctgcttcccccctccccaggcttcagttccttccccctgaccctgactccttgaacgtcactgaaaacggcagctattgcaaggagtgggggccgcgggcagccgctcttcagctcgcggcccaggggagtggcgaggggcgccccaaccccctgcccgcctctccgcacaatacttgaacattcatctgtactgaagtgttacttgaaccgggggaatctcggacctgggggagccggggtgtgaggggactggaccagcttggactgagacctgagaccgggccggtgggcgcccatttgggactgcgccacccccaggcttgttcttgttttactgtattgagcggcggcacccgccggacccgcattatggctgggggcgccagcccaagaatggggaccatgggactcctccagcctggctcttcccactctttcatcgtcatggaaacttgtatcccatttgcccagggaactgccactcctggttgccatggaaatagcagccaacggacacctcccgatgccagtgctaaggctggaaatggccccctctta

SEQ ID NO: 28526 - DNA, 934 bp, Artificial sequence
  DNA replication origin
cggacccgcattatggctgggggcgccagcccaagaatggggaccatgggactcctccagcctggctcttcccactctttcatcgtcatggaaacttgtatcccatttgcccagggaactgccactcctggttgccatggaaatagcagccaacggacacctcccgatgccagtgctaaggctggaaatggccccctcttagttgccatgggaacctagtaacagactctgctggccctccttccctgccccttcctcgagcgcggggtggggcttcgggaccccggggatgagccgggccaggtcccgcccctccgcgcaggcctccggggggccggggcttaccatgtaggggaggggagatctatccacatacctcaggtaacagggaggtgcgcgggtggggggagggctgggcggaccaaaggccggaggggtggggcctggggatagcgagaggcttgagaatggggccgcttgggggagggaagaggcagcccggcgaggggcaagcgggggacccagccgggctgggcccctgggccccgggtctgtacaatacggtttgctataaaactcaaaatcttccagccggggctgcggagttcgtgtgtgtatctgcggggtccctacctacagatgagtgggctcacctctcctggactcattttgggagggatttggaagtgtggacacctggggtgtccagctgtaccttggagggggctggggttggcgtgcacctcggtggggtccgggcgcttggataacgttcttggtgggtaggggtcgcggggaatctctgcgggcccgggactgcggggacttggtccccggctccaccccatcatgtggctagccccggctccgcctctgtcccagttcctgttttggcctccgctgtcccgctccggctcctggggctccccgcaga

SEQ ID NO: 28527 - DNA, 2327 bp, Artificial sequence
  DNA replication origin
gacgctgcttttcttgctccactgggggtgcctcttcctgggcgcccgccgcctgcatcctgctcgtcctgtctgggaatggggccgcccccgggcttgggccggcccggctggggcccccgaggcgcttccgccccgtagtgaccgcctggtgccgccccccccccaggatgaagggcggcgagggggacgcgggcgagcaggccccgctgaaccctgagggcgagagccctgcaggctcggccacgtaccgggagttcgtgcaccgcggctacctggacctcatgggggccagtcagcactcgctgcgggcgctcagctggcgccgcctctacctcagccgggccaagctcaaagcttccagccgcacgtctgccttgctctcgggcttcgccatggtgaggggccgggaggggtcacacccggtggggcagagcaagtggggggcacaggtcggggggggggcgaagtaaacaggtcccaagggagacaggttaaagggggctttcgtcaaagggggaaggaacaaggtcccgcgggactgagcaagtcccttcttacggatgtgtgtgtacaggggaccccaggagacggggccaccggaggacacgaaagtcctaaaggtgtcgtagtgggagtggggtgaacaaatcgctggtggggttgactgcaacagtgaggcagagtggtccagatggagcctgtacctggcagaagtggttcctaagtcccagtgccagcttcaaaggcaggtcagctgggtgggggctgcatcaacaggtggggggctcgagatggattagctgggtggaagggtcacccagctgaaggtgggcccgtcccagggaaggtggccactctccagcgggcccaaggggtgctagtgtcaaccaggaaaactgacaagagatcatgcccgggagggaaccgctggggaaggaggctgatgaggaaactgataagcgagtctcaagctgataaaccccaggtgcaggaggacggtgttggctaacggtctgccccagcagtggcctcacaggaagtgggatggagggaggtcccagggtgaggatcagcagacacagtcctggctcctccctgcttgtggccagctgtgtgaccctggacaggcctccaccccgcttgcaagccagtgggaaactgagatcatggagggtgcgccctctgtagccagccaagtaaccgccccagggtgagccaggcatgtcagagcaggtcacgtaccaaggatggctcagactagcctgctaattggacaggtgtggaaagtaaaagccttgcctctgggcaggagcgaatgaactgggacccagggttgctgctctgttagtctggggttgccccaccatcaccccaggaaaaaggagaaagtgagctgcaggaggtactttggggaacgcactcctgtgggggtggatatcagaggcggttggggtggggaccatggcgctaggggatctgggctagtccctgccctgtctgtgccacaacctccatatttgaacaatgacagggaaactctctaaccctaagggtcatcataagcctatggtcttctatgtggggtcccagaatccacagaccagcttacctttcatgatgggggcatcacctagggacaggatgttggctccccttcatctgcacagcctgcagagggaagggagcagccacccaagctgagggaggtcaaccccatggtccagcctgttcccaaggagacaatccctccacggcagaatatgcaggtgcaggttgctggggtgacagcttaagggcccgagccttctctgcaggaggaaggggctggaggtttaggttccgggggcaggactggccgcagtcctagcaggggtgaccgaggctgggccaggctctgggagaaaccaggactaagcctggcccagatccctgtctgtggaaaacacctcctgacacctgccatggcccaatttcccaaaatactcagccctgttttcctacctccacccgccagcctctacacctaccttcttctttccccaggcccagagcaatcgaatggaccctacaagaaccagggatggggagagagtgggcttctgaaactcaggtggcctaagttagaatagcattatacaaattgtatccagctgtcactaagcaccaggcactgccctcagtgcctttatatacatcatctgttagcctacaaagtgggtactgctactctggccattttacagatgaggaaactgaggatcagagatgttaagacacctgcccaaggtcccacagcaagtaagtggcaggatttgagcctaagc

SEQ ID NO: 28528 - DNA, 1705 bp, Artificial sequence
  DNA replication origin
ctcccacacacccgctctcctccccgcgccccgatcctccggccgaaaggtggcacctcttcggggcgttggaaacaccgcgagaccgagcccgagacccggcttcgaccccgaatccgggcgggggggtggggggaacgtgcaccgctgccctctcctcccgccccggcgcgttctgcaccccccccagcaggtctccgcgcacgcgcgccgcgcggccccactcacccgctcccggcgagcggctccccctccccccacctcgcgcggcacctcagcggcgcgaggcggcggcagcggcagcgcgagacccggccccgcagcggtggcggcggcggcgcccccccaccaccacctccccggcgcgcgcaccaaacaccactgccacctgcgcgaggcccagcgggcacagggtctgcattcgcactttcgccacaggcgctgccgggggacccacggggccgagggtagcggcttcgcctcggccggcgccctgggaggctcggaagttgcggcccagggagcttggagattggccgcatcccccggagagtcggcttcgccacgacgatctagatgctgcggcccgggaccttgacgaatcggcggcgacgaaagctgcgactagtccctgaggaaaaggggcggggcggaggggaggaggccagccagcgctggggaaccttcagtggcgcgttctgcagacgcagattcaccgggcgggcggggcgaatcgctggacaggatgcgcgccgctttgcttctcttccccgtcccttccttgcactgccaaattctgagaggctgcagattcgccactgttcccggcctcagccgtagcctccccttcatccgccttggtggagtcaagaaaataacggcccgttagccaatccctgctggcagagtcgacaactttttttggatttttcttactggcccaagtgagagaatagcccgcttctgtccctggggaaaatgcctccagcccagcgctcctctcagagtccgatgagaattttcagccgagtatcgagggacccgaggaattctgaggatccgacctggcgaatctgcggattccgctgtgggcggggccgagtcaaggggcggggccagggcgtgcagagcctgggactagggggcgcctccgggaggacccacgaggactcacccggatgggagggacggccgggaggtggaaaaacacaaccgtgagcggtgactcaggcggtttgccccgcctcgcacataaatgcagggtacctttccttcccgttattgcccttgggtgtctggctgcttaggatgcccatttgccagatggggagagtgaggcctgtagaaggtgccctactttgccgtactcaaacccaccattagtggttaaatccagggaccgcctcaaggttttctgatgagcctagtggggcctaagtgcccttaaatgggccttgtaataataaacgaggtcctacaggaacgggactggactggtgtgtcctcctggcgtcatggtcccactgcccgcttctttggctatggcgccctatgctcacgggatgcctccgcacaagggcagcagcggcccaggcctacccctggaactcgggctgaggtttctgaaggctgggcaccgttttgatcccgtgtgggcgcaggcactcccaggaggtcccttttcctgagctgaggatgccccaag

SEQ ID NO: 28529 - DNA, 1765 bp, Artificial sequence
  DNA replication origin
gaaagtgcgaatgcagaccctgtgcccgctgggcctcgcgcaggtggcagtggtgtttggtgcgcgcgccggggaggtggtggtgggggggcgccgccgccgccaccgctgcggggccgggtctcgcgctgccgctgccgccgcctcgcgccgctgaggtgccgcgcgaggtggggggagggggagccgctcgccgggagcgggtgagtggggccgcgcggcgcgcgtgcgcggagacctgctggggggggtgcagaacgcgccggggcgggaggagagggcagcggtgcacgttccccccacccccccgcccggattcggggtcgaagccgggtctcgggctcggtctcgcggtgtttccaacgccccgaagaggtgccacctttcggccggaggatcggggcgcggggaggagagcgggtgtgtgggagccgtggccgggctcggcccgggccgctggccggtgaggaggcgggagggggcggggcctgcagggggcgggggaggggtcttgctccgaggccaagtggggcgcgcgctagggagagcgggaaggtaagggggctcgagacgggcctgggggcctgacagtagagttgggaggtggaaagaggctgggttgttgtggcgaaacagagggtacttgggggagaatccgggggagccccgggtcagggtgagggttggaaactggagtgatgggagaacctggaatcggggctagccaatgaggaaaggcaggggagtcaggccccaagtcctgatccttcttgcgtgtccctcttcccctaacagtgtaaatgagcaaagatggatcaggaaggtgggggagatgggcagaaggccccgagcttccagtggcggaactacaagctcatcgtggatcctgccttggaccctgccctgcgcaggccttctcagaaggtgtaccgctatgatggagtccacttcagtgtcaacgtgagtgcccgggtctttggttgccatccggggagctccaggcgcccgtcctctgtgattctgttcagcacctagaacggtagcctgccttcttgaaagtgggcagttggacccagctcttctgcatgtgtgtgtccagatgggctgcttggagctccctagcctggattcaccctgagctctctttctgctgctgctttccttcctaggactcaaagtatataccagtcgaagacctccaagacccccgttgccatgtcaggtccaaaaacagagacttttccctcccagtccctaagtttaaggtaagtgtctgctgggctcctggtgtggtagtcctaagagggtgtggaggatgcgtcttggcactatagctgaataaaagggtttccaatgaaaggatctcagccagatctagcaacctctgaggctgtgagactcagttgttttggataggaggtacacttaatcttccagaaaggtgcaggtcaggtgtcctaagtgtatccctggtggctggggtgtcgacttcttgaagggtgaggtaaagactctttagctgctatacctatcactgtatattcgtagacagtgcatcatagcacacaagagtgggatctcccagttccttgacagtcaaggggagtgacaaggccactgcctacctgggtagcactattccccgcctctcatttggcgatgtcatttccctcttgtttccttcgaggactcctattctccaccctagacaagatattcttcaggccttgaactgggcctggaacactggtggttcttcatttcc

SEQ ID NO: 28530 - DNA, 859 bp, Artificial sequence
  DNA replication origin
acccagaaggcacctcactccctgtatctctggccccaaggaccatgctgctgttctcttcctcctcctctgtgtcagaggccaagaaggaaaacttggagcgctgctccttcagcagcatctcgatgcgggaatccaggctgctgtgctgggcgaagggcacactctcattggtggtctccggggctggggagccagagcgggcaggggaggctgggcggggggaagtccgaacttcttctctctcagggctgggccctcctccacccccgcctccaccaggttctggaggctccgggggtggagcctctgaggcaggaggccggtagtcctggtcggtgggccggctgggctcggggggcaggtaggaggtgtaagaaggtgggaagcgctcagctgtattttcagcaaaaggggctccagggggttcctcccgtgtggcccggcgtggtgggtaggaagtatggcgctggtagcgattccagctttcataatacgctgggtagtttgcatcagaactacgaaactgagaggacgaggaggaagaggatgacgaggaggacgaggacaatgaggaggaagaggcggaggatgaggcagtggctgcagtggtggcggcgatggccgtggaggcggttgtggaggctgaagatgcagagaagtggcggcgggaaaaggcatcttggtagctgttctctgaccgccggggcttgaaggaggttgaagtggtgctggagaagaagcaggggagttagctggactcagctctctatgaccaaaccacagcgtactgggtcccagggcccaaagcccctctatgctgccctccaaaagaagagctatatgttgggttcctagc

SEQ ID NO: 28531 - DNA, 873 bp, Artificial sequence
  DNA replication origin
ggctgccattggcatgggcaggtggtaggcctcccgtgagtatgcccctctgccctcctgcccctgtgcatatagagcatacggcaagccgtaggctgcctcctgcgggggtggaaacgggaggaaggcctccccaaaggccccaccgggggggccagctgaggcggcaatcaatcccttgccctgccgcagctgatggagccgagttaacatctgggtctgcatctggaaggacatgggcatccctccccactgagccccaagtcggtccatgagctccaaggagttcacaaagtcatagatgtgcgggggtggtggaggaggtggggggtactcagggggcggcggcccatcaggtctgggtgggaggaggtaggcaggttggtggggaggataaccaagaggaagggacgccaggtagggaggaggaggcggcgggggagggggaggtggcggaggctgctgagggggcgtcggggccggagggggtgagccaccccggtcgtcgtcggagatctccatgtcgtctccagaagagcatggagaagcctgcgggggcagaagagggtcacagaaggcttctgcctgacccaagccctactttctcatctggttcccttccctctcccctaggcccaaccctgactcccagagcccaggtgcctcctctggctgaccccaacctcacctggttctgtccatttgccttgggagactcccgggtagcccctggctccccgctccctgtaggtgccacatcctcaaaattagctggggccggagggggtgtgcagggcccatgccctgacccagaaggcacctcactccctgtatctctggccccaaggaccatgctgctgttctcttcctcct

SEQ ID NO: 28532 - DNA, 1240 bp, Artificial sequence
  DNA replication origin
ttgctgcggcttgggctcctccgcctcagccaccaccacctcgggggcctccaggacctcatcagctggggaactgaagagggcggcgggtgcgggcactggctccgggggccgcagggctggcgcagggggcgtgggcttgacggccagggcatagttgtgctccaggaggatgtggctgagcaggggcctagggcgctcggcctcgtccgatgtctctgtggcctctgagtcttcaacagcaggcagggcaggcagcccgcgccgggcaggggtcagggccaggtcggccaggaccgccaggtccacctctgtccctggctcagcctcctcttcctcggtgaggcggcctcggcctccagcccggctccggcctcctcgggacacctcctcgggccaactcttgaccagagatgcgtggtccaggggcaggttgcggatggtccgctccacgccccggggagccttgcgggaggctgggccgggaaacttggcctgcggcggtgtggctggagggggctccggggctggcaccacctcgatggcagagaaggagacagttttccggcgtttcttgggtgggggcaggagggggatgggagaagagggacgctcatcggggcgtggggcaggggccgggggcccagcaggtggttctgggggacgcagaggcgcactggggggtgactcctccgtggggcctgggaaggaagcacataggaaggaaaggaggtcagggagacccaggctcagccaccctggccgcccatgaccacaggctgtgtgctctcccccacttccgcccaggaaccccggagggaacacagacgccctggcctcagccccacatcccagcaagatgaactcccttgatgagagggggtttcccacccattcgttcccgctgtgacacgtgtgtgggacactcggagtccacacacacaccttccatgtcctcccggagccacagtccaacaggagacaccatcacaacaagctgtaaccacgctgagaagggcggcaccactcgccctggactccactttcctacccagactggcgggacagccctgtgcccaggccccagccatgtcacatgccaaggacccagtcagccacatttcagctaaaatatccattatctccatcataaacaatattctcagtttagcaaggtgaacacgatacaacctaaaaagtggcatctttgtattaaaatattttatgaaacttgccttcc

SEQ ID NO: 28533 - DNA, 1280 bp, Artificial sequence
  DNA replication origin
tggctaggtaccggggttagggagtgtgcaaggctttaaccggacaaacagcatgtgtgtgagcccccatgctgtcttgttgcatcagaagccggggcggggctgggagtgcagcctcacctgacggatgttctgacccacgtattcgatgaccatctcgtcagcagcaatgggttccatggcaaacagaccccactcgtggatccggctccggccaaatcggagcttcttcttccggaactggggggcagaagggagactcaactgccagacacctcccacaccccagaccctcactcttcccacagacttcctgggcagagggtgttctggctgcttaccccccaactccacccgagggaaccacaggagcctgctgggtggtcccctggcctctgccccttcctgccccaccccaccccacccagcccctcctgcagcccagcctcaccttgagctggttgagtttcagcaggtcactgtccatgatggcggaggtaccgatggcgctcagcagccgccgctgctcggaccggcgctcggacagcacgcggttcgtcccctgtgagacacacggcagggaggaggtgagcagggcagggaagtgagtggcaggaggacgcggcggcggggttaggcccacctgagtgtccacgccctccagctgccgggccgagactgggcacacgtccaggtacttgtccttctccttcttgctgatggggtagtagccttcgctgcgggctgagcctgtctggtgctcccggggcccatcctggggccgccgcttgcgttttggggtggtcaggttggtgagtgcagggtgttaaggaagagaacggctcctctctggccacctgcgtcccagccaaaggagagggcggggcccacgccgctgagcatacccaggtgagggacaggggaggaagccccagccccatcgttcctgccagaaatgctttggaaggcagaaaagaggcaccaggaggagagaaaagatggcttggagccagaggggaggcagacagagtggggcacagatgcaggtgcctggaggggtcgggggaggacccaagcccggggaaggccgcccacactcaggatatttgtgtgatggacccagtgagtgtcgttgagccagtcagccccgcttgtctgctgcagcagccgctcgtacgtaagccgcaggtaactcatgtcctctgagtccaggcccgagttccaaatgtcatacaggatggtcatctgttcaaactcactgcgtggctcgtaggcgcggg

SEQ ID NO: 28534 - DNA, 1091 bp, Artificial sequence
  DNA replication origin
cctcacctgggtatgctcagcggcgtgggccccgccctctcctttggctgggacgcaggtggccagagaggagccgttctcttccttaacaccctgcactcaccaacctgaccaccccaaaacgcaagcggcggccccaggatgggccccgggagcaccagacaggctcagcccgcagcgaaggctactaccccatcagcaagaaggagaaggacaagtacctggacgtgtgcccagtctcggcccggcagctggagggcgtggacactcaggtgggcctaaccccgccgccgcgtcctcctgccactcacttccctgccctgctcacctcctccctgccgtgtgtctcacaggggacgaaccgcgtgctgtccgagcgccggtccgagcagcggcggctgctgagcgccatcggtacctccgccatcatggacagtgacctgctgaaactcaaccagctcaaggtgaggctgggctgcaggaggggctgggtggggtggggtggggcaggaaggggcagaggccaggggaccacccagcaggctcctgtggttccctcgggtggagttggggggtaagcagccagaacaccctctgcccaggaagtctgtgggaagagtgagggtctggggtgtgggaggtgtctggcagttgagtctcccttctgccccccagttccggaagaagaagctccgatttggccggagccggatccacgagtggggtctgtttgccatggaacccattgctgctgacgagatggtcatcgaatacgtgggtcagaacatccgtcaggtgaggctgcactcccagccccgccccggcttctgatgcaacaagacagcatgggggctcacacacatgctgtttgtccggttaaagccttgcacactccctaaccccggtacctagccagtgagaccagcctccctccggtgtggtcagcaggtgtcagtggtccagcaggaggcatggctgatggcactgctccctttctttttttgttttgagacatagtctctctctgttgccaggctgtagtgcagtggtgcgatcttggcacactgcaacctctgcctcctgggttcaag

SEQ ID NO: 28535 - DNA, 765 bp, Artificial sequence
  DNA replication origin
agcatgctaaaaccccgtctctactaaaaatacaaaaattagccaggcgtggtggcaggcgcctgtaatcccagctactagggaggctgaggcaggagaatcgcttggacctgggaggcagaggttgcagtgagccaagatcgcgccattgcactccagcctgggcgacagagcaagactccgtctcaaaaaaaaaaaaaagaaaagaaaaaacagggtcagtggcagcgacgtgtggctggagggaacagagagcccagaccgcacgggcttgggagcctgtgaatccacttgggcctgtggtgagagaggaggaaagtcccggagctttcttcaggagagggtccttccgcaggagagggtccttccgcaggagagggccccatggctagtgagctccatgtctaggctgacaccagtatccaggcaaaggcaagggtggcccgacccaagcagtggcagcagaggtgacagagaggaggctttgggtgcaaggtggttggctgggctcagcagtgagagggtgagggggacgggaggccctctctcggtgctgctcttagctgctgggagtatgatgggagggccagtgagatgggtgtgaggaggaagaacaaatatatggtcaagatgagctccagtctggacatgtggggttgcaatgccccagggacatctaggggatgacgcccagcagctccactgaggtggcttttggctggaaatggaagtttgggaggagtccccaccacatagctggcggct

SEQ ID NO: 28536 - DNA, 828 bp, Artificial sequence
  DNA replication origin
gcctccccacggcgcccatcccacgtggggacagaaggaagtgagcacacggcacacccgctgttggattggttgctatttctcccgtcccacagggcctgacctggcccagggtggggtggggggctctggggacaggacatgcagggaggaaggggggggcaggattttcctgtgttttatccatttgcaagttggtcaccaatagaaatgggactctgagggctaacagaaatgggactctgagggctaacaggagagggcggcctggctctgggccccagccaggccccaggagtcctgtcccctctgagaaggggagggagagagctctagaaaccaacggagaaacagagaagggggcaggggctcatgtcagcaaacacggctacatcacgtgacacgccagtgacacagaaacacacgccaacgcacacggctgcacagcgggcaggggcggttaggggaaagggagccggggccacccatcttgtcctctgcagggcgggctggggggcagggtgaatgcatagaacacatcatgtgtacacgctcagggcgtggcaagagcgtgtgtcgacccacgggtacatgggatggacacgcagtgtgcttcatgaggggtgggaacagggaggagggggaagaggagcactgagccctggccaggcccgggaccacccgcagggcacacgtggggcacatgtgggctcaatggttgcaggcgcctgggcaggtagcacacatttgtccaagaacatgcaaaagacaccagcctccagacaacatgccaggacgcacacagacagcagccaacaagcaggcaca

SEQ ID NO: 28537 - DNA, 861 bp, Artificial sequence
  DNA replication origin
aaatggtgtgtccacagatctgtggtctcacgcacgcacacacactgttcacagaggacagagagggcgtgatggactgctgtgttacacttggctgcagtctacacaacagccccggtgaagggggaagctcagaccacgcacacacacccaaggtgggggtggagggggtgctctggtgcatcacacacatcacacgcacacgcacgctggggtgtccacacgtctcgagcatgtgccggcggcatgcatgttggtgtgcatgtgtaatcacgcctgctgcgatctacgtgcggggacggggggggggtccatggcccggtgaggtccagggacaccagggtctgccgtgggggtggggctgcctgggtctgttttgggagtgagcctggagcaggggatggagtgaaaggggtggtgggggtattgctcccgatgtggtgggggaagggtctgggagagagaagggtggggggggcctacaagcccagcgtccccccaatggatgacgccaagaccacccccagcaccacacagcaaatgatgatcatgattttcttctgcagcagaaagaggagtgagacaggcagacagtgagagagatcgacacacggacagatgcagggacagacagggcagagggtggcagggagaagaggggagagaaaacagaaacaggaagaggtcagagccagagataaggcctcccgcccgctgccatcactcacctcagcccgggctcagccttgggctcccccgcctacccccaggccgcctgccccgctcaccctccgggccttgctctgatatttcactgctttcttggtgtcagacacagctcgctccacgtagtccacagaa

SEQ ID NO: 28538 - DNA, 783 bp, Artificial sequence
  DNA replication origin
cagcgtccccccaatggatgacgccaagaccacccccagcaccacacagcaaatgatgatcatgattttcttctgcagcagaaagaggagtgagacaggcagacagtgagagagatcgacacacggacagatgcagggacagacagggcagagggtggcagggagaagaggggagagaaaacagaaacaggaagaggtcagagccagagataaggcctcccgcccgctgccatcactcacctcagcccgggctcagccttgggctcccccgcctacccccaggccgcctgccccgctcaccctccgggccttgctctgatatttcactgctttcttggtgtcagacacagctcgctccacgtagtccacagaatgttccacgttgtactcgatgcggtcaatcatctctccctgcagacagaggagacatgcacagggagggatgggggctgggctggaagaggggacctcaggcccagggaggctcccagagtggcatgggtggcagagccagtacctggctctctacgagcatggccatgtccacaaacatatcgtgcagctcgcggatgctggtctccagcttgatgatctcattgtgcctcgtctcaatctcattcagcgcctgcttcgtcatctgtgagtccattttgatctagggtgacgagggagagagctacaatcacccttctccgccatgagcgcctccaccgcagtggagtggccagggtcaaatccggtgtcatttactagctgaaaccttaggcacattattcacctgct

SEQ ID NO: 28539 - DNA, 690 bp, Artificial sequence
  DNA replication origin
aaacgtctgttcgtctgtttatctgctggctcctaacaccaccctggggcaccgctgcccgcaactcgccctggggatgacgtttctccccgggcctggcgctgccgcggggtgttgaccattcgtacgccccggaccctcgccccatgtgccccgggtctcccgcccatcgctgcgccctctctcccgcagcgatcgagcaaagcattgaacaggaggaggggctgaaccgttcctccgcggacctgcgcatccgcaagacccaggtaggaggcggcagcccattgggggtcgggtcgggacccagctcgggaggagcccaggctggaggccggcgggccagggccaagcaccggcgggggcgtggtcagggagggctggggcggggctctgggggcgaggctagagcgggcggggccctgggcggggctctcggggagggcggggtcgagccgcatctcagcgcagtagcagtgtctctagctggtgttggcctaagatgggggtgccgggcgggtagggaaccatgaacttgtcagggtttgggatcgcggccagagctgaagaagggaccgtaaactaattcagcgcttcctccttattccgcccatgcactgcctcctcacctgcctcggtctctgctccctgactccctccctgatccctgactacctccctgatccgtctgtc

SEQ ID NO: 28540 - DNA, 1348 bp, Artificial sequence
  DNA replication origin
cgcgatcccaaaccctgacaagttcatggttccctacccgcccggcacccccatcttaggccaacaccagctagagacactgctactgcgctgagatgcggctcgaccccgccctccccgagagccccgcccagggccccgcccgctctagcctcgcccccagagccccgccccagccctccctgaccacgcccccgccggtgcttggccctggcccgccggcctccagcctgggctcctcccgagctgggtcccgacccgacccccaatgggctgccgcctcctacctgggtcttgcggatgcgcaggtccgcggaggaacggttcagcccctcctcctgttcaatgctttgctcgatcgctgcgggagagagggcgcagcgatgggcgggagacccggggcacatggggcgagggtccggggcgtacgaatggtcaacaccccgcggcagcgccaggcccggggagaaacgtcatccccagggcgagttgcgggcagcggtgccccagggtggtgttaggagccagcagataaacagacgaacagacgtttgagggggttccgaaggcaggcaggaagggatactgagggtcagagggtcaccagacagaagggggctatttgttctagtggcagaactgggtcttggaaagtcccatcagtggtaattcctgtccaactccatgagggcgtgccggcccagcccgcgtgaaggggccatgtatgtggggtgctccctacttcctacagcctctggacagggggcaagaacacagcctgccttttttctgatggaaggcagtcacctccaggtggatcaggttctagtggcccctctttcccaggggaattcaagggcaaacacatggatattccaagggagaaagcagccctctccctgccctgtaaggtgatccccgatccgggaattcccacttctgaaggacgttctggaaaagtgcacagattaactgagattcctgcttctggatcaagcactcctgacactatcgttccgattttctaaaaaagagattgtggcaaaatctacctcggtgagatcagaaaatgcagcagggatgaatcaccggccctctcagacctcaccagcctccaggccattcctaagagcctcactcctccgttctgttggcagtgggggaggtacggggccggatggcaccccaaggctcccccgattgagtgacagctctggctcagcaacacatggcccagggatattggaatcggctggcccagattggggcccgactgtcagccttggggctggggtcaagtccggagggaggggtctcttacaggatctcattgactttttacaacatt

SEQ ID NO: 28541 - DNA, 1139 bp, Artificial sequence
  DNA replication origin
ctcccaaagttctgggattataggcatgagctaccacgcccagtccctttttttttgtttgtttgttttttgttttttttttttttgtttgagacagggtctctatctgtaacccaggctggagtacagcagcatgatctcggctcactgcagcctcgaccccctgggctcaagcgattcttgtgcctcagcctcccaagtagttggaacagaggcacgtactaccatgcccagctaattttttttttttgaaacagagtctctctctgtcacccagactgtagtgcagtggcgcgatctcagctcactgtaacctccacctcccgggttcaagcaattctctgcctcagcctcctgagtagctgggattacaggcgcccgccaccacacccagctaatttttgtgcttttagtagagatggggtttcaccatcttggccaggctggtcttgaactccggacctcgtgattcacccgcctcggcctcccaaactggcccagctaatttttgtattttttgtagagacagagttttgccatgttgcccaggctggtgttgaactcctgggattgagcaattggccccgcctcgccctcccaaaggcctgagccaccatgctccacccacaattcttttccttcctggttgagggattgtactcctcacctttcaatttggaccgaaccttgttggccgtcttcttgatgtctgcagtgagatcctccagctcctgtttggtctctgaggggagggcgagggcaagtgagatgtctgggtgggaaccccaggccccttctcctcccaccccacagtcaccggcagccacactcactctcatctgggttgggtgcggccaggatggcgctatgctgttttttcacctgctccacatcctccgacagtttctcaatgcagccccggatctcttccacctggagcagaaaatcggctatacccagccaagctgtcaggccaaacaacgggttccaggggaaccagccagggttcaggggaatggaccagccccagaacggctgataaaaggccagggagggtgcaggagcagggaagtgggggacagggaaaaggaagttgtcggtggctaggggctgggtgccggggctgcggctgggcggtg

SEQ ID NO: 28542 - DNA, 999 bp, Artificial sequence
  DNA replication origin
ctgatcctgagttttggctgtgtggactgcacctaggtcccatctggccctgtctaggttcaatctgagctgtctgggatctgtctgggatccgtgtgagcctcggctagttcagtctgagcctgtctggtttctgttaggccctgtctgcgttccgctgggaccctggcaagctcttctttttggattccaactgagtacacccccaggtggatgctgtttggatcctgtcttgatttcacccagcctctggggtttggattctgtctgagctctggctgggttctttttggaaatcagaatgaactctgtatacatttccactggggctgatcagggctccagatgtcattaagcttgatggactcagattttgctgtcagacctctgtcccaagcagagaaggactcaggtgtgtgtagcacagggcacctcccctacagcctctcctgtccagctctgagtgtgtgtgcagacatgaggctcggagaagctggaagaacaagcccagtgagccctcccaaatgtcctcaggggtgcagctgaaagccagtgtgtccacacatgtcagtgcggctcagctgtgagtctgcgtgcgggtgaacgccagcatcagtgcatctccgtgtgggtgtcgggggggcctattcctgtgtgccttgggtgtcagctcttctgtctgtgtctcgagtctgtctgtcggtggcagtggtgctgtgggtgggtaaatctctttgtgtctctgagccctgcgggtggagggttgagcagctgcaggttgcaactgggaaatccaagccagcaagagtaggtgggtgtgaagttggaaggggctggatgaaagcaagtgaatccactgcgagggagagccggctgggaggggagggagagtgggcgggaagaggggggcacagggcgcgagggaggtcggggtgctgcccgtatctcttatccagccctcactgcttgctcaacttggcgcctgccgctggcagtgaa

SEQ ID NO: 28543 - DNA, 692 bp, Artificial sequence
  DNA replication origin
gactgattgtctttccaacagtaccttggcattcccaaggggttctcaagtccgtttgtcacacagtggtttcgggagccagactgtctgggttcaaattctaattttgctacttcctgtgagaccttgggcaagttgcttaacctctctggtcctcaatttcttcgcgtatgagttgggagaagtaagagtgcctgtttcacagggttgtcctgaggactggaagtagttaatatgcatcaggtgcctaggagggggcctggcgcccagcagtgctgtgtgtctgttacccagcagatggcttgtttatttctcttcaacaccacacaagccccctgcgatgggcaggacatggcccctattttattttggagtacattgagggccagagggggtaaaaaaaacctgacttgtccaaggtcagatagcttttaatggttgaggtgggcttgaaccagggttttctgcgtccagtttaccaggcaaccttggttggtgctaggctggttgtggaggctgtgaaaaggagttaatcagctaaataggtgtcccagggtctaaggagtgaagccagagtggggctccagaggaaagagcagagtgagtgaggtggagaggaaggtgggttatgggagaagacaggaggggcacagggagggctgaggtctgagacgcagctgtggagtcgggtg

SEQ ID NO: 28544 - DNA, 1111 bp, Artificial sequence
  DNA replication origin
tgttatctcattttatagataaggacactaagctcagagaggttaagtaattagaccaaagtcacacagctggtaaaggcaggattcaaacccaggcaggccggcttcagcatcggtgctgtcaattcccctcctcagtttgcagagcaggctttcatccgtgatgtcattagagccccactgacctcctggcaagtggacggggaggctctttcattttagagttggggaaactgaggcccagagtggttgaataactttccaaaggtcacacagctagcaggtgagggatccggacttgaacccagttcccctgctaccaggactattccatgactccaaaacccagggaaatggaagtgggttgggatcaggtggtgtggaattggggtacaattcgagaaagagggagggaaaaggctaagcggggtaagggggaggcaggggagggggaggcctcatgaatgagtcaggggcccctgctcagaggtaaggaatcctgttggctgtggctgccggaggtggtgtggaagggtgaaggggctgagtggatgtggtggctttggtattagtcacagctcagggaaactggagattcaagagggggcgggcggggtgggaaaagctgacagattcaggtagcgtaagggtctccctgctacagttgaaagcaaggagcctgggatgcaggagacacctggcagggtgtgggggacctggaaacggggtctctgagacactgggagggatgaggcaggggcggtggtgggaggggacattagcccaggggactgattgtctttccaacagtaccttggcattcccaaggggttctcaagtccgtttgtcacacagtggtttcgggagccagactgtctgggttcaaattctaattttgctacttcctgtgagaccttgggcaagttgcttaacctctctggtcctcaatttcttcgcgtatgagttgggagaagtaagagtgcctgtttcacagggttgtcctgaggactggaagtagttaatatgcatcaggtgcctaggagggggcctggcgcccagcagtgctgtgtgtctgttacccagcagatggcttgtttatttctcttcaaca

SEQ ID NO: 28545 - DNA, 847 bp, Artificial sequence
  DNA replication origin
gtcaccaagcaagtgggtggggggcagactgcaatctgggtttcctgtctgctaggttgacacaggtctctgcttttctggcctttgaaacagaagtttcagcactgggggtgaagagctgtcccctggatttgggggtggggacccaggttacagacagacgagaagaaggtgtttggaggcaagtgaccgctgtctctggggacagacaggttgccaaatgggaagcaaggaggagctggtggctgagggagggaattttaaaggtttctttattacatttttactgaatatacactcaggcatgaggaaagtgacagtaataataaacattgtttgaagtgttttatgcatattcactcattttgatcctcacagcaatcctatgagactggttatctcatttcatagatatataaatatctttttagatatatagatatatgttatctcattttatagataaggacactaagctcagagaggttaagtaattagaccaaagtcacacagctggtaaaggcaggattcaaacccaggcaggccggcttcagcatcggtgctgtcaattcccctcctcagtttgcagagcaggctttcatccgtgatgtcattagagccccactgacctcctggcaagtggacggggaggctctttcattttagagttggggaaactgaggcccagagtggttgaataactttccaaaggtcacacagctagcaggtgagggatccggacttgaacccagttcccctgctaccaggactattccatgactccaaaacccagggaaatggaagtgggttgggatcaggtggtgtggaattggggtacaattcgaga

SEQ ID NO: 28546 - DNA, 1919 bp, Artificial sequence
  DNA replication origin
cctccaggcctctcccgccccctcctcgggtgtcccccaagcccgtgactacaacccccaggcgcccccggcccgggtgctgcgcatgccccctgctccttgcgcgctcccgctccccccgccctcgcttcctcctcacctccctccgcccccctcccccgcgctcggctcccgcatccctccatcctaccctgtgccgcagccgcatcgccaccgcagcccggcagagccgagcccggcccaggcccctgcccctgcccggccctcggccagtcgcccccggccccgcccccgcccgcaggccccccgcagcggccgcggcgccccccggcgcccccagaccccggcctccggcacagaggcgggagacccggagcagcagcagaggcaggaggactaggaggaggaggaggagccgtcgcaggatgaaggatcggactcaagagctgcggagtgtgagcttgggggtggggagaatgggggggcgggaccccaatattgggggagcgcgtggggatggagtgggggaggtgctgggacgtgggggcgaaggatgagatcggaggttggtagccggagcaccccagtatcttcaggcgcctgatgtctctccagtgaacctgcattttggggacagtgcctggaaggggttggaggccatgaagacacaagggggcaggagaggtctcaggggcctcgaacaccccgcattcccaggagggccccggggtctggtctggggatgggagagagtggatatcaggagaaaccggaggagactgtcatcccctgggcaggtttgccaaagagaagcatgggggcggtgactgggccaggctgagagtctagcaggacccagattcaggggatgctacggggaaggacacaggttgggactgagatgccagcacctggcagtgaatgaagtgtgtgtgtgtgtgcacacgcgtgtgtcactccctatagggagggggcatctctccgagacagggagggaagaggtggcctccggagagagccagagggccagggcctgagacagggtgacccagaggtgggagatggggatgcagaggagagggccatggaacacgggccgtgctctgcttgggggaactggggcaccccgggcagtcaagggctgatgcaggccccaggtctgcaggcctgaagaggcccggctccaagagtctggccaggcagtccctggttttggggggacaggggaaggactgcagtggaggctgctacctggaggaactggggagtggggttcgatgagaatggtttcaggggcagggaggacgctggggtatttggagaaatgacctggggcccgaggaggcagcactgacagtccgcactgtgctgggctggtggtgttatgttaataagggtaccggccccggctgagctgcccaatgcactgagcctttacagggaactggtgggttgttaccccaggggttattaccccacttgacagatgaggaaactgagattcaggcgtgggaagggacttgtccaaggtcaccaagcaagtgggtggggggcagactgcaatctgggtttcctgtctgctaggttgacacaggtctctgcttttctggcctttgaaacagaagtttcagcactgggggtgaagagctgtcccctggatttgggggtggggacccaggttacagacagacgagaagaaggtgtttggaggcaagtgaccgctgtctctggggacagacaggttgccaaatgggaagcaaggaggagctggtggctgagggagggaattttaaaggtttctttattacatttttactgaatatacactcaggcatgaggaaagtgacagtaataataaacattgtttgaagtgttttatgcatattcactcattttgatcctcacagcaatcctatgag

SEQ ID NO: 28547 - DNA, 1422 bp, Artificial sequence
  DNA replication origin
tgtagtcatggatctactcatggctctggtggcatcttcaatctctgtcttcttggtgcccagctcagagcttaggcatatagtaggggctgtcttacagggggaggatctggctcgcaggtacagatgtgggcactgcagacacggaggtgcagaaagatgcaggtaaagaaggaagagaatgccaggcatggtggcccaggcctgtaatctcagcactttgggaggctgaggcaggaggatcgcttgaccctaggagttcaaaaccagcctggacaacatagtgagaccctgtctctacaaaaaataaaattagccaggtgtggtggcgcgtgcctgtagtcccagctactcaggaggctgaggtgggaggatcacttgagcctgggacgttgaggctgcagtgagccgagattgcaccactgtactctagcctgggcaacagaatgagaccctaactcaaaaaaaaaaaaaaagagagaatggacggagcccagggaaccctgaggttgaagggctgtgggaaaaaaggtaaggacctggaaagaggctgggagacaacactcacagatcaggttggggggtaggtgggcggagcaccacagacaggagggtttcaggaagaggggctcatcagggtcacatgctgctgagaggtcagggatggtaaggcccgactggcggtgtgggatgagggtttatcagacacagatttggcaccaaggaggtcactgggtacctggcaagagaatgccgggtgcggtggcccaggcatggaatcccagcactttgggaggctgaggcaggaggatcgattgagagtcaagacctgtcccattggggaccggcgccccattgcagggggtgggaggagctggtgtggtgtaaggatggggagaggagaggtgggcatcagaacaggaggtcactcagaccctcaggggcacctgatttcccctcccactaaggacaaatttcatgttcaacagtcagagccatctgcagatgggccaagaggtcctgggaggtagtgagcaccctgtccctggaggcagacaagcagagctccgagacccaccgcggcgggagaggcccaggctgtgcaacacaagccccgtgtccttctcagcaagcacctggctggttccctgcatcgtaaaaaccacacagagggtcggtctttctatttatagtgtccaaagagcctcctgcaagaacacacatgggctcgcacccagaggtggtcggcgcgcagcctcacgcagacaccagacacaaaacacagccgcgatctgtgtctcctggaaagggatccacatcctggctcccaggttattccctgaattcattccgtcaccccctctttccgccgggccaccccaccccccgggccaccctagcatctccgcttggctctccgca

SEQ ID NO: 28548 - DNA, 999 bp, Artificial sequence
  DNA replication origin
acagggtcacattctgcggtccacgagtttgggaccgggctggtcacgtgacgcggtgggggcaccatggggtgatgtgagatgcgggtgtctcggattacgtacaaatgacgtattcctaccccttttggcaaccagatttccgttggaagatgcaacggttccggtgacggtagcaagttctcgcgtccaggcatctccgcttccgctcggggcgcaacaacttccgactccaccttcccagcctcgggcaaggaagagacgcgaccatgtgcgcatgccccgaatttatcacggaggggcggggctgaggctgcgggagctggagcggggaagaaaagggaattccaacctgtggaaccttggggggtccccggggtcggcgccttcccattgactgtgggcggtgcaagggacggagcctctggcggctcgtgggggtgttggggtccgcagggggagggaggggagtgtcagagtgtgagcggggtacgggaattccaaatttgagggcctcccggctctggcgccggggagggagagctcaggccgccatgcgggacaggacccacgagctgagacaggtgagacgccagggcagcggggatggggacgggcggacgaactggaacgcaggacttctggtcttcgggatagggaggggtggctgatggccaggaaggaaagtcccggaagcctgtgggtcctgcggggtaagagccgcagcgaaacggtggtgccaatgactccgggcctggcagggggatgacagctcggacgaagaggacaaggagcgggtcgcgctggtggtgcacccgggcacggcacggctggggagcccggacgaggagttcttccacaaggtaaggggctggggtctccgcctggattcgcgagggtgtaggaggacccgaggagtagcgtggtctggagtaccccatatctctttcagccctctcggtcaccctccccaggtccggacaattcggcagactattg

SEQ ID NO: 28549 - DNA, 1438 bp, Artificial sequence
  DNA replication origin
ttagccaggatggtctcgatctcctgacctcgtgatccgcccgcctcagcttcccaaagtgctgggattacaggcatgagccaccgcgcccggcccccgacacctagttttaaagggtaagccggctcctggcacctgcctacttgcagtagggcggcgcctagctctgacctccaaggtctggggactgcgtcgcagccgcccagtccatcccactttcaatcttacaggcccctgctgttgctgccgctgccgccgctcccagctgcccagtctggcgggctcagtcccgcgttgccatgtgtgggagaccgcgtcgcgtaagcgctggatgtggcttcgctgatgcacattggaccgggctctggactgggctaggggaagggcaggagggcggaattgggcccgagggccaggcctcgccgacccccgactgcgcctcccggtggccccgcagcgcctcccggtggccctggagtgcaggtcttaccgtccgagatcgtccgcaactgggcgagctgtgcatggggcgtggctaaggccgtggtttggttacgattggccagcgggacttaagtgttgtctctgaagagcatggacattagtctggagggtcctggaagagtgatccccgccccaccatcaaatggcgcttaggtctaggaagcgggtgtgggtggggccttagggcgaggcgcagacataccccgaagtggttggattgtataccgcaaggggctggatcgaaccccccaaagacactggaaggctgtgtggctgaggagggcccggcagatccagtgtgtcgtgggctttacaggaaagagctccaccttctctggagtgtgcagatgcgatctaggtgtgtccacccgatgggagctgcgggccgggcagatgctgccccagtacaaagctgatttggacctggggcctctggacttccctgattctctgcttgcatctccagcaaagtcctgtcccgttggctgccttcatccactctctcacttctctgccttcagagtaaaattgcaagatctgtggtgcttactgggatctgatagagtctctcggcatccactgtctatgcagcgggtgtccacctgcagcgggggccatgtgcagcggggggccacgtgcagtgtgtgcctcttcttagccatgctggacagcgccgcccctgaaaagcagctccccggtttcacccagaaagccatccagaacctcctggaaaaggtggcctgatggccaagtggcctcggatgccaggctcaatcctttgaacttttcctgtgggctgtcaggacccatagaaggtctttgagcaggtgagtttggagcagatctggtaggcaagcgaacagatggatgcgtgcactggagattccgtgggttcccctgtgtacatctcttccctttgggaaactgccctgag

SEQ ID NO: 28550 - DNA, 1544 bp, Artificial sequence
  DNA replication origin
ctgcggccgcatgttctccgacccctcgagcttccgtcgccaccagcgcgcccatgaaggggtgaagccataccactgcgagaagtgcggcaaggacttccggcagccggcggacctggccatgcaccggcgtgtgcacacaggcgaccggccgttcaagtgcctgcaatgtgacaagacgttcgtggcgtcctgggacctcaagcggcacgcgctggtgcactctggccagcggcccttccgctgtgaggagtgcgggcgagccttcgccgagcgtgccagcctcacgaagcatagccgggtgcactcgggggagcgccccttccactgtaacgcatgtgggaaatcctttgtggtgtcgtcgagcctgaggaagcacgagcggacccatcgaagcagtgaggccgcgggtgtgccccctgcacaggagctggtggtggggttggcgctgcctgtgggcgtggcaggtgagagttcagccgccccggcagcaggggcggggctgggggaccctccagcagggctgctagggctgcccccggagtcaggtggtgtgatggccacacagtggcaggtggtgggcatgacggtggagcatgtggaatgccaagatgctggtgtccgggaggctcctggtcccttggaaggggcaggcgaggcggggggtgaggaggctgacgagaagcccccccagtttgtgtgccgagagtgcaaggagaccttctccacaatgacgctgctgcgtcggcacgagcgctcacacccggagctccggcccttcccctgcacccagtgcggcaagagcttctctgaccgggctgggctgcgcaaacacagccgcactcacagctcagtgcgcccctacacctgcccccattgtcccaaggccttcttgagtgccagcgacttgcgcaagcatgaacgcacccaccctgtgcccatggggacccccacacccctggagcccctggtggctttgctaggaatgcctgaagaggggccggcctgaagcccatgaccccccagcaccacactccgggagcccagcccccatcgggggcttcctgtacctccttttgcctggctctgctctttagactccagatccctacccctcagcaactagctcccctgtcggccagctaagagagctgggacagtggaggctggcagaagctgagacgtgactgtctaggagtaacactcattaaagctttcattttggcaccaggtcatcttctgtgttctggttgggagtgaatgggtgggagtttgggcatcaggtaaggttcagtggagacccctggatccacagatttgaaactagaagggtctttggatgcagtttcccaaagtatgtttcaggatgtctagtgacaaaaggtttcatgggcaggtaagaaaggaaattccctgtgcccttcttgggattcttggtgatcaaaacttggtgatcaaaagtgggctggggtggccctggaggagcagtccctctggcagctgaagctggcatctccaggcccactgcccctttgttgtgaggg

SEQ ID NO: 28551 - DNA, 1368 bp, Artificial sequence
  DNA replication origin
gtgtcaggctccgcggccaagcctaggccctatgcgtgtccgctatgccccaaggcctacaagacggcacccgagctgcgcagccacgggcgcagccacacgggggagaagccctttccgtgccccgagtgcggccgccgcttcatgcagcccgtgtgcctgcgcgtgcacctggcctcgcacgctggcgaactgcccttccgctgtgcgcactgcccgaaggcctatggcgcgctctccaagctcaagatccaccagcgtggccacacaggcgagcggccttacgcctgcgccgactgcggcaagagctttgctgacccttcagtgttccgcaagcaccggcgtactcacgctggcctgcggccctacagctgtgagcgttgcggcaaagcctatgcggagctcaaggacctccgcaaccatgagcggtgagggtgccttccggggcagggcgccttccggggcagggcgacagcgttgctgcagccaatggggcctgggtttgagtctcagggtaaagtgagccaatgggaaggtgggcatggcagatccaaggggaggggctaggcatgtgggagaaattggtgcccctgattgggcagaggtggcaaccaccttgaggttgatctctgagaatgggattgggtcagattggcctccgttgtaggccagctggaaagggggcggggtttggagttgggcagttctgagggtcttttgtggagaccaggaggtgtgagtggggcctggtttgtctaggtcatttttttttttctttttctcagcctctacattaatgacatgtttctaggctgggcacaatagctcacgcctataattccagcactttgggaggctgaggcaggaggattgcttgagcccaagagttcaagaccagcctgggcaacacagcaagcctcgtctctataaaaataaaaaaattacccgagcgtggggatgtacacttctagtcccgggtacttgggaggataaggtgggaggatggcctgagcctgggaggtcgaggctgcagtgagctatggtcaggccactgcattccagcctggggaacaggaaaaaaaaggcggaggacacgtatcttggttttctgttttgttttgttttgtttttgtttgtttgttttttgagacggagttttgatcttgttgcccaggctagagtgcaatggcgcgatctcggctcaccgcaacctccgcctcccgggttcaagcgattctcctgcctcagccttccgagtagctgggattacaggcatgcgccaccatgcccggctaattttgtatttttagtagagacggggtttctccgttttggtcacactggtcttgaactcctgacctcaggtga

SEQ ID NO: 28552 - DNA, 835 bp, Artificial sequence
  DNA replication origin
tgggtttttgtcccggtcgcgtggcccgcgctgcaagatcccaggcgccggcggccccctcccctgctgaggcccggccaccactcccgcggtcctagagaacgccatcttgcaagcctttgtccctcattcggccttccgtccattcatttgttcatctcctcatccttcgttcagtcctccttgccacgtcctccgaagccacgttttctgaggcttataaccggggtcctgccctccaggggctgcctggctggcgggggcgccgcgtacagacggttgcgaggagcgaggagctccgggtttctgcaactctcggctcctcggcgcgcttcgtaggccccaccgcccttcaaactcccacaaacttaagggaccccattttactgatgaggaaactgaggtccagagcggcgtggggcccttacctctctactgccataaagtattcctgagggcactagggaagggggttcttgaaggatgtaaaggggctttcccgttggagaaggcaggcaagggctccccgagcccaggaaactgcatctagaggtggaggattgagaattgtggctggaggttcggtcgctgccgggaggaggactctgtcgctggagctgaggctggaaaagtaggttgggatcaggttgtgaactggcccggtaggaggcctaggatatgattagcgctcacttctgcagggttcatccgctcactacgtcactcctggccgtgaggcctgtgtggtgactgcttgtttagagatgggaagattgaggtgcctcctttttctcctcatccctgccccagggtcctagcctaggatttttggaaa

SEQ ID NO: 28553 - DNA, 1178 bp, Artificial sequence
  DNA replication origin
cgccggcgcctgggatcttgcagcgcgggccacgcgaccgggacaaaaacccaaaacatggcgggctctaggacccccgggaccacaccgcgccgggccagcagccgcgcgggccgagcctgggtgtccgcagcccagaaccgcggagacagccggcgggttctaggacctgctgggcccgcaatgcgcccggggccgctcacagcccgccccgcccgcgctgctcgcgctgggccaacccggcccgccctcggcgcccgcagggaaactgaggccagctcggatcgtggccgcgtgggagctgcccggggccctcgcggcttcccgccgacgtttcctacctgatgagacttgtgctgactccgtggcgtcggcgtcggctcctcgcaccgacggagcccggaccctgccaaacaggggccggcgctaggacccagcggggggcggggaggtgggaccggtggcgcggcgagcggaagtgagggatcttcctcagctaggaaggaagggaaagttcccggggaacctccagcctatggcggcagagaagcatcttgcaagaggtctctgtgtgtgctgaggcaaggggacgccaggcaggctgacggtatacgcccgccttgtgttagtctggggccaggtcaccggcaatgtcttcaagaaccagaaggtgggaggacaaaaaggccatgctcaagctctgcaaaacctaagtccaattatattccacaacatttcctttaatagcaaggagtgggtttcacgaagttttctccatctgccttgggaaaagtcctccagagagccccacgaaaagtgtcaccaaagtactgtggccagggctgtagaatctttttctccctttctgcgcctattcaatatgcaccggaacgattctagctgctcttgccggaagtgtggctagcttagcgtgcaaagacgccgcgttgtgacctacgtgggcggagtcagccgtgcagacctagaacttagcgccggaagtgtgtctgcgtaaaactgcggctcggaggcgggacaggcagtgctcccgaagcggaagtttcgcggggaagcttttgcacctaaggacacttcctgtttcctagtaacaataggaagtgtccgtagagctgggagtagactcctggctcatgccagctgcgccctcttttctctac

SEQ ID NO: 28554 - DNA, 1119 bp, Artificial sequence
  DNA replication origin
ccggaagtgtggctagcttagcgtgcaaagacgccgcgttgtgacctacgtgggcggagtcagccgtgcagacctagaacttagcgccggaagtgtgtctgcgtaaaactgcggctcggaggcgggacaggcagtgctcccgaagcggaagtttcgcggggaagcttttgcacctaaggacacttcctgtttcctagtaacaataggaagtgtccgtagagctgggagtagactcctggctcatgccagctgcgccctcttttctctacctccttcctcttccccccttctcctttccctctttcccttccctcccacctcccgggaaccctggctgagtgtgcgtgtgtgggagcgcgagagccccccgacagccaccccttggggcgcgcggctgcagttagggtaagggtcccagtgcgcaggcgcgctcttgttcgcggtccccaactgacgcgcccgcggcgggaaggagagggggccgccggtgcgaggtaggcgtcctgagaggaaattggcagacgagatgagtgaggtcagaggacttcattggtggttgactaggggaggggacttttgatcaaaggggctttgtgaggtgagaattccgggggcaggttcagtgaaggggtttacggtcggagacagttgtactggggtcccatgggaagaagagtcagagttggagaaggacaagacgatgtagggggcatgagagagcaagggctttgggatgaagaccgcctcagtcagggggtttgctgttacgtgaactagaataacaggcattgccgtgtgttctgaggattgagtaacacaatgaatatagttagcacagtgcctggcacatggtaatataatactcttcatgagttgctgtcatcatcagtattaagagaggaggcagaagaaaaaaatgagaaagactggtgagggtaagatcaggaggcatgggagagaaaaggtaggcaatgaagtgacattacaacctggtattgatgttattcccaagatggaagatagtttgagttcaagggaagtagataaaagaagtcgctaagagagtcttttggggttttttgtttttttgagatggagtctcgctctgtcacccaggct

SEQ ID NO: 28555 - DNA, 1433 bp, Artificial sequence
  DNA replication origin
ggtggcactcacttctgcgatagcctcactggggtggatgaagaccagaagccagccactggccaacccaactcctcttcccactctgccaatgctgtcactggctggcaggctggggccgctcacacatgctctgactgtgggcattctttcccccatgccactggcctgctgagccacaggccctgccacccaccaggcatctatcagtgctccctctgcccgaaggagtttgactctctgcctgccctccgcagccacttccagaaccataggcctggggaggcgacctcagcacagcctttcctctgctgcctctgtggcatgatcttccctgggcgggctggctacaggcttcaccggcgccaggcccacagctcctctggcatgactgagggctcagaggaggagggggaagaggaaggagtggcagaggcagcccctgcacgcagtccaccactgcagctctcggaagcagagctgctgaatcagctgcagcgggaggtggaagcgctggacagtgcagggtatgggcacatctgtggctgctgtggtcagacctacgatgacctggggagcctggagcgtcaccaccaaagtcagagttctgggactactgcagacaaggctcccagccccttgggagtggcaggtgatgccatggagatggtcgtggacagtgtcttggaggacatagtgaattctgtctctggagagggtggagatgccaagtctcaagagggagcaggcacccccttgggagacagcctctgcatccagggtggggaaagtttgttggaggctcagccccgccccttccgctgcaaccagtgtggcaagacctatcgccatgggggcagcctggtgaaccaccgcaagatccaccagactggagactttctctgccctgtctgctcccgctgctaccccaacctggctgcctaccgtaatcatctgcggaaccaccctcgctgcaaaggctctgagccccaggttgggcccatcccagaggcagcaggtagcagtgagctgcaggttgggcccatcccagaaggaggcagcaacaagccccagcacatggcagaggaggggccggggcaagcagaagtcgagaagctccaggaagaacttaaagtggagcccctggaggaagtggccagggtgaaagaagaggtgtgggaggagaccactgtgaagggggaggagatagagcccaggctggagactgccgagaagggctgccagactgaagccagctctgagcggcccttcagctgcgaggtgtgtggccgatcctacaagcacgccggcagcctcatcaaccaccggcagagccaccagaccggccactttggctgtcaggcctgctccaagggcttctcaaacctcatgtccctcaagaaccaccggcgcatccatgcagatccccgacg

SEQ ID NO: 28556 - DNA, 1366 bp, Artificial sequence
  DNA replication origin
cagaaagaccattccattctggctacagtgtaatggaggagcccaggtagcagcctcggcctgaccacgcccccacgtgctgcccaacccaccctgctatttgttatacctgacttgcgggtgctcagctcagcacatcctcaagctacttctctcaccccatagccaagcccccacccacctcttagaatccccggggctctctcctctcactccttgctcccccaccgactttggggctggacttccccctccactgtgtgcccacctcctcctgggacccttcatgccccctaccggagccggccaccgtccactcctcctggtgctgctgctggtgctgcacgaagctgattcggcggcggaagtggcggggacaatgggggcaggtgaaaggcccctcccggggtgcatggacccgcccgtggccctccagccgggcagctgtccgaaaggccttgccacagatgctgcagcagtggcgcttggggtccgtgtgggtcctgctgtggttcttaagagacagcaggttagggagaagtttgggacagagggagcacgggtacaaccctgtggtgtgggccttctggtggttcagcaggctgccagcatggcggtaggagcgcccgcactgggtgcagcggaagggccgctccttgtcctcagccgccatggacgtcaccgcttgtcctcccctggctctctccacactctctcctgggcctctgggggtttctgatggggcctcctgggctttcccttgaccagggagaaccacctggtcctccccagtcccggctttgggatctctggcctcctccatctgggctggcacctggctgtggccccgggcatgagcctgcaggtggctggccagttcctggtgggactcaaaggctttgccacagtcaggacaggcaaaggtctgggcgtctatgtggttgtggctgtggctctttgtggccacaggatttaagaactccttggagcagagcaggcaatagtgtcggtctgtcttgttggtgttgtggttcaagaggctgcctgactggcagtaagtcttgccacactggctgcaagaggagtggctccctggctgcagctgagagctgttgtctctgttgtcccagctatccatgtgactcagagtaggtccattgagctggcagtcaccagcgtggcaaggactcctgtggacactgtcctctggctcctctgacctagttaggaactgaggaacccagcctccactatgattccccagtcccccacctaccggccacccacctgccttccctgcaccccaggacagtggctctggggcttctgagcttgctgccctgatggggctctgactgcgctcccc

SEQ ID NO: 28557 - DNA, 820 bp, Artificial sequence
  DNA replication origin
gccatttgggtcgtggagtgcgagcacggccggccaatcgccgagtcagagggccaggaggggcgcggccattcgccgcccggcccctgctccgtggctggttttctccgcgggcgcctcgggcggaacctggagataatgggcagcacctgggggagccctggctgggtgcggctcgctctttgcctgacgggcttagtgctctcgctctacgcgctgcacgtgaaggcggcgcgcgcccgggaccgggattaccgcgcgctctgcgacgtgggcaccgccatcagctgttcgcgcgtcttctcctccaggtgtgcacgggagtgggaggcgtggggcctcggagcagggcggccaggatgccagatgattattctggagtctgggatcggtgtgcccggggaacggacacggggctggactgctcgcggggtcgttgcacaggggctgagctacccagcgatactggtgttcgaaataagagtgcgaggcaagggaccagacagtgctggggactgggattattccggggactcgcacgtgaattggatgccaaggaataacggtgaccaggaaaggcggggaggcaggatggcggtagagattgacgatggtctcaaggacggcgcgcaggtgaaggggggtgttggcgatggctgcgcccaggaacaaggtggcccggtctggctgtgcgtgatggccaggcgttagcataatgacggaatacagaggaggcgagtgagtggccagggagctggagattctggggtccagggcaaagataatctgcccccgactcccagtctctgatgcaaaaccg

SEQ ID NO: 28558 - DNA, 1278 bp, Artificial sequence
  DNA replication origin
ggggctgacccccccacctccctcccggacggggcggctggccgggcagaggggctcctcacttcccagtaggggcggccgggcagaggcacccctcacctcccggacggggcggctggccgggcggggggctgacccccaccacctccctcccggacggggcggctggccgggcagggggctgaccccccctcccccctcccggacggggcggctggccgggcagaggggctcctcacttcccagtaggggcggccgggcagaggcgcccctcacctcccggactgggcggctggccgggcggggggctgacccccccacctccctcctggacggggcgactggccaggcagaggggctcctcacttcccagtaggggcggccgggcagaggagcccctcacctcccggatggggcggctggccgggcggggggctgaccccccccacctccctcccggacggggtggctgccgggcggagacgctcctcacttcccagacggggtggctgccggacggaggggctcctcacttctcagacggggcggttgccaggcagagggtttcctcacttctcagacggggcggccgggcagagacgctcctcacctcccagatagggttgcggccagcagaggcgctcctcacatcccagacagggcggcggggcagaggtgctccccacatctcagacgatgggcggccgggcagagacgctcctcacttcctagatgggaaggcggcggggaagaggcgctcctcgcttcctagatgggatggcggccgggcagagacgctcctcactttccagactgggcagccaggcagagaggctcctcatatcccagacgatgggtggccaagcagagacgctcctcacttcccagacggggtggcggctgggcagaggctgcaatctcggcactttggggggccaaggcaggcggctgggaggtggaggctgtagcgagccgagatcacgccactgcactccagcctgggcaccacagagcactgagtgaacgagactccgtccgcaatcccggcaccccgggaggccgaggctggcggatcactcgcggctaggagctggagaccagcccggccaacacagcaaaaccccgtctccaccaaaaaaaaaaacgaaaaccagtgaggcgtggcggcgtgcgcctgcaatcgcaggcactcagcaggctgaggcaggagaatcaggcagggaggctgcagtgagccgagatggcagcagcaccgtccagccttggctcggcatcaga

SEQ ID NO: 28559 - DNA, 1420 bp, Artificial sequence
  DNA replication origin
cagacccttccagcccgaaaacctcgccccagcgccccggggtcccgggtacccttctcagggggcggggctgcccctgcctgcccagcgccttcaaacccgggccctgggagcgcggccagcgaacgtgcgacaccagccctgggcccctggggccggcttgggagggtgcggcacggagtccccagcgggaccccccacgcgggtcacttggttcggcccggatgccccccatatggtagatgccagccccgtctgcgcgcccgcgctgtgatggaggctgcggacgtgcgccgcggggcctccgcggactgagtaggctggggtcgccccacttaccgcggggccggagccagggcccgggtcccagcggaagggctcgaacagtccactcgccaggcgcccagccgcctgcgccctccgccgccgtgacgtcgcgtgggcggcagcgcccgctgggtcctgggagttgtagtttggtctgaggacgtgccgtcccgggcgcccgcgcatccaggccacgcccttgctcccggaccccaaacagcaccgcttcctccacacggctctcgaggctctccgtgtccctcccagcctctatctcctgctctatgaaacgggctccctgggagctggaagatcttagatgtaaagcgcacagatcacgccctacctgactccttctcggagctcttgtcctccttccagttcttggttcatttatgggtaaccaggcttcaaaccccagctcgaccccttaatatctggagcaagttatttaactgctcagtgcttggtaagatgaagagatatcatcagttttggggttgtgtggattacatgaatttatatgagtgcctagaacagtgccaggcgtggaattagcactatataagggttaggcattattattattcactcatgcctgcagataatgcaagtcgctgactgggtgtcttttctgcaccaggagaggagattgggcagtgagttgaatagatctttccgtgccctgcataagaaaacagtttcagtatcattggctgtgatgaggactttcagaggaggctgcgggagcctcagatagaaactgagacagctgtgtaggtgcagcctgagtaggacttgcaagggagcggggtgggaagggtgtgtggcaggacagacaacagcccagatggtctgaggatatggctggagccatatgggatctgggaaggagaggggcggcagcagagagcgaaggataagtctgcatttgtcctagggtagttaggaactactgaagggttttaactggtgggctctcctccttagacagaaccccttgtctgcagtgatttagagtggggcgtttggtgagaccaaaggcagagaaaccaataagaagacaattactttaggccaggcgcagtggctc

SEQ ID NO: 28560 - DNA, 914 bp, Artificial sequence
  DNA replication origin
tgcgcgggcgcccgggacggcacgtcctcagaccaaactacaactcccaggacccagcgggcgctgccgcccacgcgacgtcacggcggcggagggcgcaggcggctgggcgcctggcgagtggactgttcgagcccttccgctgggacccgggccctggctccggccccgcggtaagtggggcgaccccagcctactcagtccgcggaggccccgcggcgcacgtccgcagcctccatcacagcgcgggcgcgcagacggggctggcatctaccatatggggggcatccgggccgaaccaagtgacccgcgtggggggtcccgctggggactccgtgccgcaccctcccaagccggccccaggggcccagggctggtgtcgcacgttcgctggccgcgctcccagggcccgggtttgaaggcgctgggcaggcaggggcagccccgccccctgagaagggtacccgggaccccggggcgctggggcgaggttttcgggctggaagggtctgaggggctcctcccccgacagccctcccaccgccagtagagcctcgggttggggaatagaagcccccgggaggctaggtcctttgggcgcggcctgtgtgcatctggggagacggtgggagtggtggggagaggtcgcccgggtctggggagaccgatgcacaggtggagagatggtgcgggttctgtggattcggatccttacaacttcctcttccccgccccggtagatgggagctgctctccgcgggctgagcctgtcagcatcctcgacgcaccctggtccctgaagtcggagaagagcccctacccacccacacccccttgccccattttgggtcgcctgggtcctcagtcctagcggatcctcagtcctagcggccaccgggtctgaaaggagcaag

SEQ ID NO: 28561 - DNA, 2747 bp, Artificial sequence
  DNA replication origin
accgccagtagagcctcgggttggggaatagaagcccccgggaggctaggtcctttgggcgcggcctgtgtgcatctggggagacggtgggagtggtggggagaggtcgcccgggtctggggagaccgatgcacaggtggagagatggtgcgggttctgtggattcggatccttacaacttcctcttccccgccccggtagatgggagctgctctccgcgggctgagcctgtcagcatcctcgacgcaccctggtccctgaagtcggagaagagcccctacccacccacacccccttgccccattttgggtcgcctgggtcctcagtcctagcggatcctcagtcctagcggccaccgggtctgaaaggagcaagacgatgatcctggcgtcggtgctgaggagcggtcccgggggcgggcttccgctccggcccctcctgggacccgcactcgcgctccgggcccgctcgacgtcggccaccgacacacaccacgtggagatggctcgggagcgctccaagaccgtcacctccttttacaaccagtcggccatcgacgcggcagcggagaaggtgcgcaagggggcagccagcccagggtccgggatgtaggcgggagggagagtgttgggggttctctgctcaaggcctctctccctctctagccctcagtccgcctaacgcccaccatgatgctctacgctggccgctctcaggacggcagccaccttctggtaagattcacgccctctattttcctcgtggatcctggagctctcccagacactcaggctccagccccgccttcccttctcattttctcccagaaaagtgctcggtacctgcagcaagaacttccagtgaggattgctcaccgcatcaagggcttccgctgccttcctttcatcattggctgcaaccccaccatactgcacgtggtaaggtagagaggaccttaggtcagcgggccaccctgccccgggggcaagtggggagtctggggcccagagtggcagacgattgcttgcctaaaggtgtcagggccacacaggattcaaccccaggccttcagaagccaaaggtgtgtattcacggagcctggaagggtcgaagtgggggtttgatcacgtggtcgaccagctgggtggtgatccccatgggtaggtgggggtggctgttctctgctcagtgcccatgcggctttgtgaattcccacacctcttccttgcagcatgagctatatatccgtgccttccagaagctgacagacttccctccggtgagtgctgggccagagcagggtgaggggctgagaggttgggcttggaccacccttcctcatgactctgtgacctgcagatcaaggaccaggcggacgaggcccagtactgccagctggtgcgacagctgctggatgaccacaaggatgtggtgaccctcttggcagagggcctacgtgagagccggaagcacatagaggttggggcagcaaaggagaggccgggcctgctgggggtgggaagggcacgggattctgagacctcactctttacaggatgaaaagctcgtccgctacttcttggacaagacgctgacttcgaggcttggaatccgcatgttggccacgcatcacctggcgctgcatgaggacaaggtggggctctgggacctgagacccacctgggaacattaagtgagacagaggagactgggctggggatccgggtcaagggcctgggggctgaggctgtggggctggtgctttggggcagttccgaagttgccagcatcttggggtggggctaggggcgtgggtagtcctgacctcctttctccggccagcctgactttgtcggcatcatctgtactcgtctctcaccaaagaagattattgagaagtgggtggactttgccaggtgaggcaagaatggctcagggggtgggcagacatctggggcagggaaggcttgggtctgagcccttgcccggggcatgatctgcggggagcagggtttctcaaccatggcactattgacatttccagccagataattctttgtcacaggggctgccccgtgcacgttaggaagttcagcagcatccctggcgccagcagtactgcctagttgtgacaaacaaaaatgtctctgcacattgccatatgttacttaggggggcagaattgtttccagttgcaaaccactggtggaggggcccctgactgaaccctcgctcctatccgcagacgcctgtgtgagcacaagtatggcaatgcgccccgtgtccgcatcaatggccatgtggctgcccggttccccttcatccctatgccactggactacatcctgccggagctgctcaagaatgccatgaggtggggtggcttgatgtgctggcttgggggcggacaggaaccggggtgcttgtacctactggtctttcccctctgcatagagccacaatggagagtcacctagacactccctacaatgtcccagatgtggtcatcaccatcgccaacaatgatgtcgatctgatcatcaggtttgccctgagtgggagttgagctgaggtggatgggatgggggtctaggcactgtttctgacttgatttaggaccttgagccccttcctgccccattctgggacttggtccctgaccagacaaactattctctgaatcctgagatggccatgagctgcttattaatggatctggggccagctgcaggcctaggtatcctgcc

SEQ ID NO: 28562 - DNA, 1104 bp, Artificial sequence
  DNA replication origin
aaaccaggagctccaagactgccgcacactcaacatccaactcgcggggccgcggggacggccacagaagccaatcggctcctgctacatcacagaccccgccctcaaaccttgaggagcccgccccacgcactgctgacccggagccaaaagaactgcgtggcgtccgattctggcgtcacttcccttcccgcgatggcggcacagggagctgctgcggcggttgcggcggggacttcaggggtcgcgggggagggcgagcccgggcccggggagaatgcggccgctgaggggaccgccccatccccgggccgcgtctctccgccgaccccggcgcgcggcgagccggaagtcacggtggagatcggagaaacgtacctgtgccggcgaccggatagcacctggcgtgagggcggggcccagggctgggggcggggcggagctcagggccagggggtggggcggggcctgaggacaggctgtcagtgaggccaagatccgggggctgggagtggagaggaggaggggcggggcttgaggaaagaacgccgcgttccgggcgctgagaaaccagccgggttgtgggaggctgttgaccttgaattatgccgagcgacgcctacaaacccaccgctcaggccttcaccaggattgttcccattccacttccttgcccagtcttaggcttcattcctttttcttgctaacgctgcttcctcaccctctcttgtctctgcgtcttctttttccatttgtccctggcagccatccgcagagagaagaccttccagaaacaacaggcttccctttcctaaagttctgctgccttctctcattttcaaaattaaccccaaactccttagggtggcattcatttttgtgacctctccagtttctagccaacactaggaaagggcattgccaggccagaacacactgtgccctctgaagaccacacgccctttaccacctgtgccctttgcttggaatgctttttcttccctttctccttgtttgcctgcctagctcctactcatcctcttagcttcatatcctttgtgatgtcatccttgattccccttcaggcaaagtgagtggttccct

SEQ ID NO: 28563 - DNA, 1728 bp, Artificial sequence
  DNA replication origin
cccgaacagctccgacagcccaccccgcgacctcgacgcctggcgcgtgctgctgccctcgcgcccgcgcgcggagcgggtggcgcgcctggtgcagcacgagaacgcttcgtgggacaacgcctcggacctggcgctgctgcagctgcgcacgcccgtgaacctgagcgcggcttcgcggcccgtgtgcctaccccacccggaacactacttcctgcccgggagccgctgccgcctggcccgctggggccgcgggggtgagctggggaccggcgctgggccgggcggcaccgggcggtgcaggggccgtctgggccgcagcgcgggctccctgccttttcccttccagaacccgcgcttggcccaggcgcgctgctggaggcggagctgttaggcggctggtggtgccactgcctgtacggccgccagggggcggcagtaccgctgcccggagacccgccgcacgcgctctgccctgcctaccaggaaaaggaggaggtgggcagctgctgggtaagcggcgggggcggggcccgcggaacgcgggcccgagagggctctaggaagagggcggggcctgtggaaggcgagtccaagtgggctctagggagagggcggggcctgcggaaggcgggtccgagtgggctctagggagggagcggggcctggggaaggcgggtccgagtgggctctaggaaggggcggggcttgcggaactgggaatggggcggagccggggtggaagcggggccagaacgagctgggggtggggcctgcccctagagaacttttgggagggagctgaggcgggctctgagctggtgctatggtttctctctatctctggatttaaggagaatcttaaagtgagggctgaattcttacacaaattagtatttggagtctgatttggagaaggtggaacttgatacttccgcaaatgggaaaatctggagtcctggaaagccccaggagctctgatattctctgcacacacgcagaggcaagtaacacacacactttgttgctgcagaatgactcgcgttggagccttttgtgccaggaggaggggacctggtttctggctggaatcagagactttcccagtggctgtctacgtccccgagccttcttccctctgcagactcatggcccatggatcagccatgtgactcggggagcctacctggaggaccagctagcctgggattggggccctgatggggaggagactgagacacagacttgtcccccacacacagagcatggtggtgagcaggacgcttttgggccctaggggctcctgggagtgcacagacccatggcaggggctcaggggtcagccatggggccccaactgaggtggccacctcctctccctagcctgtggcctgcggctggaggctgctccagtgggggtcctgtggccctggctggcagaggtgcatgtggctggtgatcgagtctgcactgggatcctcctggccccaggctgggtcctggcagccactcactgtgtcctcaggtgggtctcactcgtctcctaggcgagagacgggaggggagaatggaacagagccaaagacttgtttttgttatttgtttgtttgtttgtttaaaaaaaattaacaatgagatcttgctgtgttgcccaggccagcctcaagcaatcctcctgccttggccaacgtactaagattacaggcatgagccactgtgcctcaccca

SEQ ID NO: 28564 - DNA, 1722 bp, Artificial sequence
  DNA replication origin
caagtagctgggattacaggcatgagccaccatgcccagccaaggccgagtgaatttaaaaaccaaagacagcatagccaggagcagtgactcatgcctgtaatcccagctaatcagaaaaattgaggcgggaggatcacttgagcccaggagtctgagaccagcctgagcaacatagtgatacctcatcccaaaaaaagagacaaactggctgggcacaatggctcacgcctgtaatcccagcactttaggagaccgaggcacgtggatcacttgaggtcgagagtttgagaccagcctggccaacatggcaaaaacccatctctaccaaaaatacaaaaattagccggctgtggtggtgtacacctgtagtcccagctactcgggaagctgaggcaggagaatcacttgaacccgggaggcagaggttgcagtgggctgaggttgcaccactgcactccagcctgggagacagagcgagattccgtctcaaaaaagaaaagaaagaaagaaaaagaaagggaaggaaagaaggaaggaagggagggaggggaattatttgagctagtaacaacaagaatcacttggctctaatgacaactgcaggattatcttgtgtggctttgaatgcactcccctggtgctcttggctctggctgccatcggccttctgcttacagggatttcttctgtttagagccgcagggaatgcagaggacaaggcctagccaaggagggtttctaggagaagggagaaggtggtgtatgttgggccaaaaggaggtgcaggaccttttcgagtaggtccctgggctgaccccttgacatgcagtcatctgccactagggtgactctggggggcccctggtctgtgaggaaggcggccgctggttccaggcaggaatcaccagctttggctttggctgtggacggagaaaccgccctggagttttcactgctgtggctacctatgaggcatggatacgggagcaggtgatgggttcagagcctgggcctgcctttcccacccagccccagaagacccagtcagatccccaggagcccagggaggagaactgcaccattgccctgcctggtgagtgggcggcacccctggatgtaagcgggacatgggagagtgagttgggatggagactgctgggagtgattgggttgcaggaggcccactgacccaggcctctcacccctcagagtgcgggaaggccccgcggccaggggcctggccctgggaggcccaggtgatggtgccaggatccagaccctgccatggggcgctggtgtctgaaagctgggtcttggcacctgccagctgctttctggagtgagtgaaaatctacgtttcaagccgatccttgcccctccctacagcctgagataccatccattcggccccagcccctccccagggggtgtggggggggcggggtcccattcggaggtgtaggatccagcacaaaaagaggggtcctggcctggcaggggtgggtagaggcatggtagatagaagttcgatcccggaggcgggggtgtgagtgagctgttggaatgggggtgtcgtggggatcccgccaggatgcaggatcctcgcctggcaagtctaagccggggtgtgaggtttccagccacgtgtgcgggatccggcccacgtccctcggcccccatcccgcagcccgaacagctccgacagcccaccccgcgacc

SEQ ID NO: 28565 - DNA, 1054 bp, Artificial sequence
  DNA replication origin
gtgtgggtgattccgtggtcttagtttgagaatccttgcagggagaaggctacatggagatcggtgtgggattcatccaccgacccgcagaaacctaccctccaacgctccccgcaggctccgctccgtggccccacctcctgaggccccgccctaggaacctcacctctcgaagccccacctccccgaggccctcccctcttgtcccgtcccactcacctgcctcctggacgtctccccagccggtggcccagcaggcggtgccgtgcacgaagcggtgtgaggcgcggggcaggcagacaggccacacggcggggcccaggctggcgggtgaggccaggcgcagcagggccaggtcggcgcccagctccacttggctgtagttggccggcaccacgatggcggccactgcgcgggtgtgcgcgccgtccaggggcccgtcctgggagtgcacgcccagcagtaccgaccactcggccgcgggctccagcgtcccattcctgcgctcgaccggggcagtaggaggttaggttgaccctatggagggggcagaccctcgttgggggcaggggctcagagccagaggggcaggtgctatccgatccagatttggtgctgatactcctcaaaggggaagagcaaatccgatttggagctggtggtgggggggtcattggaaagatgggattcagacccggatattgagtggagtggtgggaccagtccggcagccttgccccactcggaaccatgatgcctcgaatagcacctcgctttggggacagcttggctccaaattatccttgaggacggaagtggggcgggaggaggggaccaactgcgggggcgggggccagcttttggcggagaggggccaggaccagggcgaatactcacgtcatgaaacagtgagcagcggagaggacccaggagggggcgatgagggagcccccgcagatgtggccacctccatggtgcaggctcacttgccaaggccaggtgcccggctgcgcgtttgagccccccacgatgcgggccgagggctcagggcgcc

SEQ ID NO: 28566 - DNA, 1266 bp, Artificial sequence
  DNA replication origin
ctagggctcctgtcccagacctggccagcagctccagtaaccagagctgtgtgagaagaaaaggccaagccactggggcagccgcaccccaaacagaggtgaggtctccgatgagtcatgcccgtgaggggccacttcccctgtcctaagggccactgctcaccaaggacacagaacactgtcctcctctttgacctttgcctgcagtgtttttcatccctccctctcccacccaacaggtgtccaggagctaggacacctgtcctccacccccaccctgggcctccagagacatgagatgtgcgcagggctctgggtggggccttcaggctccccagcttcccccttccagccccagatcctctcagattcccagagatgggctccagccagggagggtggggctgcccctgggaccatcaggagtcacgggctgcctgggcagtgacagagccctgcagggagcagaccttcacttggctctgcctccgctgactctagcgccatggcccggcacctgctcctcccccttgtgatgcttggtaacctcaggggacaagagtggctgcaaagggcctgggtcctggcatctggggggctggagagcaggattcctggtttctgtgtggggagcaggaagtcagagagaaggaagtgaggcagcagaaggcgaggatgtatcagaggagggagagggaggcctgggtgccctggggagacggaggctaggaggctgggggagggagtcagggagggcacatactgagtgcgagtcgccagcctcttcctgcctacctctgtctttccagtcatcagtcccatcccaggagccttccaggactcaggtaaggtagccggactgggggaaagtcacgtgcagaggcagaaaagaccagaggactggcatgggtgctggcaggggttgctgaacggacagggaagtgggaagatagggtcgggggttggagagcaggaagtggggctgggcggtgcaggcctggaagtcacaagtgtcctcctctctttcccctctggctcccagctctcagtcctacccaggaagaacctgaagatctgggtaaggaagaggccttggcaccctcagaccttaaaggaggctaaggctggtcaggccatgagggaggtggaaaagaccagaaatgtagacaagcctgggtcctctatgttctttgttcagaggggcaaactgaagtgggtggaggacgggccttcgtcctgagttacctgggcttctggagtggggaa

SEQ ID NO: 28567 - DNA, 1022 bp, Artificial sequence
  DNA replication origin
acagagggggatttggcaggccgccatcccacctaggaagtgaggagcgcctcttccccgccgccatcccatctaggaagtgaggagcgtctctgcctggccgcccatcgtctgagatgtggggagcgcctctgccccgccgccccgtctgggaggtgaggagcgtctctgcccggccgccccttctgagaagtgaggagaccctccgccaggcaaccgccccgtctgagaagtgaggagcccctccgcccggctgccaccccgtctgggaagtgaggagcgtctccgcccggcagccaccccgtccgggagggaggtgggggtcagccccccgcccggccagccgccccgtccgggagggaggtggggggggtcagtcccccgcccggccagccgccccgtccgggaggtgaggggcacctctgcccggccgcccctactgggaagtgaggagcccctctgcccggccaccaccccgtctgggaggtgtacccaacagctcgttgagaacgggccatgatgacagtggcggttttgtggaatagaaaagggggaaaggtggggaaaagattgagaaatcggatggttgctgtgtctgtgtagaaagaagtagacatgggagacttttcattttgttctgtactaagaaagattcttctgccttgggatcctgttgatctgtgaccttacccccaaccctgtgctctctgaaacatgtgctgtgtccactcagggttaaatggattaagggcggtgcaagatgtgctttgttaaacagatgcttgaaggcagcatgctcgttaagagtcatcaccactccctaatctcaagtacccagggacacaaacactctgcctaggaaaaccagagacctttgttcacttgtttatctgctgaccttccctccactattgtcctgtgttgctcttttctagttggtccaagcaggtcttttcttagcacaggccaattatctgcccagcatttactttcccagtctgtgtaccatgacaacctctcct

SEQ ID NO: 28568 - DNA, 1227 bp, Artificial sequence
  DNA replication origin
gcacgttagcggtgagctcggcgccgtaggtctccaggtagaagctgaccagcttgtcggtgaggtccaaggcgtccatggacagcagcgcgccccgcgggatgcgcccgtagccctcgcgcagcggcaccgacagcagcttcagcttgaacttcttgagctcctcggcggtcaggttctccagcgcatccaggatggcgtcgcgcgcgcgccccatggctccaggatccccggccgctgccgccgctcaccccgctgcagccgccgaccaggaggaagtcggctccggggcggaacctggactccccgccttcctcccactctggtctcccgactccccgccccggtccgttgccctccagcaaaaggcgcttccttactacacccttggtcccctcccacccaggcctctggattggggccccaggccgtcgggggacgccaggatcgcgccctccagctggcctgcgaggtgggacccgggagggggccgcagaggggctcatgggtggcgcctgcttgtctctgggcttgcaccagcgggtacagaccggaaacctgggctggctctcactgggtttattggagcacctaggcttagaacctcggatttctagaaccccgaaacctccgcggttccccgaaccttaggatcctctcccacatgtcgtagaatcttggaatcatgacagctagaagcgtgaagctccctcaattccacatactggggaaaaatgagttgtacaaaagggcagagagtgcaaatctctctgagcttcagtttcattttctacgacatggggataaccctccggtgcttataaatattccagcataacatggccaacccgatggctcccgaaaccttgccagatgcttcctaggggagccagaatttgatcccaacactgattaaaaaaaagaaaaaagaaagagagacagcctccaggagattaaagaccatgaacttgaagccatacagttctttgtttgaatcctgactctacttcccaagggggatatttggaatcctttatttttccctctcatctgggttgtaacaatcactgttccttgtagtcatacgaccctgacatattatacgtttatatgcttattggacattcatccctctctaaaatgtgaggcctatgagcatcggagaccttaactgtcttattctttgctgaattcctagcgtcaagaatgtacctggaaatagctgtg

SEQ ID NO: 28569 - DNA, 831 bp, Artificial sequence
  DNA replication origin
gaggttgcagtgagccgagatcacgccactgcactccagcctggcaacagagcaacactccatctcaaaaaaaaaaaacagagagagagagaaagggaaaaacaaaagaaggaaaggagggaaggaaggaaggaggcatgcgaaggactgcagactaaaggcttatttctattatttattagaagaggtgactcctaggttgggtgtgttggctcacacctgtaatcccagtgctttgggaggccaaggcaggaggatcgctgagcccaggtgttggagatcagcctgggcaacatagccagaccccatctctacaaaaaaattaaaaaattagctgagcatggtggcatgcacccgtagttccagctacacaggaagctgaggtgggaggatcgctggaacccaggagttcgaggctacaatgagctatgattgcgcactgcactccagcttgggcaacagagtgagacctcatctctaaaataaaagcagaaaagaaaaagtgatgcctgatgaacgtcagaagacaggcaggaactcaccaagtagaccaggaggaaaaagaggccaagcagagagcagctcccacaggggcggaggttcacggatcagcaagctggaaggggcagctgaagaggttggcaaggaccttgaaggccaagccaagggcttgggacttgagtttgagggcactggggagtcatgagggggtctctgagccaggcaggtgcaggatcatatgtgtgggttaggaagatgtatccttctggccacagtgcacaaaaggaaatggagattctggaaggataaaggccagtgagaaggcatgat

SEQ ID NO: 28570 - DNA, 1417 bp, Artificial sequence
  DNA replication origin
cggatcccgcaccttgaggcgtgcgtgggcctcggcggcaggcaggaggcgatgaccgcggtgcgagccgagtgaggcgcacactccgcacaccagcgcgcggtcctgctcgcagtagatgctcagcgggtccaggtgctcctcgcagtggccctgcggcacctgggccagcccctccaccaggcgcgccagctgcaggttggtgctgagtgcctgcggccgcgtgggggcctggcagcaggggcagagaacggtgccatccgccgccggctccccggccacgcggcctaggcaggcgcggcagaaactgtggccgcactcggctgtcacgggcgcgtcgaacagctgcaggcacagcgggcaggacagctcctggtgcaggaggccgggcgcagccgacatggcgggcctgggtggaggaggagtaggttagggggaccccgcggcgccgcgctcccggcccagccctggcccagccctagcccaggccgggcccgccgccccgcagggagaagccccagcctgtaaagacctcacatcctacactggatgggactctgacggccaaggggaaagaggaactcggtctcaggcccaaaagcagcctccactgcaattctcagctccaaccccaaaaatatgccctatcagtcaaccccagttcctgaacacaagcccagattctagcccactgtccttgccctcgccttagccccaggcctcagcctctgaccttagtcccggacccaaattctccagagcccccactccgagactcccctccctcactttaccaagatacccagacctcccctccccctctctccagcccacgggactcacaggtctggttggagatcttaggctgaaagagtctcgaaggaggaccggtcagggttgagcttagctggactggggtcagggctgggtccaaggatctgagacaagcagcaggctccaagcaaggacagggactcacaggggcagctggcagtggacaccacgcgtgatgggcacacagtgctcagcggaagaccctcccagactgagccatggccccaggactatatttagctgccctgcccaatccctcccatcacttccggaaaccgttctaaaagtgagggctgagtagtccctgggcacacatcacatgacagggccacctgtcttggcccatccactgttctctccccggcctgcctggagtcagagctcagagccagcggggagccagggcctttcacaccacagaaaagacagaaaattgaagggggtctgccctttctccccccactcccacctccacactctccagctccttcctccttgctggcagcccctccccagcctgtcacccactcattccccaagtttatggctgaccaaggtcaccctggcaggattaccccacctg

SEQ ID NO: 28571 - DNA, 1226 bp, Artificial sequence
  DNA replication origin
cacggggccgatggggaggtcgctgcagtgatttggattctgagtctctagagaggctcacgagctcctggagttgcggggggcgggggcggggcgaagcagccaggaaagagggtctgaggagcttaaggcggggctggcagaggaaagccgcgcagggatggagcctggcgataagggcgctgagcaaacgtaggtttcccggccttagtccctagaggaaactggagatgggcgggcggagccccagggcgggtctgatgggccgggcggagccaggcggagcagggactgaccagcccctgcggcccacgctcgcattcctgcacccggtgggccgttcgggctggctccctgctcggcgctggcccactttggactggaggcgcggcgttcgggaccgagccaggcggccggggcagggttgtccccttgtgctcagcggaggcccacgcacccctgaagctgcggaacttgggctggcctgacggtccccaggcggggcctcaccagaagggagactgtaagggctaggcagccgggatctgcacttatgtgtgcgggcccagggtggcaccgagagccccgtccaggatgtttttctgggtggagctggaagtcccgaaagccttgggagcccacacgcagttgtgcgcgtcccgaagtacccagcagagacacccagacagaggcaaatagagacgaacgcacactggctggtgcgtgtcatccgtgtggcaaaagcacacacgtatagctaccggcgggcacgtgtgcgcgcagccccagtaaagtctgccatgaatatttattgggcagtggaagaataaatgacaggtgcaggggctggaggaggcggggtctggaggcacggaggcgtccttggtccccgaggtggagacactgctgttgtcttacgcgactggtgcgcgcgtggggctggcttcacaggcgttgcattactccttttgccttgacccgcctcctagaaggggtagaccaccgtcctttcgttggtattcgaggcccccagacttcccagggacccagcctctcagtcctgcctggcccagttcagcccagtcctagctggtggtctcctagctcagggcaggagcctcctcccgggacccctcccatcccagcacacctgtgcttaagaccccaacctcagggcaacccgctcggatccccttccatgctgtggaagctttgttcttttgctc

SEQ ID NO: 28572 - DNA, 1068 bp, Artificial sequence
  DNA replication origin
gggaggggtcaacaaaacagacaaggggctgggggtgtggcggttcatgcctgtaatcccagcatgctgggaggctgaggtgggaggattgcttgaggccaggagttggagaccagtctgggcaatatagtgagattgtctctacaaaaatattttaaaaaatcatggccaggagtggtggctcatgtctaatcccagcacttcgggaggctgacgtgggtggatcacctgaggtcagaagtttgagaccagcctggccaacatggtgaaaccctgtctctactaaaaataccaaaattagccaggcgtggtggtgcaccaaaattagtcccagctacttgggaggctgaggcaggagaatcgcttgaacccaggaggtggaggttgcagtgagctgagattgtgccactgcactgcatcctgggtgacagagcgagactccaactcaaaaaaaaaaaaatcagaaaatttgctgggcacggtggtgtgtgcctatagttccagctacttgggagactgaagtgagagggtcaattaagcctgggaagttgaagctgtagttaactgtgatcatgccactgctccagccagggcaacagtgtgagaccctgtctcaaaacaaaacaccaaaataaataaataaaaaaccgcaccaaaatagacaaggggcaggggaagcattcggacctcaggagtagcactggctggggctgggaggcatgtaagtgggtttggggatgggaagatggctggaggaggagctggcattgaggttgagccacagagggcaggtttaggatgggaggtgtgggttttgggtgggtggcatccccatcacttctccatgcctcgacccccagacacagctgccacagcagaaactgcagctgcaggaggcatgcatgcgcaaggagaagagtgtggctgtgctggagcatcagctggtggaggtggaggtgaggacttcacagggccatgtctgagggctgggggccaggctaggggtctccagccaagagtctttatcccttcaatcactgccccatccctgcaggagacagtgcgtca

SEQ ID NO: 28573 - DNA, 1679 bp, Artificial sequence
  DNA replication origin
ttttgtatttttagtagagatggggtttcaccatgttggccaggctggtctcgaactcctggcctcaagcaatccacacaccttggcctcccaaagtgttgagattacaggcatgagccacctcgtctggcctcttttagcttttctgattctttctgacgttgcactcagcattcctagttgtctaccccatcctcaaaagtttccagtgtccccaccatcggcttcaccaccattctctttttctctctctccagaaatactgcctggtgaccagcaggtgagagcaacctggccctgtccctttgcccgacttgtcccagtcttctagggacaccagccggctcactctccactcactattgtgcctgcacacccgcaattcagtctgctgccccacccctgcctgaacacaaggttgtagacagaaatgatctggaaggatcctttcactcagggacctcctagattggtgccgtgagacacatgtgggtggggacacaggcgtcactgtgtgctcagtgtggccgttgagggaaagaggtggccagggatggagtgaatgtttgagttggggcctggagggatgaacaggagctggctaggcaaagcgttgggagaagaagggcattgtgaggagaaaggcattgcggggagaagggcattgctgagagaagaagggtattgctgggagaagaacattgctgggaaaagaagggcattgctgggagaagggcattatggggagaagggcattgcggggagaagggcactgctgggagaagggcattgctgggagaagggcatttctgggagaagaaggacattgctgggagaagaagggcattgctgggagaagggcattatggggagaagggcattgcagggagaagggcattgtggggagaagggcattgtggggagaagggcactgcggggagaagggcattgctggggagaagggcattgggagaagggcattgctgggagaagggcattgctgggagaagaagggcattgctaggagaagggcattgctgggagaagaagggcattgtggggagaagggcattgcggggagaaaggcattgctgggagaagaagcgcactgtggggagaagggcattgctgggagaagggcattgctgggagaagggcattgcggggagaagggtattgctgggagaagaagggcattgcagagagaagggcattgtggggagaagggcattgcagggaaaagggcgttgctgggagaagggtgttgctggcagaagggtgttgctgggagaagggcattgctgggagaagggtgttgctgggagaatggcattgctgggagaggggacagccagcgagagggctggcgagtgggagggaagaggaagctgcggtagtaggtgtgtgcacactggcgaagctgagaggcttggaccttatcccaacagaaggattaaaagaaaatgtagttgggccgggtgcagtggctcacgcctgtcatccaagcactttgggaggctgaggcgggcagatcacctgaggtcagcagttcgagactagcctggccaacatggcaaaacctcacctctactaaaaacacaaaaattagccaggcatggtggtaggcgcctataatcccagctacttggttggctgaggcaggagaattgcttgaactg

SEQ ID NO: 28574 - DNA, 954 bp, Artificial sequence
  DNA replication origin
gacccacgagcagcagcggctgggcattcttgcccttgtcgtgccagcacacgtcgaagaaggggtacacgggcctgggcaggcgctcgtggaaggcaaaaagcggcacgagcgcgtcggcgtcgctggcatcgtagaaggagaggacgccgtcgccgaagctcaggtaaaggccaatgcgcgtgggccgcctctcggggctgcgcagagcgcgcggctccttggcctccacgtgtgcctccaggatcttgccctcgcgcagccccagcagccacaggccctgcgagggcaccgcgtgcaggcgcccgcggcggggggcctcggccgcgatcacgcccagcgcccagcgcggcttgtcgccaacatccacctcccagtagtgctcgccctcggagagctgctggtgcgccaccaccgccaccgccttgtcgaactggcgcgggtcctccccggccggcggcgccttctgctccgagcactccacgcggcggccagaggaagacaccaccaggctcgggtgcgcagagctcgggtcaaaggtcagctcctccagcgctgccagagagaacacggtcagaaaaccctaggtttctgcctcgctggggtcttctcccaaccaattgcaggccagctttctctcccctaatcctcttggcatctctgctcactgggcttgggccacaagatcacacctggctcaacttcagtttgcccagctgtgagatgaggccatgattgcttccctccagggttgcaggcaggcctgcattttctttttgtttttgttgttgttattgttgttgttttttgtttttgttttttgtttttttgaggcggggtctcactctgtcgcccaggctggagcgcaggtgcaacctaggctcactgcaacttccaactcccaggctcaagcaatcctcccatctcccatctcccaagtagctgggactacag

SEQ ID NO: 28575 - DNA, 1312 bp, Artificial sequence
  DNA replication origin
gttcgacaaggcggtggcggtggtggcgcaccagcagctctccgagggcgagcactactgggaggtggatgttggcgacaagccgcgctgggcgctgggcgtgatcgcggccgaggccccccgccgcgggcgcctgcacgcggtgccctcgcagggcctgtggctgctggggctgcgcgagggcaagatcctggaggcacacgtggaggccaaggagccgcgcgctctgcgcagccccgagaggcggcccacgcgcattggcctttacctgagcttcggcgacggcgtcctctccttctacgatgccagcgacgccgacgcgctcgtgccgctttttgccttccacgagcgcctgcccaggcccgtgtaccccttcttcgacgtgtgctggcacgacaagggcaagaatgcccagccgctgctgctcgtgggtcccgaaggcgccgaggcctgagccgccggacgggtagtggaggggcgcgggggcctgggttgaagcttaggtctccttggtcgggtctgacgggagaagggtggggagcgggttgccagggcccagggggctgggaactgggggatctcccagaatactgacaagcgtggggtaggactggcttggtggctcatgcctgtaatcccagcactttgggagacggaggcgggtggatcacctgaggtcaggagttcaagaccagcctggccaacatggtgaaactcctctctactgaaaatacaaaaatgagctgggcgcggtggcatacgcctgtaatcccagctagttgggaggctgaggcaggataattgcttgaacccaggaggtggaggttgcagtgagcagacattgcggcactgcactctagcctgggtgacaagagtgagactctgtctcaaaaaaaaaaaaaagtgtgggggttggcatggcctggggactgctggtgaggggttggagtgacgctggggacaagacccagtggggtagggagatctggagtcaggtcagtggggaaatcagaatttgggaaccaggaggcctgagaattccaggaagaaactaaggttgagcgagggagggacagggccaggttgggggattgatgggaggagcttgagaacctgtagataaggggctccttttgcctcacactcccctcctccttaggccttgggtcccccgctccagattcaccttacccaaaagccttctccttagttctccaccttaggcatgcattaaaatcacctttttaaagcccttagccatgacttgttaaagcatagggtgctaagtttctgatttagtaggttggacagg

SEQ ID NO: 28576 - DNA, 1242 bp, Artificial sequence
  DNA replication origin
gcgcccctcacctcccggacggggcggctggccaggcggggggctgaccctcccacctccctcccggacggggcggctggcggggcagaggggctcctcacttcccagtaggggcggccgggcagaggcgcccctcacctcccggacggggcggctggccgggcggggggctgaccccccacctccctcccggacggggcagctggccgggcgggggggctgacccccccacctccctcccggacggggcggctggcggggcagaggggctcctcacttcccagtaggggcggccgggcagaggcgcccctcacctcccggacggggcggctggccgggcggggggctgacccccccacctccctcccggacggggcggctggccggatggggggctgacccccccaactccctcccggacggggcggctggccaggcggggggctgacccccccacctccctcccggacgaggtggctgccgggcggagacgctcctcacttcccagacgggatggctgctgggcggaggggctcctcacttctcagacggggcggttgccaggcagagggtctcctcacttctcagacggggcggccgggcagagatgctcctcacatcccagacggggcggcggggcagaggtgctccccacatctcagacgatgggcggccgggcagaggcgctcctcacttcctagatgggatggcggccgggcagagacgctcctcactttccagactgggcagccaggcagaggggctcctcacatcccagacgatgggcggccaggcggagacgctcctcacttcccagacggggtggcggccgggcagaggctgcaatcttggcactttgggaggccaaggcaggcggctgggaggtggaggttgtagcgagccgagatcacgccactgcactccagcctgggcaccattgagcactgagtgaacgagactccgtctgcaatcccggcacctcgggaggccgaggctggcggatcactcgcggttaggagctggagaccagcccggccaacacagcgaaaccccgtctccaccaaaaaactacgaaaaccagtcaggcgaggcggcgcgcgcctgcaatcgcaggcactcggcaggctgaggcaggagaatcaggccagggaggttgcagtgaaccgagatggcagcagtaccgtccagcttccgctcggcatcagagggagaccgtggaaagagagggagagggagaccatg

SEQ ID NO: 28577 - DNA, 1419 bp, Artificial sequence
  DNA replication origin
ctcttctgcagtgcatggatcaaagagtcattttgcctttcaagtcttttttttttttttttttgagatggacttttgttcttgtagcccaggctggcatgcaatggtagaatctcggctcaccgaaccgcctcctgggttcaagcaattcttttccctcagcctcctgagtagctgggattagaggcaccagccaccatgcccagctaatttttgtatctttagtagagacggggtttcaccatgttggccaggctggtcttgaactcctgagctcaggtgatccacctgccttggcctcccaatgtgctgggattacaggcatgactcaaccgtgcccagcctcattattgtcttcttttaagaaattcttttttttttgagatagagtctcactttgtcacccaggctggagtgtaatggcatgatctcagctcactgcaacctccgcctcctggattcaagtgattctcctgcctcagcctcccgagtagctgggattacagatgcccaccacaacgcccagctagcttttgtatttttagtagacatggggttttgccatgttggccaggctggtcttgaactcctgacctcaggtgatccacatacctcggcctcccagagtgctgggattacaggcgtgaaccacagcacctggcctaagaaattcttttaagaaattgccaccgccacccccaccttcagcagtcaccatccttatcagtcagtagccatcgacattgaggcaagaccctccaccagcaaaaagactatgactcactgaaggctcagatgatccttagcatttttagcaataaagtatttttaggccaggcggagtggctcacacctgtaatcccaacactttgggaggctgaggcaggtgaatgacttgcgcccaggcatttgagaccagactgggcaacacggtgaaatcccatctctactaaacttaaaaaaattagccagtcatggtggcgtgtgcctgtaattccagctacttgggaggatgaggtgggaggatcacctgaaactgggaggtcgaggctgcagaaatcacaccactgtactctagcctgggtgatggagtgaaaccctgtctcaaaaataaataataataattttaagaactcacatttttgagagtctgaaggcctatacaaatggccagcaccaatgcaaaattttgtggacatctctttttttttttttttttttttcccaaggcagaagaatttttcttagtacagaacaaaatgaaaagtctcccatgtctacctctttctacacagacacggcaaccatccgatttctcaatcttttccccacttttcccccctttctattccacaaaaccgccactgtcatcatggcccgttctcaatgagctattgggtacacctcccagacggagtg

SEQ ID NO: 28578 - DNA, 1020 bp, Artificial sequence
  DNA replication origin
caggaagcagataccagggacgggaagatcagggtgtgtttaagagtggcctcagcatgaaatgcagggctgaaggagttggtggtggttagatacaggccatgtcccaaaatgactgacgggtgttgtttgggatttgcagtttcgcctctgggagtgacataatcatatttgcatgttagaacgatcactcttcaggagggctggcgattggggtgggagcaggtgtgaattcaggggaccagttagaagaaggtggttgcagacatccagctggagagggatgggcctgggctaggcgggggcaggggttggagaacagtggggtttcagatgcagagataacagaacttggtggctgattggaggcagggagtgagggagagggaggagcaaagactaactgtcagttctcaagagccggctggagctctttctttccctccagtgagaacaacatgcccagaaccaacaaaaccgaattccaactggagctgccggtgaaatatgctgtctacatggtggtcaccaggtgctggcttccaggactttagctgagcctccacttctgggctggacatggctgattgtgcatctgtgtgcatgagtctgtgcatgtgtgtgtgtgtgagagtctgaggatctctgtgcatgtatgtgtgcatgggtgtgtatttgggcatgggtgtgtgagtgtgatgatctatgtgcatgtttgtgtgcatggacgtgtatttgtgcatgtgtgtgtctgaggatgtatctgcatgtgtgtatgtgtgcatgggcgtgtatttgtggatgtgagtgtgatctatgtgtgtgtgcgtgcatgggtgtgtatttgtgcgtgtgtgtgaggatccttgtgcatgggtgtgtatttgtgcatgtgtgtgtgaggatctatgtgcatgtgtgtctgggcatgggtgtgtgtgcatatgtgtgtgtctgaggatatatgtgcattgtgtgcatgggtgtgtatttgtgcatgtgtgtgtatgaggatctgtg

SEQ ID NO: 28579 - DNA, 755 bp, Artificial sequence
  DNA replication origin
tgagtctgtgcatgtgtgtgtgtgtgagagtctgaggatctctgtgcatgtatgtgtgcatgggtgtgtatttgggcatgggtgtgtgagtgtgatgatctatgtgcatgtttgtgtgcatggacgtgtatttgtgcatgtgtgtgtctgaggatgtatctgcatgtgtgtatgtgtgcatgggcgtgtatttgtggatgtgagtgtgatctatgtgtgtgtgcgtgcatgggtgtgtatttgtgcgtgtgtgtgaggatccttgtgcatgggtgtgtatttgtgcatgtgtgtgtgaggatctatgtgcatgtgtgtctgggcatgggtgtgtgtgcatatgtgtgtgtctgaggatatatgtgcattgtgtgcatgggtgtgtatttgtgcatgtgtgtgtatgaggatctgtgtgcctgggtgtgtatttgtgcgtatgtctgaaggtctatgtgcatgcgtgtgcgcatgggtgtgtatttgtgcatgtgtgtgtgtgaaggtctatgtgcatgtgtgtgcgcatgggtgtgtatttgtgcatgtgtgtgagggtctatgtgcatgtatgtgtgcatgagtgtgtattcgtgcatgtgtgtgtgtctgaggatctatgtgcatgtatgtgtgcatgggtgtgtatttgtgcgtgtgtgtgtctgagggtctgtgtgcatgtgtgtatgtgctcatgggtgtgcatttgtgcacgtgtgtgtgagtggcccaaatgggcacgcactgtgtgt

SEQ ID NO: 28580 - DNA, 924 bp, Artificial sequence
  DNA replication origin
ggctgagcttcggaaggcccccgtggtggtgagaagctaagtcagccccagggccacacagagacccagagcgcttccctgctggaacctgtatggtctctgagcaaacggggaggggtgttctctgccttcggcttccttacccgtcccctcccctcctgcgttccccagaactgctccatcgctgtctgccagagaatccagtgtgacatcccgttctttggcatccaggaagaattcaatgctaccctcaaaggcaacctctcgtttgactggtacatcaaggtgtgtggggtcctgaggcttcgccgggcacaggcgtggtgctcagggcccaggtgcagtgcccacccgctctcttccacagacctcgcataaccacctcctgatcgtgagcacagctgagatcttgtttaacgattccgtgttcaccctgctgccgggacagggggcgtttgtgaggtcccaggtacctgtcttgggcgctgaggaactattggagggagaggggctgcgcttgtggagatttctgggggaggagagagagacacaaagagagagggagagagagagacagagcgacagagagacagagagatacagagacgtaaggagagagacagacagagacagagagatagaggcagagggagaaacagacacagagacagacaaaggagagagagatagagagtcagagagatagagatagagacagagacagtgagagatggagatagacagagagatagagataaagagagagatacagagcgcgacagagacagagacagtgagccatggagatagagagacagagagaggcagaaagcgatagagagagatagaggacagagaaacggaggagggagaggagggagaagaggtgggggaggaggactgagggctggggttctgggggac

SEQ ID NO: 28581 - DNA, 923 bp, Artificial sequence
  DNA replication origin
agtgaaagaatggcagaatgttatccaggcaacacaaggatctgatagttccagtcccagtcacgattgcggctcagttatgtgcctgggaaagagcatttgctgcaatggttctaagctgagggtgggggaggggaagttaataatcagtctttctcagtgaaggataaaagatgacactctctagatgagagttcattgaagggagatactgcatctcacttctccttgtctctctaacaatgggcattggacaccgagcagatacaaccaggggtcagttcctgtctgtgggtgtaggatggatgggtgacaggagggtggataggtttgtgtgtggacaggtggatggatgaaaggatggggtggagggtggatgggcaaatgtgtgggtgggtgggtgggtgggtgaacaggtggatgggtggaaggatggggtggtgggtggatcggtagatgggtgggtgaacaagtggatgggtggaagggtagatgggtgggtgggtgggtgaacaggtggataggcggaaggatgcagtggtgcgtggatgggtaaatgggtagatgggtgggtgaacaggtgaatggatggaatgatggggtggtaagtggatgggtagatgggtgggtgaagaagagactgcacaggtttgaagcaaatggaccaaatgctcagccccctcacctgcagacctgctcaataattgcatgaatcagaagccgcctggagcaaagcaagagtcgcctaagaggtaaactaacttgaattggtgtaaatttagaataaaacaaggatttaacttgagtaacaggcaacaggaaacaagtcaagcagaggaaatcaatgagaagttggggaatgtgggcaacgcatccctggcagacagggaaatgctgggtcatgagcaaagggaagagggagg

SEQ ID NO: 28582 - DNA, 1131 bp, Artificial sequence
  DNA replication origin
ttgctgggatcacaggtgtgagccaccacacctggtgaagacacattgattttgtcctgagagtggaggacagcattgaagggaattcatggggactgagatcttcacattttcattttagaaagtgggttatatgggggcatggtttctttttttttttttttttttttttttttgagacggagtctcgctctgtcgcccaggctggagtgcagtggcgggatctcggctcactgcaagctccgcctcccgggttcacgccattctcctgcctcagcctcccaagtagctgggactacaggcgcccgccactatgcccggctaattttttgtatttttagtagagacggggtttcaccgttttagccgggatggtctcgatctcctgacctcgtgatccgcccgcctcagcctcccaaagtgctgggattacaggcgtgagccaccgcgcccggccggggcatggtttctttgggaagcagctggagactgatttgtcaggagagagatgttgggggtctttggggtgggctggtggctgtggggatgggctggaggctgatcggtcgctgcagggaggacgaaggtgatggaggaggaaggataggggttaggccaacctcagttttgaggaaaccagagtgcagtgtttaagagcttggactatttcaacctctttgtgcctcagtttcctcatctgcaaaatgggagtgatcatgaaagtccacaccccctgttgttgctgggagagttgagtagtgtggagggctcgggagagtgggtagaaacctgggctggcagctgtgatcattgctgtgctgtgacagctgtcctggtgggaagagggcatctgtggagcctccgagagagaggtcggaggtagctgggtgtgtgggtctggacctcaggaacagcctggattctgggcccatcagcagaagtgctgggcaaggtcctggtgagagtgtgatgagggaggagcatgcaggccatggaaacagcagcggtggccgcagagcaggagatgctgaagactgaggaggccccacagagaggcaggaggaggctgggagagagacgggcaggccggacaggggacatgaaccatggcacagcctgccagacatccag

SEQ ID NO: 28583 - DNA, 1775 bp, Artificial sequence
  DNA replication origin
gcgctgtgttcacacctgtgagtggggccccttaggccgatgatgtgccgtgaggggagggggagcagggaaggccagggtgggtgtcaggtgggtaagaggcgcaggcggaaggcatatctctggtacatgctgtcttcctgctccggcctctgctcagccctggaatccttttctcccaggatggccccgttctgggggctgtggggagcttcacctggtctggaggtgccttcctgtaccccccaaatatgagccctaccttcatcaacatgtctcaggagaatgtggacatgagggactcttacctgggtgagaaacagccaggggttggggacaggtgggagatgcactgcccagggtggggtccagggttctggggaaggggtatgggggctgtgctgcccagggtggggtccaggcttctggggagggaggatgggcactgtgctgcccggggtgggttccaggttctggggaggggggatgggggctgtgctgcctggggtgggggtccagggttctggggagaggggatgggcgctgtgctgcctggggtgggttccagggttctggggagagaggatgggggctgcattgcccagggtggggtccagggttctggggaggggagatggtgctgtgctgcccggggtgggggtccagggttctggggagggggaatgggggcctttgtgctgaggcctgggcccctcaggttactccaccgagctggccctctggaaaggggtgcagagcctggtcctgggggccccccgctaccagcacaccgggaaggctgtcatcttcacccaggtgtccaggcaatggaggatgaaggccgaagtcacggggactcaggttgggcgtgacaggagccagaggggaggatgagggtaggggaggtggctggggcagaggagaggatggaggggctttgagggccttgggggaggtcctggtacctggggagaggtgggacctggcccacagggctgcctctggcagggacaggcagcatgacccaggctctgcccttcagatcggctcctacttcggggcctccctctgctccgtggacgtagacagcgacggcagcaccgacctggtcctcatcggggccccccattactacgagcagacccgagggggccaggtgtctgtgtgtcccttgcccaggggggtgagtggctgatgggcctggggtgggtggggtctggtgtgggtggaggggttgcccgggttgggcctggcactgctttttttctgcagtggagaaggtggtggtgtgatgctgttctctacggggagcagggccacccctggggtcgctttggggcggctctgacagtgctgggggatgtgaatggggacaagctgacagacgtggtcatcggggccccaggagaggaggagaaccggggtgctgtctacctgtttcacggagtcttgggacccagcatcagcccctcccacagccaggtgaggccgtgtcccatttctgtcactagagcagcctgcttcttgcctctcccactctgtcatactggaaaactgtccctttttaccttttcctacctcccttgcccagctctgagcaccttgtagcagtggcgtggtctcagctcactgcaacctccgcctcccaggttcaagcgattctctgcctcagcctccagagtagctgggattacaggcatgcaccaccatgtccggttattttttgtattttagtagagacaggctttcgccatgttggctaggctggtcttgaa

SEQ ID NO: 28584 - DNA, 1249 bp, Artificial sequence
  DNA replication origin
caaatgccaggaatttcccccacagagtctcgcttccccatggagggacacttcctcacccccaagtgcccgctgctcccacccctcctgtggctgcagtgacatggccatggttgtgtctccagactcgtggtgggagcacccctggaggtggtggcggccaaccagacgggacggctgtatgactgcgcagctgccaccggcatgtgccagcccatcccgctgcacagtgagtgaccacctgggaattgggcccctcaaccctcctggacccaactgtgcccccgcttagcttccagtccagaccttccccgcaaatgagtgtgtgctgtgagtgagaccccgcgtgtctgcccttgcagtccgccctgaggccgtgaacatgtccttgggcctgaccctggcagcctccaccaacggctcccggctcctggtgagtgagtgtcttgggccacgggggggtggggtggggcggggggtgttgttggggaggaggctggggctgggagtgaaggaggaggggctgctagggactcctggctcacaggcttctgcctccaggcctgtggcccgaccctgcacagagtctgtggggagaactcatactcaaagggttcctgcctcctgctgggctcgcgctgggagatcatccagacagtccccgacgccacgccaggtaggtccctggcaggccatggttccctgtggagcacatgctggcactgagggtgagcaggcgtgaggcctgtgtctgggcccctgtgccctccctggagggccgagtgtggctaggagagaagccaggagaagagggtggctcaggcaggagccctgctgctccagggtagaagttctttgcagggtttttctttatatttttttctttttaagacagggtccctgccaggcacagtggctcaggcctgtaattccagcattttaggaggctgaggtgggcggatcacctgaggtcaggagttcgagaccagcctggccaatgtggtgaaacccctctactaaaaatacaaaacaaaacaaaacaaaatagcaggatgtggtggtgtgcgcctgtaatcccagccactcgggaggcagagacagaagaatcgcttgaacccaggaggcggaggttgcagtgagctgagattgtgccattgcactccagcctgggtgacaagagcaaaactccatctcaaaaaaaaaaaaaaaacaaaaaacagagtttctgtcaggctgcatgcaccaccac

SEQ ID NO: 28585 - DNA, 946 bp, Artificial sequence
  DNA replication origin
caagaaagcaataaacaaagtacacccaggaggaaatgcctgtggctccctgaaggagctgaggaagacctcacagaggaggcgacattgacgttgacttttccagctgggcatagtgactcacacctgtaatcccaacattttaagaggctgacgtgggagggtcacttgaggccaggagtttgagatcagcctgggcaacatagtgagaccctgtctctacaaaaaataaaaaaaaattagccaggcatggtggcacatgcctgtggtctcaactactcaggaggctgagatggggggattgcatgagtccaggagttcaagactgcagtgagcgatgattgtgccactgcatcacagcctgtgtgacagagcaacagcctgtctcaaaaaaaaaaaaaaaaaaaagaaaggatgaagttgactcttccagggaggggaaatgagctgagtcccagaaaacaagaaggggagggaggtgtcctggccaaaggcttgatgtgctttggaacagagggaggctccatggctttgatggggaagggtcctaggtaccaccgtaagggccttggtgatggttttccagcaggggtggctgcacatttgggtttgggaaagcctggcactggggcagtagacagagaggcagtggtgagcacagcgggggcagacagggtggagagtgagaggagagggggctggcggagcagtggctgtggggacaggcagaggcacagaggctgctggtgcgggccgggaagacagagaagaaaagcctggatggcgagtgatgcgggtggcaggcgtgtctctgggatatgctgtcttcccgctctagtctctgcccagccctggaattctttcctcccaggatggcctcttcctgggggctgtggggagctttagctggtctggaggtgccttcctgtatcccccaaatatgagc

SEQ ID NO: 28586 - DNA, 1421 bp, Artificial sequence
  DNA replication origin
gggtggagagtgagaggagagggggctggcggagcagtggctgtggggacaggcagaggcacagaggctgctggtgcgggccgggaagacagagaagaaaagcctggatggcgagtgatgcgggtggcaggcgtgtctctgggatatgctgtcttcccgctctagtctctgcccagccctggaattctttcctcccaggatggcctcttcctgggggctgtggggagctttagctggtctggaggtgccttcctgtatcccccaaatatgagccccaccttcatcaacatgtctcaggagaatgtggacatgagggactcttacctgggtgagaaacggccaggggttggggacaggttggagatgcactgcccagggtggggtccagggttctggggaggggggatgggcgctgtgctgcctggggtgggttccagggttctggggaggggagatgggggctgcgctgcctggggtgggggtccagggttctggggagggggaatgggggcctttgtgctgaggcctgggcccctcaggttactccaccgagctagccctgtggaagggggtacagaacctggtcctgggggccccccgctaccagcataccgggaaggctgtcatcttcacccaggtgtccaggcaatggaggaagaaggccgaagtcacagggacgcaggttgggcgtgacaggagccagaggggaggatgagggtggggaggatgagggtggggacagtggccggggctagggagaggatggaggggctttgggggccttgggagaggtcctggtacctggggagaggcgggaccctggcccacagggctgcctctggctgggacaggcagcatgacccaggctctgccctccagatcggctcctacttcggggcctccctctgctctgtggatgtggacagcgatggcagcaccgacctgatcctcattggggccccccattactatgagcagacccgagggggccaggtgtccgtgtgtcccttgcctaggggggtgagtggctgatgggacctaggctgggtggggtccggtgtgagtggaggcgtcacctggattggggtctgacactgcttgtgttcagcagagggtgcagtggcagtgtgacgctgttctccgtggtgagcagggccacccctggggccgctttggggcagccctgacagtgttgggggatgtgaatgaggacaagctgatagacgtggccattggggccccgggagagcaggagaaccggggtgctgtctacctgtttcacggagcctcagaatccggcatcagcccctcccacagccaggtgaggcccgtcttcagcctcttttagtcccagctccttcccatgtcctgagttcactgaacgcagcctcctgtctctgtcaccattcccttccttgttg

SEQ ID NO: 28587 - DNA, 933 bp, Artificial sequence
  DNA replication origin
cccagcgtggccctctgcaccttcaactcctatctccactcgggccaccgcccgcgccccgagttccgtccctaccaacacctccgcatccgcaccaaggtacgcgggacgggcgcgcgggcggcacgggggtgctgcgggggcgggggggggtgctgcgggggcgggggggggtgctgcggggggggggtcgcgcggggcgcggactccggactcacggcgctcacgcgcgctccctcccccgctctctccacagccctacccctggggggacggcaaccacactctgttccacaatagccacgtgaaccctctgcccacgggctacgaacacccctgaggccccggacgcccccggacacaataaaggtgtgaagcttcgagtctgcggctctgtggggagggcggggccacggggagcgcgcccagaggcgcccgctccgcgcatgcgcccagcttggtaagcgctcctgctccgcgcatgcgcctagcgcggtgggcgctccacgtgcttttcccacgccgctgatacggaggtgctcgagggagcctcctccactcacaggtaggcgatcccagctccctgtctctcacctggtaataatgaggcctccctctcacacacacctattaataattagggctctaggctgtaatgggcttccgcgtacaccgaatcctcacagtaacgctgggagcagggtataaatttagttcaccttctcccgaggaagacctgagattcttgggaattaaatgacttgtccaagttccggcagctcggcagagcccccatgggagcccagggctgcagatcctgaagtcccacttcttgcctgacacctgagctgctggtgtctgtgaatcccagctctctggatttcagacggaggctccacagtcctgtgtgtgaggccttgggacctaatgctg

SEQ ID NO: 28588 - DNA, 1111 bp, Artificial sequence
  DNA replication origin
cgcggagcaggagcgcttaccaagctgggcgcatgcgcggagcgggcgcctctgggcgcgctccccgtggccccgccctccccacagagccgcagactcgaagcttcacacctttattgtgtccgggggcgtccggggcctcaggggtgttcgtagcccgtgggcagagggttcacgtggctattgtggaacagagtgtggttgccgtccccccaggggtagggctgtggagagagcgggggagggagcgcgcgtgagcgccgtgagtccggagtccgcgccccgcgcgaccccccccccgcagcacccccccccgcccccgcagcacccccccccgcccccgcagcacccccgtgccgcccgcgcgcccgtcccgcgtaccttggtgcggatgcggaggtgttggtagggacggaactcggggcgcgggcggtggcccgagtggagataggagttgaaggtgcagagggccacgctgggcagcgccagcacgaaggtcagcagacgccaggtacgagctgcggacggagcggggtgagcgcggcggtcctggggcggcgggcctgtgaacaggtgggcagggtaggggagcccccggatccgcccgttccccactcacctcctgctcctccgtggcctcctttggcagcgctggccaagccccgggtcaggggcctcagaggcaaagccatgatggtgcggggagccgggaaccagcgctgtcctcgctccctttcctggggcctggggtcacctcccctctctgggccaatcacctgttgagtctggagcactggcggctattcttaggggtttctatatttaaaatggggcctgactggcttgaggtcatctccagacagctgttgtcctgtgcctcttattttggcaaggaggcatttaagtacaatatgccattctttttatatagttgcagggaaactattttgttccctattctatgcctggtggctggcacacagttgggctttaataaatatttgtagaatgaattaagtgtctttttgagtctcagtgttttcagctgtaaaatgtataataattcgtaccttaaaagattttttaaatactggagacggggatctcacta

SEQ ID NO: 28589 - DNA, 1577 bp, Artificial sequence
  DNA replication origin
cctaaatcccttaatgtataagggaaaggagcgagaattcaggggaaaaaaaacaaacaaaatagcccccagcacttctgagaaagatctgccatacagaaaagccgtcctgagcgggtctgtgtggagggaggggactgcatctcagatccacagtccaccggcggctgcaacaattccacccagggctgcagcacgctggttcttcagtgtcgggccaggttggacctccggctggaggccttccacaccggaaacactggtagggctcctctccagtgtgggttcgagggcggtggaggagctcggcactgtcgctgaagcctggccctggcctcgccgagcggtccggccgctctgtgctgcgaggccttccgggctggctcagggtagcctggggcctgaaccgcctcccgcgagtcccgtcccgcgctcgcacagcttctgggccccatcgccccctcctgctgagctgccggctgggtggctggcggaacctgggcaacttccaggcctcccagaggcactgcaggcactgcgggaaggccggatggaaccagaggctggagactgagtggggggccaggataaaggaagggaggtcggggcaggagtgtggatgggggcagatgttgaaggaaggacccggggctcccacagggccggagcccagaggtgctgtccggggcgactgagctgggtgcgaggctgacgctctccacgctcccacccctgcaggtcttctcccctgggtgcggaaggacgcgctgggagagggaggtcttctcattgacactgtcaccgcagctgcagcagcagaagggacacactctcctgtgtgaattcgctggtggccgatcagcttccaccggtccccaaaaacctgctggtactggggacagacgcagggcttcggccagtgtgtgctccttggtgagccagcagcagagctggccgctaaacccttgccgcactcccgcagacgaatggcttctcccgagtggactcgctggtgcttgatgaggttggagcggccacagcaggtcttgccgcactggggacagcgacaaggtctctcgccagtcgctgtggacccgccagtgctggaggagggatgcgctctgagtaaaacccctcccgcaggccttgcacttgcagggctgacggccctgggtgaatctgccggtgctgcagcaggtaggagctctggctgaaacgctttccacagtcagggcaaaggggaggcttctcatgagcagggcttcggagatgaccgctcagggagtaactgtacgggaggctttgccgcacttggcgcagctgtggggcctctgccgcactcaggcttcccgtggccacgagctcacagtctgggagcagcacccggccccaggcctcgggggctgtctggagagttctctaatgtaagacgctgggcaatgtcatctgaaggtgtttcttgaggctctcgggcatgtccctgggtgttccccatcactaagtccatcctcttggatacgctggtcctcactgccgtgtccagttcctgcggaaggaaagatttcagatcccagagc

SEQ ID NO: 28590 - DNA, 1174 bp, Artificial sequence
  DNA replication origin
ggacgcccgagacccccggcatcctagtcctgggccgtgggctccggacgccgggccaggacgcctccagctcccagggtcccttgcggggaccatgtttccccacaggccccgcggctgccgggtcctcgccacgtccccttcccggagctacgcgcccggctgggttccgatccgccgtgtctctcgggggcggctcgcggggcaggggcgctcccggctcggccgcacgcccaagtgtcatgcgggaggtacgcgggcacgggacctcaccgggtaagagcgagcgaaggggccgggcgcggtggctcacgcccgtaatcccagcactttgggaggccgaggcgggcggatcacgaggtcaggagttcgagaccagcgtggccaatatagtgaaatcccttctctactaaaaatgcaaaaattagccgggcgtggtggcggacgcctgtggtcccagctactcgggaggctgaggcaggagaatcgcttgaacccgggaggcaggggttgcaatgagccgagatctcgccactgcactccagcctggggaacacagcgagactccgtctcaaaaataaataaataaataaataaataaataaataaaatcgagcgaagggccgcagcccgggcccaccgcctccacctgaacacgcgcctccgccgagcccctcgaccccgcgccaggcgaggcttggtggggcgttccgtggaccccacacgcacgtcggtgttatcaggagggaaggggcgggccaacacctccaccgcctttgcggccggccgtccaccctccattctcctgctggagccgtttcccagcgattctccggcagtgctggctgcagcacacccggcccgccttaaaatctcagccgcctcccccgtcccggagtcctcccctgggttctgtccttaactgcatcaccgaccccacatacacacaggcatgaacacccatcttttcacacgccccgtttgctttctcagaacttagcagatactcttaagctgagagggtttggtgaggttaaaatttatcttgtgacattgagtccagcagttcagagccttgaacacctcagtacatggccttgaccttagtttattacttctgtattctgccgggcgctgcggctcacgtctgtaatcccagcacttcgggaagcca

SEQ ID NO: 28591 - DNA, 1143 bp, Artificial sequence
  DNA replication origin
tccaggtgggccagggcctccgaacagcccagaagtccgaccacggagccttcgtgccgtgccccgcccccggcgtgcactcggcggggaccgccttttctcctctaggctcgcttcgctgccccccagcggtggtgcggcccggccttgggacggactccgagaaccccgagccgggccgaaagtgcggggtcctgaccgcgccgcagacggggagccctcgctcggtcagaggaagaagagggttaaacctaccgagaacgttcgctgccgcttcctagagtgacgggcttgtggaattttccgtttccggagctggaccccggtgtcccgagtgtcctccgctctggacgtgctcgtgagctcaggagctggcatctaggaaacggggagttcttcactcgcagcgcagtcggccgcgccagaagaggcgagggagaatccggacggggcggggcggcgggggagcgggacattcgcgtcccggggagcccccaggtcacccctggattgcgaggtggctccgcctgagcagcccttcctggtgtggtcggggcagctgcccgcccggaaaatggtcaggctctagccctggggaggaagaagcctttgccaagagcaaccgtctacaagccccaaaacctgcgagtgccggaaatgtggactgaccacagcctgcctccccggcttcattcaccaccaaggcagcccctctggtgacaagccttaccgttgtccgggttatggcagaagcttccgatgtggctctgatctggttaagcaccactgggtacacaccggtgaaaagccgtactcctgccccgagtgtgaccatcgcttcggccctatgcctgtgcctagtgtggtaagactttcagcgtcagctccaacctgatccagcaccagcgcgctcacaccgctaaaagccttaccgctgaggggactgcggcaagagtctcagccttggctccaccctgttgcagcacctgcgctccacatgggtgagaaggcctctaagtgccttgtttgtagtaagagttttgtgcacagttggaatctgctgcggcaccagcacagtcacaaagtccggaaacctgatgcttggtggtgagtgtggccagaccttcggccacagctcccacc

SEQ ID NO: 28592 - DNA, 880 bp, Artificial sequence
  DNA replication origin
gccacaatacgagggtgccatgcgcttgcacgagggtcccgcagcaggcccatcagtagatccaagccaccagcatcccgcagtcgggcccggttgatggcctcacgacataggaggcacacagcccgcaccaggggctgctgggaggttgggctagctccattaggatcccggcgctgccggagctcatctaccagcacctccacgccaccagcattgcccagtgcaggccgaatcaggccctgggcacacaggttggcgaggatcagaatggttccctcgcgtactgcccgcttggggtgggaagccaggctgacgagtgggcccaatcccccacccagacttagctgctcagcacaggcccgggagcagcctcggctgagttccaggagggcacggacgagggctaaggtcagtgcagcatctggggcagtggccaggagctcggccagcggacgcactgctccctgctgtgccaaggccaggcggtgctggggtgagtctgccaggttacggagggcacgcaccacgctctgtaggcactgcgagtcctggcaggctgtcaggctctccacaagcaggggaacagcacctgagggcaggaaaggggagcacagagggtgaacaaggacagacactcaagcctttcttctgccccaagccctagcagaccccaacctcacagcctcttaccagcacagtggatgtccccacagctctcaggttccatggctaagttccccagggcacgggccgttcggttctggatgctgtctgtcttcatgcactgaagaatggtcactgcaacgacagtttgggcttgtgagggttctaccccttactgtctctcacatcaataacctggagaatgtggcctgag

SEQ ID NO: 28593 - DNA, 1096 bp, Artificial sequence
  DNA replication origin
cggcggcggggctgcggcccggagtgcgttgggtgcgtggtgcccgcagcgaggtcggggtcggggcggggctggccggctccatgggctccggcggacactgctcaggagaccagtcgggggagatgtcatcagggcctgtggcatagccctcggagatcagccacgacctgcggagggcagaaagggaaggagactgaacccagagccaaggttaaggggcagagtccaagaggcgtgaggcgtcttttttttttttttttttttttttaaagaaatgtggtatccctctatagcccaggctggaatgcagttgtgggatcctagctcactgcagccttgaactcctgagctcaagtgatcctcccacctcagcctcccaagtagctggcactacagctgtgtgcaccacactcagctaattttttaaatgttttgtagagatgggtctcgctatgttgcccaggctggtctcggactcctgtgctcaagcgatcctcctgccttggcctcccaaggtgctaggattacaggcgtgagccactgcatgagctaaaagctgtcttggagggaggtaaagccaggggagagaaggagggcggagaaaggggagaaacggaagtgagagggggatacgactaaaacctcattcagtaattactgatgcctgtcacgtgccaagccgttctttaggtgctgggtagaagcactgaacaaagtgcctgtccccctggagtttatgttccagtgagaagaagcagacaagaagtaagagtaccatgagttatgttagtgtggggctagtgtagagtacaggggtcatggagaaaataaaaaggaaataggaagcgctgggggctgggcatggtggctcacatctgtaatccctacactttgggaggctgagccaggagggtcactggaagccaagagttcaagaccagcctgggcaacaaagcgagatccccaacgctaatgtttaaaaaaaaataaagagttcctcagctttcctgtgatgcttcagctcatgagtgatggtaagagagtaagaacttggactccagagcccaccatcttaaccagcgtatatcccacc

SEQ ID NO: 28594 - DNA, 1128 bp, Artificial sequence
  DNA replication origin
ctgcctcttcacctgctgcctccacaagccccaccagggccagaccccgcttcctcgggcactgctctgaccccagtgtccagcgggcacagtgggcagccagccggggccggcccaggcggaacacctcacccactgactccgggccaccctggggtcccaggtggatgcggcccacggcctcttccagctcctcctccagcccaggcagtaggaaacggccagcagcctccagtgcctcctcggcctctgaacccagcaggggctggcctggtgggggcacgggccccagggcagccccacacccccgacaaccatgcaaatgatgcaggacaggccaggctgcaccaggcgacagacctcgcaggggcaccaggtccatctgggcttctgcaaagctgcctgacagcagggcccggaagaaaggggaggcggtggctgaggccgctcgctgggcagggagctggaggcctgagtccagcaggaagtgcaggtcgggagctgggacaggggctgggcccagcagaggttcatagaggcaaggggaaggtgagtctaggtccatggggactgcctgtgggacagctgggctcacagtgggagacaccaggtcttggaggcaggaaagggagtccgcggcaaagaagaggaagagcgggtgtggggccggccgggtcagcgccgcaaggaggagccggagaccaccctgctccagaagcagccggcgccacagagagggcttcctacagggaagagagggcctttcaaaaggtgggcaacgggcctgggaaacacagcactcctcccccaaccccgcaaggcacccacttcccactcaccggcagatgaagggcagggtcagcgcgcaggccactcggtcctcagggctcccagagagcagcaggtgcgtcagggccccaaccccaaagggcgactcagcctgaaccgtcaggttctgcagtagcctctcccctgtgagtggaaagcttgtcaggctgggaactggggtctaagacaggtggggtgagtgagacagggctctgggcccgtgagatgaaggagggtgaaacctctgggtgagaaatcagggcactgaagagacagtgctgggctcgggacgctgggaac

SEQ ID NO: 28595 - DNA, 1265 bp, Artificial sequence
  DNA replication origin
gttagccaggctggtctcgaactcctgacctcaggggatccacccacctcggccttccaaagtgttaggattacaggtgtgagccactgctccttgcctaattacctgtcttttttgttattgccatcctaataggtatgatgtggcatctcattgtagttttgatttgcatttctctggggactaatgatgttgaggatcttttcatgtaatcattggctatttatataacttctttgaactgtctattcaggtcgtttgcccattttttcttctttttcttttttattcttgacacagggtctcctctgttgctcaggagttcagtggcacaatctcagctcactgcagcctctgcctccaggtttcaagcaattctcctgtctcagcctcccaagtagctggaattacaggctcccaccaccacgcacagctaattttgtgtttttagtagagatggggttttgtcatgttggccaggctggtctcgaactcctgacctcaagtgacctgcccgccttgacctcccaaagtgctaggattataggtgtgagccaccatgcctgtctcgcatttttaaaaagctccccaggttgttccgatttgctgctgggttgatactcacattccagtgctcagatctgtccagaagagtggctgcagcacagttgtctgtccataactacctctatggcctctcgtttccacctcgtttctcagggtctcagtccagggaaggccttgccactttgtggctggagactgtgtcttgctttctgctctgagttcatcagtaacttgggaaagggctgtttcagagcaggcctgggccacctcagtgctgaggaagggctttgtcttgcaggctggctgggggttggttgcctgggagtgttttccccgaatttgcaaggggcttgcgcccgggttcgagtttacgtgtgtccatgaccaagtcttggagggaaggtcctagtgtagagtctgtgggtgggttcactgtgtctgtccccgtccctcagatttctttgtgtctggtatgtatgcctcttggggcctctatttatctgtcagggtctccgatgggagggtctccgaacctgaggtctaattgagccttagaatatcactcctgctaccaatccaaaaattccgtctgggacaagtctcccaggaatggcatgggtgggagggaggctcttgtctaggactcaggcgctagctttgagcggtgtctgtttgggggcctcagtccgtgtctgtaa

SEQ ID NO: 28596 - DNA, 1807 bp, Artificial sequence
  DNA replication origin
atgcttgtgtcatctcagagcctcccagagcaacgctccctctagtgactcagatatccaggactcatctctcagccctgacaacgacgccaaactcacaggctgggtcttttcttatcttcagactggtcctccttctgctctcctgaagccaccttgctagatgggaactgagacatgatttcatctggagagaggagaggaggacgctacatatagggccatgctcaacgcaccctcacacttgaggctttaggtccctttaactgctactctgggaagtgtattcctcttagtctctgccccacccttccctcccctgcccctatcgcatcaaggcctctctcagtcaccctggtacctgtgatgttgaactgagtggcattaagttcctgaagcaaccgatctagctcacagagcccggtacccaagacaccgctggaagaggagaatggaggggccgccggggctgcaggctttggggaccgaggcttgcataccgtgctgggaagcagagtgggagcctgggttcaggggtggggaatccaagcctcctcacctgagactcagttggcccccatgccctggtttccaggcccctcacctgtacaggtggtccttgtcccccgaggctcctgaagactccccagaccctgtctacagagcggagacgcacaggtgggatgacaggcctgcactctgccccactgaggctgagatccccatagaccaggccgagcctggccctagtggctgccccagtccccaacatccgatctcacctgtggctggtggccataggatgggggaggggtgagaggctccgcagggcgctctttgggagcccctgaccttggcatgtgcgaggtggtagtctccaggtcagagagcagggcatctgcaggaagaggccatcagggagagagacaagggtcacggttagatcagaagataaggttcccagtgggcagtactggagaaggacagaagccagtattaagagaagaggtcacagggccagagccaggcagagcactgctcgaagggtagcaaggaatatttatgaccagaatatcccagttgctcacgcttggagccaagcacaaacccagcctcctgattattttattctccccatcttctctgatgcagtcaaaatgggctcttcacccaagccaaatttggctcccctccaaattgctccattggcccagtgcctggccctcagctttctgattggacgctctctcttccatgctggttaactcctccctctacctacacaggccccgcccagcctggccactcccaggcccctgagtcccgccctgggctcctcactggcgcttcgctgggacctgccttctgattggctgtttatctgcggtacagcgtcagttacccctaccgagcagcgccctctaccgccaggggccggaagcccctctctcccgtggagcgcacagccttccagccccaggcttcgcagggaggacgagatacctgggtcccccttccggacaagacacctctctccatccctgcatccccagatccgggtcttttgagccctttcacttccagaacccagaagtcctgccctcagtcttcgtctctgagcacccgcgtgaaaccctgaagccttcgcgggcgcctaggcactcctgagttactattctcttccttgcctcaaggacctgaccctcactgtgctcaggagcccttaactcctcctctcccaaaactctggtgcaggcaggcccgctttttttctccaaaacttgatgccagactttcccgtgccctc

SEQ ID NO: 28597 - DNA, 1583 bp, Artificial sequence
  DNA replication origin
gttctcgcacaacgggcggccctcgtgctcgaaaaagctgcctcccgagaagggcgcgaagcattcctggggaagggaagccgcgaaagaggacagacaggtcagcggccactgccagacaacgcgcgttactagcggataacgccctgggaccccgcagcccgccctagacgcgaagaatcccgtccggtgggaccctgcccggaaaactcgccccacccgaggttcctagcagcacctcccgtgacccgcccccccgagggcccgccccctgccctgcacccttgacccgcccctccaaggccccgccccacagccctgtacccttgacccgcccctccaacgccccgccccgcagctcgcaccctgcagacgaaacagtccgggtgccagagcgcgctgagcgccgagatgtagttatccaggatggggccctggcagccctggcagcgcggggcgaacagctgcaggaagtcccggcggcagtaggggcggccctcgcgctcgtggaaacctaggagagggaaccgagtgggctgaaagcaaagggtgcgggcgggacgggggacccacaagacctgagatctggggccgaaggaggggcagtccgagggagccttggggaaggaggagccgggtctatggcgggacagagcggggagggctcgggtccggagtctgtgtaggagagggcagggccagaagagagcagaaggaaaaccatggccctgaggactccggaggtcggaggggctggggcgagacgtcgaggggacccgcagcttttaagatgggagtcgagttcactctcaccctcatctccgaagggctccccgcaactgacgcagcagaaatgctctgggtgccagtgagtgcccaaggcggtcaccatcttctgcagggagggagagggcactcagcgcggcctccgtgccttcgcgccttcctctcccgcgcggaacccgggtgactggactaaggcatgcgtggggggagggggagaagatctaactaggaacgtgggggtcagaaaggaagagtggagtccaaggggccgtggacattgccaaggggaaggggtaggggtggagtggggtatcgcgggtggggcgggacccatgcggtggaggcccgtcccacagctctcctggtgagatagggcgggctcggtgcggccgggcggggctcacgtgtcggatgggctggttgcagaagccacatcttggcgagaagcgctcaaagtagcactcggggcagaagggggctccatccttctcgaagaagctgctgcctcccagggcggtggaacagcctccgcaaacgaagtgctcggggtgccaggcgcggcccagagccgtcaccacctgcgagtgggaggtgaggcgggtcagagcggctctgacaaccacatgcccagtgaggcaagatttacgcggcgtttttcgagtcctctctgagcgatcagaataaagaatccagtgttcgagatcacgcagcctgtaagcgatggagatctagctcccgtgttccgtcttccagctgcgctccaggattgacctatacatgaggcacagcaggcacag

SEQ ID NO: 28598 - DNA, 818 bp, Artificial sequence
  DNA replication origin
aaaaggtgagcacagctggcactctgaatagagctccatccctcaaggccctttaataggagaaaaaatctgggaaccaaaggcagtgcaggaggggagcagattaagttctttctctctccttccttccttccttcttcctttctctttctttcttcctttcttttctttcttttttttttttttttttttttttttgagacggagtctcgctctgttgcccaggctggagtgcagtggcgtgatctcggctcactgcaacctctgcctcccaagttcaattgattctcctgcctcagcctccagagaagctgggattacaagcgtgtgccaccatacccagctaatttttgtatttgtagtagagacggggtttccccatgttggccaggctggtctcaaactcctggcctcaagtgattcacccgccctggcctcccacagtgccaggattacaggcatgaaccactgtaagcgcttatttcaagaataaagggaagggcgggcacagtggctcacacctgcaatcccagtactttgggaggccaaggcgggaggatcgctcaagaccaggagttcgaggttgcagtgagctatggcaccactgtactccagcctgggcgacaaagtgagacctcatctcttaggacaaaacaaaacaaaacaaaatatagaactgaagaaagagtaatgagggcgggaatattcggtggggccccagttggagctcttgtcctggctctgccactatctgtacagtcctgcgcgagtcgccacactttccagcctcaggctcatctgatacttgaagtaggaag

SEQ ID NO: 28599 - DNA, 1259 bp, Artificial sequence
  DNA replication origin
gaaaaacgggccagaagtgatagcctggggagacaaggagggctccagttaagagcccaggagggtgtcagctctgttccttggtgcccagggccccggggccatcacctgcagttgtcctctgggccccagatgtggcccttcccagggccacttgcttggagtagcaccttcacgaagaggtcagatcctcagggatgagggcaaagccaccctcagcggcagtactgccccccgtaggcgctcttcgtggtgctgctactgggctggctgtttgcacccgtgtacctgacagcgggggtcatcacgatgccacagtacctgcgcaagcgcttcggcggccgccgcatccgcctctacctgtctgtgctctcccttttcctgtacatcttcaccaagatctcagtgagtgcctgtggcagatgcgattgggccctagaagggtggggctcaagtggggtctctagagaaccctagagggcgtgagacctaggagaaaccactgcgagggttatgatgatggaggcagagcctgcaatgaatgtctccggggcaccagctacagtgctgggacctggaaaaatggagggaagctttgaggctagtagggcatggcctgggcaggaggtgggctggggacactgccctgggtcctgacctggcacttgcttctcccccaaggtggacatgttctccggagctgtattcatccagcaggctctgggctggaacatctatgcctccgtcatcgcgcttctgggcatcaccatgatttacacggtgacaggtgccagcaggggcttaggaaagggagtgggcctgggacactgctgccagctgtggccagggtttagggagctgccagaggaaagcaagctggagaggtctggaagggtggtgtggtccaagcaggagaaggaactaaatctttggagagcaaaggcttcctctctttccactgtctcttggattttgactggaagttcagagagaaagccatgctgggcttgagtgaggactttgagaaaaggaagatttagcagctcttgcctgccttgaacacctgggagagcacacctgacgagtctccaagatctctggcaaaacccagtatggttcatagggacctggggtggggcctgaggtcagatgcggaccagagtaggcagggcttggtgccaaggcccgcttgagggacccacctccagaaggaacggaactgagtataggaccttagacaatcatcctctcctacgatg

SEQ ID NO: 28600 - DNA, 1709 bp, Artificial sequence
  DNA replication origin
ggcccgcaggtctgcgcggactcatgctggcggtcatgctggccgcgctcatgtcctcgctggcctccatcttcaacagcagcagcacgctcttcaccatggacatctacacgcgcctgcggccacgcgccggcgaccgcgagctgctgctggtgggacggtgcggcctgggctcccctcctccccaacggatcagcccggggcgggggcttgcgcacctgcaggggagcccagggtccgggttcgatccgacggcctccgccgcaggctctgggtggtgttcatcgtggtagtgtcggtggcctggcttcccgtggtgcaggcggcacagggcgggcagctcttcgattacatccaggcagtctctagctacctggcaccgcccgtgtccgccgtcttcgtgctggcgctcttcgtgccgcgcgttaatgagcaggtgagcggcacgcgcgtggtgacggcagggctgggcttgcacatcctcagcaggctgacctgtttccttcgcagggcgccttctggggactcatcgggggcctgctgatgggcctggcacgcctgattcccgagttctccttcggctcgggcagctgtgtgcagccctcggcgtgcccagctttcctctgcggcgtgcactacctctacttcgccattgtgctgttcttctgctctggcctcctcaccctcacggtctccctgtgcaccgcgcccatccccagaaagcacgtgagtggccaggtgccccaggcaagcactgtgggacacagcacctaccctctgcttcctggagtgcccagctgggaggacctgaatttctcgactgagggttgggaatgggctgggggtccagctgcagttgcaattgccgagcaagaatttttatttaaatacatttatttgaaccggcctgggggaggcttgatgttgatgggttggtgattaaagcctcccaaagccaatccttggcatggcctttgggactcaaaacacaggatctgactggtgggcacaataccatcttgaacgcccacaaaaaggtttggttttgttgccaaagggcaggtggctccaggcagggctgatggtggcagggtggggtgaggacaggacaagagatctgggtgtggaaggatggccgggtttctgcagcagcaggaggaaagggtgggagcacacaggcacagaacactgtgagcaggactgccaggccagtgtcacaagcgctaccatctgggtgtagacagacctgagctgacaaagctgggggagcaaggccaacggctttaaacacaagctcaggggcttggggtttatcccgagggcacagggcagccatgtagggtggagttggcatgagttaagcctgggctgggtgtgtagactggacagaggtgggtagggcaggcagtgacgagctggtgtgcaagagactttagggccaggcatggggggacagaactcccacctcgttcgtgctcccaccctccccagctccaccgcctggtcttcagtctccggcatagcaaggaggaacgggaggacctggatgctgatgagcagcaaggctcctcactccctgtacagaatgggtgcccagagagtgccatggagatgaatggtagggcaccatgctgggaggtggggctggaggagctgagttcccgcaaactaactgcagggcctcaatttccctcagagccccaggcccc

SEQ ID NO: 28601 - DNA, 1147 bp, Artificial sequence
  DNA replication origin
tacctccccggagccccaggcatcgcaggaatttagagttggaagggatcctgggaaccctttagcgcgccccttatatttcaggaggggaagccacttccctttggctccaacatccctgggcgcagatgccaggattgggaagcagaggaatccgccttccccccaccccaagcttctcagatcaattcccggtctagctccctttctcccagacctccagactcgaagcctctattttagggctctgggcggaaccagggacgggccagactcaagagctttttaaaaacgaaatgaaggtgttagacccgcggcgcagtctccaggaaaagcctccacgcgcagaggggagggccctccgggggagggtgcgcggggcgggggcgcgcggggggagggggttcccggggtgctgagcgggggcgggggtgcgcggggcgggggcgcggctaggaggcgccgcacagcaatcagacgcggctcagggtgcgcgcggggagctggagggcgcagttctggaccttttcggtgttctctctaacgcgggaaaagtttggggcccagagggattgctcctcgttccaacctccagcaagctttcctctgggacttgtgaaccgactgttgttttgtaggtctctgcagcctggatcagggtggaaagggaacccgctcagtgtccccagcggtgcttccaaccctggggtgtggtcggccctagatccagcttgggagagtggcgcctcccagggaagcaggcggcgagctcctctgggttggggtcggtggtccaggcagagtctggggccttctccacggcacctctcaggaaatctcagtctgtgagtgaggaccagagcccgctcaggcgggacagtagtcggcagcctcacctttgcaagagagacctggcctggtgtgtgtgggtggaggaaagtgagtgggggacgctaggagagcgcacagcacaacgctccggtgccttatgcagaatggcgaaatgtttgcatgtaacccacgcacatctcttcgtggacttcacatcatggctagattacttacaataccgactacaacgtcaatgctgtgcaaatagttgttacactgtattatttagggagtaacgacaagaaaaaaagcctgt

SEQ ID NO: 28602 - DNA, 1035 bp, Artificial sequence
  DNA replication origin
gtctcatctcgaattgtaatccccacttgtcaagggaaggacctggtgggaggtgattggatcatgggggcattttcccccatgctgttctcacgatagtgagtgagttctcaccagagttgatagttttaaagtgtggtgcttcctgtctctctctctcctgctgccttgtgaaaaaggtgcttgcttctccttcaccttccaccatgattgtaagtttcctgaggcctccccaggaaacagttaattgaactgtgagtcaattaaacttcttttatttataaatatccagtctcaggtagtatctttatagccatgtggaaatggactaataaaaaaatacatagtgtgtactcttgccacacatatgaaactcaatttccatgaattaccatgagaaaaaaacaaattaaccagattgaatcagggatggaactgatcactactgggatgaaatacactcaaatagattaaaatgttgcttgcagtgtgtgtgtgtgtgtatgtgtgcatgcttgtgtgtatgttggtgtgtgtgtatttgtggtgtgtgtgtgtagtgtgtgcatgcatgtgtgtgtagtgtgtatatagtgtgtgtgttgtttgtgtggtgcaggtgatgtgtatactctggtgtgtgtgctgtttgtggtgtgtctgcatgtgtggtgtgtgtgtagtgtagggttgtgtgctgtgtgtgtacgtgtgctgtgtgtggtgtgcatgcatgcgcatgtggtgtgtgtagtgtgtttgttgtgtatctgtgtagtgtgtgtggtgtgcatgtgtactgtggtgtatgtggtatgcatgttttgtgcatgcatgtgtgtgctgtgtgcatgtgtgtgtagtataagtatgtaatatatgtgtagtatatgtatgtcgtgtgtggtatacgtgtgtgtggtgtgtgtgtatgtggggcgtgtgtgtgttttttttttgtgtgtgtgacagagtctagccctgtcacccaggttagagtgcaatggcacgatactggctcactgcaacctctga

SEQ ID NO: 28603 - DNA, 882 bp, Artificial sequence
  DNA replication origin
gcccggccgccccgtctgagaagtgaggagaccctccgcccggcagccgccccgtatgagaagtgaggagcctctccgcccggcagccaccccacctgggaagtgaggagcatctccgcccggcagccaccccgtctgggagggaggtgggggggtcagccccccacccggccagccgccccgtctgggagggaggtgggggggtcagccccccgcccggccagctgccccatccgggaggtgaggggcgcctctgcccggccgcccctactgggaagtgaggagcccctctgcccggccagccaccccgtccggccagccaccccgtccgggaggtgaggggcgcctctgcccggccgcccctgctgggaggtgaggagcccctctgcccggccaccaccccgtctgggaggtgtgcccaacagctcattgagagcgggccaggatgacaatggcggctttgtggaatggaggggagggggggggggaaggtggggaaaagattgaggaatcggatggttgccgtgtctgtgtagagggaggtggacatgggagacttttcattttgttctgtactaagaaaaattcttctgccttgggatcctgttgatctgtgaccttacccccgaccctgtgctctatgaaacatgtgctgtgtccactcagagttaaaaggattaagggcggtgcaagatgtgctttgttaaacagatgcttgaaggcagcatgctcattaagagtcatcaccactccctaatctcaagtacccagggacacaaacgctgcggaaggctgcagggtcctctgcctaggaaaaccagagacctttgttcacttgtttatctgctgaccttccctccactattgtcctttgaccctgcc

SEQ ID NO: 28604 - DNA, 1719 bp, Artificial sequence
  DNA replication origin
ggagttcaagaccagactggccaaaatggtgaaaccctgtctccactaaaaacacaaaagttagccaggcgtggtgttgggcgcctgtaatcccagctactcgggaggctgaggcaggagaattgtttgaacctgggaagcaaaggctgcagtgaccgagatcgcaccactgcactccagcctgggcgacagagtgagactcagtctcaaaaaaaaaaaaaaagaaattacacatttatgaggtgatggatatattaaatagcttgattaacaattccatgatgtatacatgtatcatagcacgtgtgaagcgacctacctgtatgaaggtgaggtgacctggtcacgtgacagtgaggtgacctgggggatgtgtaaggttacctgggggtatgtgtgaggtgaacttgggctcatgtgaggtgacccagggtgcatgtgtggtggcctgggtgcgtgtgaggttacctagacatgcatgaggtgacacggggaactcatgaggtgacttgggcatgtatgatgtgacctaaggcatgtgtgaggtgacctgggggacgtgtgaggtgacctgtgggacgtgggaggtgacctgggggatgcgtgaggtgacctgggggatgtgtgaggtgacctgtgggaatgtgtgaggtgacctgtgggacgtgtgaggtgacctgtggttcgtgtaaggtgatgtggggaatgtgtgaggtgacctgtgggacgtgtgaggtgacctgtaggacgtgtgaggtgacctgggggatgtgtgaggtgacctgggggacatgtgaggtgacctgtgggacgtgtgaggtgacgtggcggatgtgtgaggtgacgtggggaatgtgtgaggtgacctgggggacgtgtgaggtgacgtggggaacgtgtgaggtgacctgggggacgtgtgaggtgacctgggggatgtgtgaggtgacctgtgggacgtgtgaggtgacctggggaatgtgtgaggtgacctgggggatgtgtgaggtgacctgtaggacgtgtgaggtgacctgggggatgtgtgaggtgacctgtgggacgtgtgaggtgacctggggaatgtgtgaggtgacctgtggcacgtgtgaggtgacctgtaggacatgtgaggtgacctgggggatgtgtgaggtgacctgggggacgtgtgaggtgacgtggcggatgtgtgaggtgacgtggggaatgtgtgaggtgacctgggggacatgtgacgtgacatggggaatgtgtgaggtgacctgtgggacatgtgaggtgacctggggaatgtgtgaggtgatgtgggtgcgtttgagatgacgtgggggatgtgtgagcttagcaggagtgtgtgtgaggtgacatggggaatatgtgaggtgacctgcctgatgtgtgaggtgacctgagcacatgtaaggtcacctaaggcgcatctgaggtgacatgggggacgtgtgaggtgacctggggaacgtgtgaggtgacctgtgggacatgtgaagtgacctggggaatgtgtgaggtgacctgtgggacatgtgaggtgacctggggaatgtgtgaggtgatgtgggtgcgtttgaggtgacgtgggggatgtgtgagcttagcaggagtgtgtgtgaggtaacatggggaatatgtgaggtgacctgcctgatgtgtgaggtgacctgagcacatgtgaggtcacctaaggcgcatctgagg

SEQ ID NO: 28605 - DNA, 1992 bp, Artificial sequence
  DNA replication origin
ttcggagagctgaggcctgtgctggatgtggagccaccagccagcagagaggagctcttggtctgatgggagatggagctcctgccctcagggtgctccaaggatcattaattcatttattcagcaaatattgatgagcgcttgcatgctgctgtaggccctgggatatggaaatgagaggacggacaagctccctgtccccaggacagcctgaggctgcagtaagttcttggaaaggatcaagctgatcagaagcgggagctgcattgagggagaaatatggccagtgaaggcctcgctgaggaggtgacattggtgatgctggagttcagatctgaaggggaagaaggaagcagccacatatagaagtgagggaggggggcttaggcagaaggaacagcaagcggagaggccctgagaaaagaaaggcttggctcgctcacctgcaagggccccctggcttgacatagtgagaaaggtgtgaagatgaatttggagaaaggcagggacagaccacaggagactttagatttgattctgagggcgatgggatctcttgagaggatgctgagcaggggagagatgtgatctccttttcattctaacatgatcgctgcagctgctgctggagaatggatgcaggagcaagagtagagactgggaaggtctgtgcattctccaagcaagaggcgttgatggcatggaaagatgtctttcctctggcaggaaagacagagacaggggatgttttggaggcagaacagttgtgacttcctgatggatgggatgtcaagggcgaggaaaagggaggagtcaagggcagctcccaggtttctggacaactggatggattgactgagctggaaaagatgggggtagagagtggagaagaggtttgatggtaagaaatcacatggcctggcaagtattgtgcagagtgcccatgggacctgcaaatgaagacactgagcagggtgggggtgccgggctgtggctgggggagatgctgggctcgggaatggccatcagcagatggacctggtttaaaggcacggcacaggtgacatccttgagggaggtgtgcagggagaggagaggaggggagagtcaggacaaagttctggagctccgcctcctttagggcggggtctgttaccctccgctctgctgacattttgagccagataattccttgttgggggaggctgtcctgtgcattgcacaatgtttagccgcatccctcagatgccatagcacaccctccagctccctccacacaaatgtcccgtggggacgagtctcctggctgtttacaggtgtagagggtgggggaggggaagtagagaagactaggaaggagccagtggcattaggaagaaagccgggaacgtggggtctcaggtgccgagatggggtctggagagggaaggaggggctggctgtgtcagatgccgccaaggggttaaggcaagttggggagaagcagccattggctttggccacatggcggttctgggtgtccctgagaggagcttctgggcaagtggagtcttgggtgggcggcaggaaagtggggagaacaaccctctaagagtgcggacagcttctgagcaggtttgctgggatgaggggcagcctggggaggggcgtgggctgggaatggcttcccgaggatttcatgtacggagggccatgctgggtgtctgagcattgccaccgctcggtgagtgttgatgctggtgtttagagggggagagggttggggtctgctggcgggctttagggtgatgggtaggggtgtctaggcaggcgagggactgagaaagcattggtgggctgtgggcaggaggctgcccaggtctagccgggtggagcagggggctcctggtaggcagcgtggggtccatcccccggctgtcctctgtctgctactgtgagagcagtgggcagaactgacctctcaccactcctgttccccccaaccccgtgtct

SEQ ID NO: 28606 - DNA, 1125 bp, Artificial sequence
  DNA replication origin
cctcctggggcacctcctccatgcctgctcagcatctgccaggaaagtggcgagcgctgcatgattctgcacccagccccgagccttcccttttagccccccatgtttattaccgaggagactgaggctcagagaggctaagaggcttccccaaggcctcagctggtgagagggtgctggggagtccaggcctggtctttctcactccagggtctgggctgtccacctggcaggtggacaagaggggaagcagggctagggatgaacccaggggtgggctggctgtgggcactgacatgatccgctctctcctctcctgcttcaggaccccggctgtgccaaccaagctctgatcagcaagaagcttaatgattatcgcaaagtgaggtgaggcctagccctcatggagcagtctcctttgtgggggtggtagggggctgaaggcagaggatgtcttcctggaccacctccagggctgccctctgctgggggaaggggtatccagggtatccagggtctccaggctgcagtttggcatggaggcattgcctcagggtggaggggatgtcccgaggggcaggaggccagggtgggtggcctgcttggccaccccaagtgaagacctctcctctcccgctttttcctacacagccatagctctgggcctaaagctgattcctcccccaaaggctctcgcggcctggggggcctcaagtctgagttcctcaagcagagtgcggcacgtggcctcaggactcaggacctgcctgcagggagcaagggtaggaaggtggccactgagacagggtggtgtgttggggaagagggcatggagaggggagagcatgtgtgtgtgtgttgggctgtgtctgctcgtgtgtgcctgactgtgtgccagggttaccggtatgtctgtctgcatgtgcatgcctgtgagggtctgggggctctcagggtcttggggtggaagggcctggagcctgattcccgtccctgatatccctgctgggtggtcctctaatctttgctggtgtctctgcagggatgagaggcccaccctttccaagagcaacctttcccatttccctcacctttggctattagaaagttcttacctggctgggc

SEQ ID NO: 28607 - DNA, 1472 bp, Artificial sequence
  DNA replication origin
caaccctgctttgccctgtctgttgtactgggttttcacgtacaattttatttgcccaaaggggctctgataaaaaagatattttggaaaaccatgaacatgggcagtgatgtcccatgagtcacacacgtgaaggctcatggaatacacaagtcttcctgtccttggagaatgaggagctgagacaagtgtgtgtgaaattgtggacaggagaaaaagatgatctctcatcagggaccacactgtgatgaggaaggacagggtgctcaggctggagcaggtggtggctggaggatttgagtattggaggaatgaataggagggggtaggtggacaggaagcctttcggggtgtgagacggtggcattttccaaaaccccagcaagggccagggagggcttgagggttaggacagagagtggatctacctcctgggcatgaaggtggagagggtgaggccccagggggacagagagggcatgtgatggcttcactgaagacttcgaccttgatctgatggacagtagggagcttttgatgcttcttaagctggggaggcatcatgagtacaaagttcaagaaagagtaatgctcctgctcatgtccattggatacgaatgcggagggcaggggtctggggagaagtcactgatctatggaagcgctaagtgtcgggaggacttggtggtcccgggggaagggggaggatgggagcaaccctaagagttggctgcatgagagggaggaaggacgggcgaggaagagccgcatgtttgagctggggctggtggtatcttcccctggcagaaaccagggagtagggcagcgtgaggagaggtggaagggaggggccgtctcagggagtggctccattggatttggggtatggaaagtcccttgcatggggcgagggcataaacaggcgctagattgagcgtggactagagagtggcatgggtcctgctgcagctggggcatgggatgaccaagggtgggccgcagaacagcaggggccacgtgctgagtgggacagaaggagaggaccgccggtgaggctggggtgagggcagacacttcactctggaggagccaggaagcactggccagggcattgggtttggcagctgggagatgagaggagctcacacctgagggccaggaggtaacggagtcgggtgggcaggagccgcactgggtgtgtgtgagatgagggggccgtgctggcaggcaactggtccaagccagggccagctgggggcatacaaggtatattgggtgtgttgttttgtcttggatatcattgtgtcatttgttgtgggtcgtgctgggagtaagtgtagtgggggatgaatctaacccctggtgagcctgtgcggagtgtattgtttatgggattgtctggcattaagctgtggatccattgtaatgagtgtgtgtactgctgtgctgtgtctctttgttgggggtattag

SEQ ID NO: 28608 - DNA, 1034 bp, Artificial sequence
  DNA replication origin
ggacactgggggggggtgtggcggggggggtcacagagaaccacaagggggcactccagacacagtggtgaggggtagctcaggatagcaggggtgctcagaaccaccagggagcgctcaggacactgggggggggggggggggtcactcagaaccaccagggggcactccagacactgtggtgaggggtagctcaggatagcaggggtgctcagaaccaccagggggcactcaggacacttggtgggggtcactcagaaccaccaggggacactggagacaccagggagccctcaggacactagggggagctcagaaacaccaaagggcaatcaagacaccagggggatctcagaaccaccaggaggtgctcaggacaccaggggtctcagaaccactagggtgtgctcagaaccacgagggggccctcaggaccccaggggatgctcagatccactagggggatcttaggaccccagggggctcagaaccactagggggttttgaggacaccagggggcgctcaggacaccagggggtgctcagaaccaccagggggtactcaggaaaccaggggactcagaaccactagggagcactcaggacatgaggaggcactcagaaccaccggggacgatcgggacaccaggtggttcagaaccactagggtgtgctcagaaccaccaggggtgctcagaaccccaggggggcgctcaggacaccaggggcatctcagaatcaccaggccgtgctcaggacaccggggggtgctcaggacctccaggggcgcacaggacgcaaaggatagctcagaacctacagggggcgatcagaacaccagggtgcgttgaggacaaggggctcacaggacacaacgatgtgcttagtaaaccaggggttgctcacaaccaccagggggtactcaggacaccagggggtgctcaggaaaccagggagcagtgaggacaccaaggggcactgaggacaccactgctcccttaggaggcagctccaaatcaggtccctgagtggga

SEQ ID NO: 28609 - DNA, 927 bp, Artificial sequence
  DNA replication origin
cgcggcggcggggggcaaaacgacacaaaaagccctgacagtgggggcaagaagccgcggctggaaaaacctgtggcggagggggaaaaaagccgcggcggcgggggcggaaaggcgtaaaaagccgcggtggcctcggccaaaagccatgacggcaaaatgccggggcggcagggcaagaagccacggcgggaaaaacctgcggcggcgggggcgaaaagcagtaaaaagcaccggcgccgggggccaaaagccgtaaaaagccgcggcggcggtgacaaaaagccgcggcggaaaaattcacggtggcgggggcaaaaagctgcggcagcagggggaaaaagccgcaaaaagccgcaaaggctagggcaaaaagccgcggcggtggggggagaaagacccaaaaagctgcggcggcaaaaagccacggcggcgagggcaaagagccccaaaagccgcggcggcaggggctaaattccgcgaggccgggggcagaaagcaatggcggcgggggcagaaagccgcaaaaacccgcagcggcggggtcaaaaatccacgatggcaaaaagccgcgtcggcgggggcaaaatagtggaaatggggtagacagccagcacagcttggcattcctggagtgtgatgtggaaggaaaagtgcagaggaagacaaacaaagatgtaagtaggcttgactcagtgcagctaagaacccacatgttatcttgatgttatgtagcagctaattttttgtattttagtaaaggggttttaccacgttggccaggatggtctcgatctcctgacctcatgatccccgcacctcagcctcccaaagtggtgggattagaggcatgagccacaaagtgctcaaaaaatctattaattaaaaaatgtgtatgtagccgtctttaatctaccatgtccatta

SEQ ID NO: 28610 - DNA, 1203 bp, Artificial sequence
  DNA replication origin
ccgcggcggcggcggggtgcaaaaagcggcggggggcaaaaagccgcggcggtgggggggccaaaaagccgcagcgggcaaaaagccgcggcggcgggggacaaaaagctgcggctggtgaaaagccgcggtggcgggggggcgaaaagccgcggcgggtaaaaagccgcgggggcaggggggaaaaagccatggcagcgaaaaagccgcggcggcggggggggcaaaaagcggcggggggcaaaaagcggcagggggcaaacagccgctgcaccagttgggggaaaaagccgcggcgggcaaaaagccacggcggcaaaattcgcagaggcgaaggtcaaaaagccgcggtggtcaaaaagccttggcgcttggggggcaaaaagccgcggcgggcaaaaagcggaggcgcggtggggggaaaaagccgcggcggcggggcgggaaaaagccgcggcggcagggggggcaaaaagccgcggcggcggggggtcaaaaagcagcggcggcgggtgggcaaaataatggagatggggtagaaggccggcacagcttggcattgctggaatgggatgtgataggaaatgtgaagccaaagacaaaaaaagatgtaagtaggcttgactcattgaagctaagaacccagatgttatcttgagggtattaattaataagcagtttaaatcagaatggcacattctgatttgttttttgtatgttcacatttggcaggcatagatactgtttgaagagagaaaagtcagtagagagaggtaacaaacttaaatatgtgccaagtctagaaacaagagaccaggggtataaggacctttcaaaataaaatgcaagatttgaaaactgattggctgggggatgaggaaaaggcaggtctttaaggtccatccctgttttgctttaagttgttagggggtggttttatcacatgttgtagaatatgtcatttcagttttgaacatcttgagttaaattgtcctaacatatcttatgaatttgattttcttccctgggaagctaatatttcaaacacttaaagagtatatagatttccaacttgtatcccatttataaaactatctctaggctgctgatttcaggaggaggctcatgaatattctctttgcagagaatatatcaggagttaacaacagcttcaatatttgtggacgaccagttaactaagcc

SEQ ID NO: 28611 - DNA, 1064 bp, Artificial sequence
  DNA replication origin
cgcggcttttttcccgaccaggctttttgccccaccgccgacacagctttttgcaccctcgccgccatggctttttgccgccgcggctttttgcccgccgtggctttctgcccccacgccgccgcggctttttgtccccgccgccgcggctttttgctgccgcgactttttgcccccgtcgccgccgctttttgccaccgcgactttttgcccccgccgccgaggatttttgtccccgccgccgcggctctgagggcgggagcagcagactcggctgccggctctactggcgtcctggcaagggcagcgaccaggggtgctcctggtccagctctcctggctcagggattccttgcctaggcgccggcgccccgggctccttgcctaggcccctgtggcctgcatagagtggcgctgcctgcggaggcgatgggagagaataaggagggcggtggcgggggtgatgcggcggccacggagggtggcgcaggggctgcggccagccgggcgctgcagcagtgcgggcagctccagaagctcatcgtcatcttcattggcagcctgtgcgggctgtgcaccaagtgcgctgtgtccaatgacctcacccagcaggagatacagaccctggaggtaaggggttcggggacccgggctgggctccaggagtggcctggacacctccttcggggccccagttcactcctggctgagttgcatccttgagcccacgtcacccccttggaggcttcccctccctcctgcactcgctgacgcggcagccagaggacccgggaccagccctcaccttgggcaggatttgtggagcaggtgcgtggtgggaactgggatggaggctccagggtcccgtgggggtgggggtgggctgcgcgaggacatccccttaccccctgaatttccatctggtccagccctctcatcttgtaggtgaggaaaccgaaggcctgagggagaaatgacttgccaggaacccctgttaaggaaaattaacaaagtgtggttattaaagaagaactgagttgggagtcagacctggaggcccccac

SEQ ID NO: 28612 - DNA, 1375 bp, Artificial sequence
  DNA replication origin
tctctcagagttctggagaccagaagtcccaaatccaggtgcgggcagggccatgctccctccacaggctctaggggaaggtccttccttaccttatccagcttctgggagctccaggcttccctggtgtggggacgcattgtgccagtctcagaggcctgcgtcttcacatggcccctgcccctgtgttctgcatgtccttttctgtctctgaaaggactctttcattgagcttctttgactctaatccaacatgatgtcacctaaattcttaccttaaggacgtctacagagacctcattaaataagatcatattctgagttccgaatgtatgtgaagttgggggacaggcacagtttaatccataaagtgtttgtgtgtgtggagaataagtatgagaaatgtgagctgagggagtggggtgagtgtgcatgcgactgagagtgagcacatgtgagtgtgggtgggtatgtgggtgtgctccagtgtgtgtgagaacatgcatgtattagtggtgtgctggagcatctgcacatattggtgagagtgtgttagcggttgatgggcaagtggctgagcgtttgtgttgcaagtgtgacagtgtgtttgtagcatgtggttgtgtgggtgtatgtatgcatgcatttatgtgagtggtgtgtatgtccgtgacagcatgtgagtgggcaggtgactacagtcaggtgaagtgggagtgaaagcgtcagtgcattgagccagtgtgtgtgtgagggtgagcacgagggaggcatgagtgtgagtgtgaggggattactgggtgtgccaatgagatgaagtgtaagtcagtgaggcttgatgagtgtgaggaagtatgggtggcagcacaagtgtaagtgtgcgattgtgagcatttgtgtaaatgtgtatgagtgccttgaatcagtgtgagcacgagtgacgttattgtgaaggcgtgtgagcgaatgtgagcattttgcttgtgtcagtgggaggtaacagtgtaggtgtgagtgtaaagtgagaaagtgggtgtaggtgtgagtgtaaagtgagaaagtgggtaaaggtgtgagtgggtgaggaatcggttgtgactagtgttgagtgtgagtgcatatgtgagtttttgtatgcagtgggaggggtaagtgtatgtgagagtgcataggagtgtgtgtcagattgcatcttaggttgtgtgtgcatacgtgtgactgggattgtgtgtgtgttagtgattgcgacagtggtgtgagtgcacctgtgtgagggtgggtgtgtgagtgcccatgagtgtgtctgaataacttagtatgggtgtgggtgtgaggatgcatgtgagggtgtgagagtgtgtgtgtgtgagcgcat

SEQ ID NO: 28613 - DNA, 1078 bp, Artificial sequence
  DNA replication origin
cccgggatggctgagctccacagccacggggcctcatgggccaggccttgggacctcgatgcagcagcctcgcctcacctggccccaagtgcggcctcagcccgtgggctcccagccacacatgcacagaccccctgacaccacccaccccctcccgccaggtggtgtccacgcccctgtgacaagctcagccccttcctgtcctcaggccaggggatcccagggagcctggctccacaggccagggtgtggggggacctcctggccacacctcagccatgtggaggcagcacccgcatgcctgagctcacctgtccggctctctggcagcatgcgtccactgtggctcctctcctgcagggccgcccaccttcctcccagggaagcccgcccctccccccggcccctggcccccggcctggtcccctctcgggtgtgcccaggctgagctgcgcccggggtcgccctcacctggtgcgcagggcctgccaggcggcgttgatgtcggcgtagaggttcgtctcggagggcctgcccgagctggcaccgtagccagagtagtggtaggagaaaatgttgcagtggaggcgggaacacaggccaatgtagaagctgctcatctggcccaggtccaccgcgttgccttccttgttcatgcacctctggtcagacgcagttcagctgatctaggctgggcttggctagcattggcttgaagctgcagctggtgtccagatctgttctacgtatttgtgattctcctcagccctcccgggtacttgaagcatgttattgttatggcaaaagtcaggagtgcaacctgcctgtgcaaaaacatgccaggcttctgttgcctgaaatcctctaagatacccctttggcttaagcaaaatcacacagcaaggatcaaagtcaaggagtggggaattatatctgtcccttagagatggagataggagagagtgtgaacaaatgcaggaaaatgatctcatctaccagagtgtccttaaatattttaacataataaattcagtattgtttttgtttgattgaatgaagctttgcatggacacagtac

SEQ ID NO: 28614 - DNA, 1717 bp, Artificial sequence
  DNA replication origin
tgcatgtgtggctgggagcccacgggctgaggccgcacttggggccaggtgaggcgaggctgctgcatcgaggtcccaaggcctggcccatgaggccccgtggctgtggagctcagccatcccggggcagggcctgcagggtcaggtgcagacccccagcacacacctgaggtctcggccagcttcgattccagatccagccctcctaatcatccaggtccccagccctgcgcttgcctgggcccttcactggtgtttgagcaccacccgggccagtgctgctctggactagaagacccgcgtgggcctctgggggcctttcctgctcgccacccgctggggctgtctcgtcctggccctgccctgcccagcccagtggtctgacccgctcctgcaggggccaggcgcagctctgagaagtcagaggccctgggaggtggggtcctcgttgccttggagatatcccaggcagtccctgctgtgggcgtgggagctgggtcccctggcaccaccctggctctgggggcctcccggcagtgtggggcgccgaaaccaagcaccacttcatgcagcttcctgggccccctcctgtctctactgcccggggcactggcagagtcacaccccccatggccagctctgagctctgtctactccgccgtctgtcctgctgtcgctttgtcctgcaggatcctcggcccagagccgtgagggggaggccagatagcgctcagggcctctatggaggatgtgtcttgtttgattgtctgagtggtgacatctaggtggcagctgggggctcctgcctggagcaggtgacagggctgggctggctcagcacactactggccttggctgccagggagcaggccagggaggctgaggcagagctgcagccacaggcacaagccaggcagcatcctttggggcatgggtgagcagtgagctgtggagtgctgccaggaggctgggattccaggccagggagggagacagccctgctggtggagtccgaatgccagccagacgggacgcacacctgcccatgctcctgtctcgcaggagggcatctgcctggcatcagagcctggagcttgtgggaggagagttctggggtctcggcatcgacagggtggcaggtgggtcccgcgtggttgggactgggcatgaggaggccttgggactggtgctggatcagctgggccaggggccgcacaccagtgacctgggagtgggggtggccctgggtgggagctggtggtgctgaggtggcggaggacttgtccactcccaagggaaggcactggtgggaggagatgctgcccccgcagccaccaccctcgatgttgacctgggttgggctggcagctcattgggcatgggactctgagagtccaaaattgggtggagacatctggggacacagctgcctgaattcctcatggccaagggggtaggcaagggctgcagggaggaagagtgtcccggccagtgcaccaggaagagctttctaacctgggcaggaaggcgtgaagcattcaggatgtgggaggccacacagttcccagtgtgcgcctaggggtgaccaagaggaggagaggtgccagggcttcccctaccctagcccgagggggactccctagccaggatccagcagatcctggctaggaaacgccagtgaaccatagtggcagggaacaggaccaggccgccggct

SEQ ID NO: 28615 - DNA, 1328 bp, Artificial sequence
  DNA replication origin
aaggcattgggaacagccgccagctctagagggcgtgaggcggggcgcacggggagggggtgcggctaacgcgcgcgtgcgcggttcatgtgtgggcccgcgggggcgcgcgcgcggttagcgggcagcgagggtcacctgggcggtgcgcagcacggcgggaacatggcgcgcggaaccggcgcgcgcgcctagctggcgggaccgttagatcgaggcggatgcggcccggaccccgtggatatggagcaatcgccgccgctggcgccggagcccacccaagggccaaccaccacaaggagctgaaggcggcgggagcccgagtcgccgccggcgtcggtgccggtgagtgcgtgaggggctcgggccgggagactttctttgtgaaactccggcggtgggagccaggccgggcctgaggctgaggagcgcctgtgaggcggaaggcgtctcgcagtccgggttccatcccagctgcgagccttcaggcggcgggacctggtccaaagcctgcctgcctcagtttccactagagtgggtgtgggtgtgtgagggtgtgtatgggtgttggcctgcgcacaccggagagggggtgtcggtatacagtcggcgcctaatgctcgcggcgcctcccccactctccccagtccccgtgggtcggaacctggggactggagtccactggagcagtaggcggcacccgcggggagacaggtgtcagtgcagcccgggaggctcaggtgctacctttcctgggtggggtttgtgaggagggagctcttcgtccccggaggtgagcaagtctgtcggtggctcatcacagagtgctgttttggaaagcgttccacccacctcagcttcctgctgtgtttgggccactagtcagggggaaggatgctgagcgacatggactttagaggtggggcccccgctggacgggatgggtctgggctctcgagctaacccccaccctttcctcccaaacccgttagagcgtaggaatcattgggagcacctgataaaaatgccacggattgtggctcacctaagcagggaagccgatttggaacttaaacaagctcccaagttgtgatcagtcgagcttggcaagcactgtttgagagagtaggtgtcctgcaagcaggagccggttttgtgtattcctcaccatggcatcttggtacctggcatggtgcctgacacacggtagatgatcagaaaatatctgtagaaagtctaaattattagggagagtgcagcataggagttcttgagacattttcaggagcttcctgagattaatatctgtcagatttgttttacagtat

SEQ ID NO: 28616 - DNA, 1185 bp, Artificial sequence
  DNA replication origin
gcggcggtgcccagccgggaaccacgcgctcacccgcggagtcggacgggcccggcgggggtgggcgagacactgggaacagcggccagctccagaggggcgaggcggggcgcgcggggagggaggggggcgcggcgaacgcgcgcgtgcgcggttcgtgtgtgggcccgcgggggcgcgcgcggctggggggcagtgagggtcgcctcggcggcgagcagcacggcgggaacatggcgcccggaactggcgcgcgcgcctagctggcgggaccgttagctcgaggcggacgcggcccggacccggtggatgtggagcagtcgccgctgccggcgcccaagccgaccccagggccgacccccgcaaggagctgaaggaggtgggagccccagtcgccgcgggcgtcggcgccggtgagtgcgtgaggggctcgggccgggagactttctttgtgaaactccggcggtgggagccgggccgggcctcagcggctgaggagtgcctgtgaggcggaaggcgtctggcagtccgggttccatcccagccgctagccgtcaggcggcgggacctggtccgccgcctgcctgcctcagtttccacgggagtgtgtgcgggtgtgtgagggtgtgtatgggtgttggcctgtgcacaccggagggggggtcggtatactgtcagcgcctaatgcgcgcggcgcctcccccctccccccagtccccgtggggcggaacctggggactggagtccaccggagtagtaggcggcacccgcggggagacaggtgtccgcgcagcccgggaggctcaggtgctacctttccctggtggggtttgtgaggagtgagctcttcgttcccagaggcgagcaagtctgtcggtggctcatcacagagcgctgttttggacagcgttccacccacctcagcttcgtgctgtgtttgggccactagtcagggggaaggatgctgagcgacatggactttagaggtggggcccccgctggacgggatgggtctgggctctcgagcttacccccaccctttcctcccaaacccgttagagcgtaggaatcattgggagcacctgataaaaatgccacggattgtggctcacctaagcagggaagccgatttggaacttaaacaagctcccaagttgtgatcagtcgagcttggcaagcactgtt

SEQ ID NO: 28617 - DNA, 1020 bp, Artificial sequence
  DNA replication origin
ggaaagctgggtgtccacggagggaagggccagccctgcctcccccaagatactctgcgcctcccaggcagtgtagattctgtctgctgtagacaaaatagtggccccccaaaaatgttcatgtcctaattcccagagtctaacatacaaatatgttagatggcatggcagtgggaaattagatttcaagtgaaattaaggttgcaaaggtggcgggagcaaaaagccgcagcagcaaaaatccgcggcggcaggggcaaaaatccgcggcggcgggagcaaaaagccgcggcgggcaaaaagccgcggcggcaaaaagccgcgtcggcggggtggggggcaaaaagccgcagcgaggcaaaaagccttggcgggcaaaaagctgaggcggggtggaggcaaaaagctgcggcgggtaaagagccgcggcggtgtggggggccaaaagccgcggcggcgggtgggagcaaaaagccagggcgggcaaaaagccgcggcagcggagggcaaaatagtggagatggggtagaaggccggcacagcttggcgttgctggagtgtgatgtgataggaaatgtgcagccaaagacaaaaaaagatgtaagtaggcttgactcattgcagctaagaacccagatgttatcttgagggtattaactaataagcagtttaaatcagaatggcacattctgatttgttgtttgtatgttcacatttggcaggcatagatactgtttgaagagagaaaattcagtagatagaggtaacaaacttaaatatgtgccaagtctagaaacaagagaccagggggataaggacctttcaaaataaaatgcaagatttgaaaactgattggctgggggatgaggaaaaggcaggtctttaaggtccatccctgttttgctttaaggtattagggggtggttttatcacatattgtagaatatgtcatttcagttttgaacatcttgagttaaattgtcctaacatatcttatgaatttgattttcttccctggga

SEQ ID NO: 28618 - DNA, 1194 bp, Artificial sequence
  DNA replication origin
cccacttttggtaacacctttcatttcttatcatcttcattgaatctcacttcttcacatttaccaaaatgtctacttttgagccatggcacttctttgaatcttcagatccaccatatcctgatcaagccttcctttttatctgtactctgaggaatcaaaaacaggcatttttacaagaaagtctaggagggaaacataaatctacgtgtcaaaagaatgaacatagaaaataatgtgtcctggttaacaaaagttctcattgtaaagtgttatgcacaagattatggaattttatgtgccataaatgaaattgtcttgatttgtctaaaactacttttaaaaattacatgttactctaataaattttgctgctgctcactctttgggtctgctccacctttaagaactgtaacactcaccatgagcatccgtggtttcattcttgaagtcggccagaccaagaacccaccaattctggacacagtaggagaaatgtccaggtaggagctaggtgctgcggggctggatgcaggtaggaacagggtgtggtaggagcagggtgacagctgggccaggtccaggaaggggcagagtgcgggtaggagcagggtgctggtggcgcagggcgcaggtagaagcggggtgcaggttgagccaggatgctgacggggcagggcagggtcctggcggggggaagcgtgggtaggcgcagcgtgcgggtaggatcggggtgctggaggggcatgggagggtaggacggggtgcggtaagggcagggtgattgcagggcggggcgcgggtaggatgcggtgctggcagggccaggtgtgggtaggagcagggtgctggcggggtggggtgcggttaggactgggcagtgggtaggtgaagggtgatggcagggcagggcagggcattggtaggagcggggtgccagcaggagtagggtacaggacgcgggtaagatcggaacctggtgcaggaaaggccaccagtagcctgggtcccagaacctctgcaggcgcagccgctcctttcacctggtgtgccagcttgcagtttgtgcatttgtcccttttggctgcacagagaaggcagggaaactgcgtgggaatgcaaggtcgggaacggccgggggtgcgaccaaggggacttggagaaccgccccacctccccaggttcccctggcag

SEQ ID NO: 28619 - DNA, 961 bp, Artificial sequence
  DNA replication origin
taagggcagggtgattgcagggcggggcgcgggtaggatgcggtgctggcagggccaggtgtgggtaggagcagggtgctggcggggtggggtgcggttaggactgggcagtgggtaggtgaagggtgatggcagggcagggcagggcattggtaggagcggggtgccagcaggagtagggtacaggacgcgggtaagatcggaacctggtgcaggaaaggccaccagtagcctgggtcccagaacctctgcaggcgcagccgctcctttcacctggtgtgccagcttgcagtttgtgcatttgtcccttttggctgcacagagaaggcagggaaactgcgtgggaatgcaaggtcgggaacggccgggggtgcgaccaaggggacttggagaaccgccccacctccccaggttcccctggcagagcgcaccaccccccgcccccgcgatttttcacaggcccaggccctgtggagctgggcctctgtggaaggggtgggggcagggcagaggcaggaggacagaaagagctgggcagggaagggggccaagagagcctttctcaacatccaggttagtggataggctgggggtcctgcagggctagccaggaagaaatgtaaccatgtgtggaaaaacaggaattgggaaggggtgaggaagaggagttggtcaccaggcagcaggtgttgccttaggcaatcataggggctgaggggctggcttctcattgtcaggccctgggctggtaagtttcaaggaaatcaaatgaaacaaatgtaactttctttaagactagcagaatcaatttctctgtttattcaaggaagctgtatacatccggtctatgggagaattgggcacctttcagtctcatgcattttgtcacagggaaaagaactggagaacagtttgttgattgaggagctgaagtattaagtacagagccacatacatactt

SEQ ID NO: 28620 - DNA, 1692 bp, Artificial sequence
  DNA replication origin
cttggggccaggtgaggcgaggctgctgcatcgaggtcccaaggcctggcccatgaggccccgtggctgtggagctcagccatcccggggcagggcctgcagggtcaggtgcagacccccagcacacacctgaggtctcggccagcttcgattccagatccagccctcctaatcatccaggtccccagccctgcgcttgcctgggcccttcactggtgtttgagcaccacccgggccagtgctgctctggactagaagacccgcgtgggcctctgggggcctttcctgctcaccacccgctggggctgtctcgtcctggccctgccctgcccagcccagtggtctgacccgctcctgcaggggccaggcgcagctctgagaagtcagaggccctgggaggtggggtcctcgttgccttggagatatcccaggcagtccctgctgtgggcgtgggagctgggtcccctggcaccaccctggctctgggggcctcccggcagtgtggggcgccgaaaccaagcaccacttcatgcagcttcctggaccccctcctgtctctactgcccggggcactggcagagtcacaccccccatggccagctctgagctctgtctactctgccgtctgtcctgctgtcgctttgtcctgcaggatcctcagcccagagccgtgagggggaggccagatagcgctcagggcctctatggaggatgtgtcttgtttgattgtctgagtggtgacatctaggtggcagctgggggctcctgcctggagcaggtgacagggctgggctggctcagcacactactggccttggctgccagggagcaggccagggaggctgaggcagagctgcagccacaggcacaagccaggcagcatcctttggggcatgggtgagcagtgagctgtggagtgctgccaggaggctgggattccaggccagggagggagacagccctgctggtggagtccgaatgccagccagacgggacgcacacctgcccatgctcctgccttgcaggagggcatctgcctggcatcagagcctggagcttgtgggaggagagttctggggtctcggcatcgacagggtggcaggtgggtcccgcgtggttgggactgggcatgaggaggccttgggactggtgctgggtcagctgggccaggggccgcacaccagtgacctgggagtgggggtggccctgggtgggagctggtggtgctgaggtggcggaggacttgtccactcccaagggaaggcactggtgggaggagatgctgcccccgcagccaccaccctcgatgttgacctgggttgggctggcagctcattgggcatgggactctgagagtccaaaattgggtggagacatctggggacacagctgcctgaattcctcatggccaagggggtaggcaagggctgcagggaggaagagtgtaccctgtcccggccagtgcaccaggaagagctttctaacctgggcaggaaggcgtgaagcattcaggatgtgggaggccacacagttcccagtgtgcgcctaggggtgaccaagaggaggagaggtgccagggcttcccctaccctagcctgagggggactccctagccaggatccagcagatcctggctaggaaacgccagtgaaccatagtggcagggaacaggaccaggccgccggcttcgcc

SEQ ID NO: 28621 - DNA, 1035 bp, Artificial sequence
  DNA replication origin
gagctccacagccacggggcctcatgggccaggccttgggacctcgatgcagcagcctcgcctcacctggccccaagtgcggcctcagcccgtgggctcccagccacacatgcacagaccccctgacaccacccaccccctcccgccaggtggtgtccacgcccctgtgacaagctcagccccttcctgtcctcaggccaggggatcccagggagcctggctccacaggccagggtgtggggggacctcctggccacacctcagccatgtggaggcagcacccgcatgcctgagctcacctgtccggctctctggcagcatgcgtccactgtggctcctctcctgcagggccgcccaccttcctcccagggaagcccgcccctccccccggcccctggcccccggcctggtcccctctcgggtgtgcccaggctgagctgcgcccggggtcgccctcacctggtgcgcagggcctgccaggcggcgttgatgtcggcgtagaggttcgtctcggagggcctgcccgagctggcaccgtagccagagtagtggtaggagaaaatgttgcagtggaggcgggaacacaggccaatgtagaagctgctcatctggcccaggtccaccgcgttgccttccttgttcatgcacctctggtcagacgcagttcagctgatctaggctgggcttggctagcattggcttgaagctgcagctggtgtccagatctgttctacgtatttgtgattctcctcagccctcccgggtacttgaagcatgttattgttatggcaaaagtcaggagtgcaacctgcctgtgcaaaaacatgccaggcttctgttgcctgaaatcctctaagatacccctttggcttaagcaaaatcacacagcaaggatcaaagtcaaggagtggggaattatatctgtcccttagagatggagataggagagagtgtgaacaaatgcaggaaaatgatctcatctaccagagtgtccttaaatattttaacataataaattcagtattgtttttgttt

SEQ ID NO: 28622 - DNA, 1354 bp, Artificial sequence
  DNA replication origin
tcccgtgggagtgcgggcgtgcgtgcgtgccgcggaaatcccgccttccggcgccggcggttggccctggctgcagtgggtgagctccaagtaggaagataaacgggattgcgggaagcgggagagtcaggaggagcagggaagggctcctcttccccattggctgcgcccgcagagccgccttgcgattggcggtaagcgcgggtcggtggagggggcggcagtcccgcgcgggcacgcccctcgggtagcgagaggcgtcgggatcgcgggcgccggctgagccagcggctgctgggaggctgtgtgcgcacgcctgcggggcgaggaggccgggccctgcgcctcaggtcctggcctggggcaccggggcgtccggcgtcggaggcggtgcggggttggcgggaggcacaaggggtgggggggcggggggggggttgctgcgcggaccgcccgcggcgcagccccctgcctctctctatctctaagtggtggtggctgtgggtttttctgcaggtgagccttttgagtaatttgtttcatgcaggcgccctgctgttgggtaaagcggcagattcacgctgctgtcatttgtcgttcaaacgatgggcttcctggcagggcgcggtggctcaagcctgtaatcccagcactttgggaggccgaggcgggaggatcatgaagtcaggagatcgagatcatcctggctaacatggtgaaaccccgtctctactgaaaatacaaaaaaaaaaattagtcgggctggtggcgggcgctggtactccaggctactcgggaggctgaggcaggagaatggcatgaacccgggaggcggagcttgcagtgaactgagatcccgccactgcactccagcctgggcgacagagggagactccatctcaaacaaaacaaaacaaaaaatgatgggcttcctgtcatgtgtgtgtgtaccttttggatttgagggcaggggtatgacattgtgatttggcctcctgtgacagtccattctcaaggtctcgccagcgtggtgcagaaacccggcataccttgcctatctaggaaggaggctttcccttccccacctccctctccctccatctcttccctctatctctctttcctcttcattcccttccccgagctcttctctcccatctttctgttcttttttttctgcattaaacttttcgggagtgtctttgtaaaatattaaaaagcgttaggtcttcaacatgtatgtttacttgcaggcctgagaactgggaggaagctggagaaaagatgccctctgaatatttgtgtttggctgcccaggctcgccttgactccaaatggttgaaaacagatatac

SEQ ID NO: 28623 - DNA, 1355 bp, Artificial sequence
  DNA replication origin
gttctggagaccagaagtcccaaatccaggtgcgggcagggccatgctccctccacaggctctaggggaaggtccttccttaccttatccagcttctgggagctccaggcttccctggtgtggggacgcattgtgccagtctcagaggcctgcatcttcacatggcccctgcccctgtgttctgcatgtctttttctgtctctgaaaggactctttcattgagcttctttgactctaatccaacatgatgtcacctaaattcttaccttaaggacgtctacagagacctcattaaataagatcatattctgagttccgaatgtatgtgaagttgggggacaggcacagtttaatccataaagtgtttgtgtgtgtggagagtaagtatgagaaatgtgagctgagggagtggggtgagtgtgcatgcgactgagagtgagcacatgtgagtgtgggtgggtatgtgggtgtgctccagtgtgtgtgagaacatgcatgtattagtggtgtgctggagcatctgcacatattggtgagagtgtgttagcggttgatgggcaagtggctgagcgtttgtgttgcaagtgtgacagtgtgtttgtagcatgtggttgtgtgggtgtatgtatgcatgcatttatgtgagtggtgtgtatgtccgtgacagcatgtgagtgggcaggtgactacagtcaggtgaagtgggagtgaaagcgtcagtgcattgagccagtgtgtgtgtgagggtgagcacgagggaggcatgagtgtgagtgtgaggggattactgggtgtgccaatgagatgaagtgtaagtcagtgaggcttgatgagtgtgaggaagtatgggtggcagcacaagtgtaagtgtgcgattgtgagcatttgtgtaaatgtgtatgagtgccttgaatcagtgtgagcacgagtgacgttattgtgaaggcgtgtgagcgaatgtgagcattttgcttgtgtcagtgggaggtaacagtgtaggtgtgagtgtaaagtgagaaagtgggtgtaggtgtgagtgtaaagtgagaaagtgggtaaaggtgtgagtgggtgaggaatcggttgtgactagtgttgagtgtgagtgcatatgtgagtttttgtatgcagtgggaggggtaagtgtatgtgagagtgcataggagtgtgtgtcagattgcatcttaggttgtgtgtgcatacgtgtgactgggattgtgtgtgtgttagtgattgcgacggtgtgagtgcacctgtgtgagggtgggtgtgtgagtgcccatgagtgtgtctgaataacttagtatgggtgtgggtgtgaggatgcatgtgagggtgtgagagtgtgtgtgtgt

SEQ ID NO: 28624 - DNA, 1201 bp, Artificial sequence
  DNA replication origin
agaaagccgcggcggcaaaaagccacggcggcgagggtgcaaaaagctgtgtcggcggtggggcaaaaagcctggtcgggcaaaaagccgcggccgcggcggggggcaaaaagccgaggcgggcaaaaagccgaggcggggtgggggcaaaaagccgcggcggcggtggggcaaaaagccgcggcggcgggtgggtggcagaaagccgcggcgggcaaaaagccgcgggggcagggtggaaaaagccaaggcggtgataaagccgcggcggcggggggggggggggacaaagccctggcgggcaaaaagccagggcggcaaaattcgcagcggtgaagagtcaaaaacccgcggtggtcaaaaagctctagcgttgagggggcaaaaagccgcagcgtacaaaaagccgaggcgcggtggggggagaaagccgccgcgacggggcgggaaaaatccgcggcggcggggggacaaaaagctccggcggcggggggtcaaaaagccgcggcggcggagggcgaaataatggagatggggtagaaggctggcacagcttggcattgctggagtggatgtgacaggaaatgtgcagccaaagacaaaaaaagatgtaagtaggcttgactcattgaagctaagaacccagatgttatcttgagggtattaactaataagcagtttaaatcagaatggcacattctgatttgttttttgtatgttcacatttggcaggcatagatactgtttgaagagagaaaagtcagtagagagaggtaacaaacttaaatatgtgccaagtctagaaacaagagaccagggggatagggacctttcaaaataaaatgcaagatgtgaaaactggctgggggatgaggaaaaggcaggtctttaaggtccatccctgttttgctttaagttgttagggggtggttttatcacatgttgtagaatatgtcatttcagttttgaacatcttgagttaaattgtcctaacatatcttatgaatttgattttcttccctgggaagctaatatttcaaacacttaaagagtatatagatttccaacttgtatcccgtttataaaactatctctaggctgctgatttcaggaggaggctcatgaatattctctttgcagagaatatatcaggagttaacaacagcttcaatatttgtggacgaccagttaactaagccac

SEQ ID NO: 28625 - DNA, 709 bp, Artificial sequence
  DNA replication origin
atgaggtagttacatgcaggtgcctagggggctgctgcaggagcccccagaaggcgtccctctgatggggtgggagatctgaaagggtttctgggggggaggtgaggattgagctgggtcgagaggacattccggcctggaggactgccacacagaaccaggtgtgttccaggaatggtgaggggttaggtgttactagagaagggggccacgtggttagtgagggaggagagctcactgagggcatgcgtgctggcagcaggtggcttaagcagagggctgacgtggtcggatttgccttgctctgggaggtggatgggaaagccgtatggtggcagatagggaggaggcgccagcagtggggatgatggcgggtatgtttgcagttgacatggaaagcgctgggttgcggcctgggctagggggccaagagggccgagtctaaggtggtttgcctgcccacgactacagcaggggctacacgaggtggtcaggtcaggcaggacaagggaaggcccattttggacaagctgagtctagaatgtctctggggacatccaggagccaatgtttagcaggaggttaggtgtgagtctgggccgcagagaaaaccctttcagggataagagtggctgggaagaaggtatagggtgtcagctgaagagtgcagatcccagagggagcagaataacagtgggaggagggtgtt

SEQ ID NO: 28626 - DNA, 1617 bp, Artificial sequence
  DNA replication origin
ctagacccaaggcagagcgagcccctctcctcctgtccccatctgaccaagtgctgttgagtctccagccttacacacctggccccttctgtgggtcccactgccaccatggcggttccaggaggtccaagcctccacctggccacccagtagctccagtcctcagcagctggtggtggtggtggtggggagggggggagtttctagtagcctgaggtagtgttggagacagttgcccccgtagtgggcaacctcagtacgtcgctccacctgtctgtgccccagcgtccttggggacagtaatagtaggacctacctagagagccaagtgtgctgggcaggtcccatccccagcccggctatgcctggcctgtccttgccttgtggagctgcctatgccccctctagtccctgcttccccaaattcactgtgcggcctgaacatctcctccaggctcccccctcgagactgggatgccatcacgtggccccaggcctggtgctcaggacaggaaaagatttctcaagtgggagccagctgggaaaagggggcagtccctgaggctggccaagggctgctcacctttgaacaagggacagatgttccagacattgatgctgccggccttcatgaactggcccagcgagatctccaagaagaaaatggggattcctccgaccagggctatcaggatgcagggaataaggaacacacctgggggtggaggcacagggtggactcagggtggcccccagccaggctgcccaggcccagcgggccagcccagactccaaaggccccatcacaacttcccactgggtgagtcagtgtaggggtggccactgactcgggccccacgtagggtcttgaggggctgggttcagtgtgttgaagaggtgctacagtagcccctgggccattgaagtcctattccctgggtggcagagaggcgctaggcccacagggcttccacccccacggtcacttggggtgatggccatggaggacacgcacgctcagacacgcagcctgtccctagtgccgcaattccctgtttcaggcagcacagtgagggcatgtgcgtgtgtgcatgtgcgccaaggctgggtgatcaggcctgaggggctcatccaaaggcagggagcgcgactgtcctgcacttggacgcttgcctgcaagtgtgaggtccaaggcagagggcgggtgggtcacagtcccctgctggtgggatggccacgtgcaaggacagagggatacaggtgcgggaagaggggccaggccggccttagcaagcccagggagtcaggctctacaggagataggcagggcatggcacaggccctggccagcaggctggggtgggggtggcaaaagggcagggagagctgggtgccactacccccttctcctctctgggcctcctacccttgccctggctgggctcgctccactactcagaggccgagcttggctgcaacttgcctgactccaggtcccagcatccttctcctaactttgggcaaaggcctttgctctggacctctgtttcccacccatcactgggtcacttcggcttccagaaaccccagtgctgttttgtagtcacaggacacacg

SEQ ID NO: 28627 - DNA, 1825 bp, Artificial sequence
  DNA replication origin
agtccgcccaccttgtccctgccctcctcccggggaggagtcgccgctccagcgggaggcaggatggttgctacctggggcggccgccagctcctcccgcagtgctccgggccgcccctcaccccagggtcgcccgctcctagtgtggcccaggcttcccggcctgcccctcccagccctaggaagacgtcccccgggccccctcagccctccgcctccccttctctccctttctccccgctcctggcaggctgcagccgtctcctcccggtgctcgctccttccttgagctctgtccaccgctgcccactgggggctagagcttcccggctaccctggaagctggaggctgggaccagctcttcaggtgacaggcctctgtgtctccacagtggccagaggggagcctgcctgactgatgagcaaggctccactttgtcaccaaggcagagaaggggcccgggtaaatgaccccggtggcccccacccctgcctggcatgagagtgggtaggggcttcggacttgaggggactggagcgggaataaggcaaggctgccccctggtgcctggcgggtgcacagacccttccccaaaggcctcaggtctgaggtcctggctgcccgccccccacccaccccgtgttcctctccccaggacccccaggcctacccagcaagagccagcttgttgggctgcctctccgccaccagctgagcagcttggttagaattttctagggcaagagtagcctgggggtggggtggggaaggaagtggtcattctcctggcctgggaggtaaagtgtgcccccctcaacttcaagctccctgatctgatcgtggacactgcagtccccagatggctcatcccgttaagctaagccctcggccatccctccagctttaggaagaaaagcagttctggcccaagccagactgagcttcctgggtgagggaggggcagtgtccctacccaggcttggaggaggagcctcaaggggtgtgtgtggttgggggagacaggcggtgtcacctgtgcttagaccaggggcggtgggcgggtacccttgaggtggcaaggtcacactgctcatcagaagtttctcactagggtcttctctggcccagcctttgactgaagctggtctggagacaggggcgttagagaagtgactcatagatggcctaaataagcggggccactcaaggacccaggacagggggaagagggccaacccatctggaccgcaggcaaaccccatggcctttgagagaagagagaagaggacccggtgaagtaggctccgagggcctcagcccagcaggagcgcagggtgggcgcgtgatgtcatcgaagggaagacagtgacctgggggagggccgctttgagggagagtgcaggccaccgccagagagctctgggagccgagggcagggaagactttcagatgttgcttgtccaaggggtgggggtggaagggagagagagcagaggctcgagagggatgtaggagagctgatggcactttggggacagcctcagggctgcaattgaggagggctccctccctcatgcaggcttttcctccaggagctgcaccaggaactcacagaggatcagggagaattctgagaacatgctactgtggtgctgcctagagaggaaggataaatgatgacaagtacatctctgagtaacgtatggccacttgttcatgaaaactgtttttctgaaagcttgtgaaggtcttgaaatactcgctatcagttgaggacaaacatttacaccctccttccacagggagttcaagcaggctggatgg

SEQ ID NO: 28628 - DNA, 1255 bp, Artificial sequence
  DNA replication origin
gagaccatcctggctaacacggtgaaaccccgtctctactaaaaatacaaaaaaaaaattagctgggtgtggtggcgggcgcctgtagtcccagctactagggaggctgaggcaggagaatggcgtgaacccgggaggcggagcttgcagtgagccgagatcgcgccactgcactccagcctgggcgacagagcgagactccgtctcaaaaaaaaaaaaaaaaaaaacaattccatgatgtatacatgtatcatagcatgtgtgaagcgacctacctgtatgaaggtgaggtgacctggtcacgtgacagtgaggtgacctgggggatgtgtgaggtgacctgggggatgtgtaaggttacctgggggtatgtgtgaggtgaacttgggctcatgtgaggtgacccagggtgcatgtgtggtggcctgggtgcgtgtgaggttacctggacatgcatgaggtgacacggggatctcatgaggtgacttgggcatgtatgatgtgacctaaggcatgtgtgaggtgacctgtgggacgtgtgaggtgacctgtgggacgtgtgaggtgacctgggggatgtgtgaggtgacctgggggatgtgtgaggtgacctgtgggaatgtgtgaggtgacctgtgggacgtgtgaggtgacctgtgggacgtgtaaggtgacgtgggggatgtgtgaggtgacctgggggacgtgtgaggtgacctgtgggacgtgtgaggtgacgtggcggatgtgtgaggtgacgtggggaatgtgtgaggtgacctgggggacgtgtgacgtgacgtggggaatgtgtgaggtgacctggggaatgtgtgaggtgacctgggggatgtgtgaggtgacctgtgggacatgtgaggtgacctggggaatgtgtgaggtgatgtgggtgcgtttgaggtgacgtgggggatgtgtgagcttagcaggagtgtgtgtgaggtgacatggggaatatgtgaggtgacctgcctgatgtgtgaggtgacctgagcacatgtaaggtcacctaaggcgcatctgaggtgacatgggggacgtgtgaggtgacctggggaacgtgtgaggtgacctgtgggacatgtgaagtgacctggggaatgtgtgaggtgacctgtgggacatgtgaggtgacctggggaatgtgtgaggtgatgtgggtgcgtttgaggtgacgtgggggatgtgtgagcttagcaggagtgtgtgtgaggtaacatggggaatatgtgag

SEQ ID NO: 28629 - DNA, 1921 bp, Artificial sequence
  DNA replication origin
gtctggtttgttctgagagctgagacctgtgctggatgtggagccaccagccagcagagaggagctcttggtctgatgggagatggagctcctgccctcagggtgctccaaggatcattaattcatttattcaacaaatattgatgagcgcttgcatgctgctgtaggccctgggatatggaaatgagaggacggacaagctccctgtccccaggacagcctgaggctgcagtaagttcttggaaaggatcaagctgatcagaagcgggagctgcattgagggaaaaatatggccagagaaggcctcgctgaggaggtgacattggtgatgctggagttcagatctgaaggggaagaaggaagcagccacatatagaagtgagggaggggggcttaggcagaaggaacagcaagcagagaggccctgagaaaagaaaggcttggctcgctcacctgcaagggccccctggcttgacatagtgagaaaggtgtgaagatgaatttggagaaaggcaggtacagaccacaggagactttagatttgattctgagggcgatgggatctcttgagaggatgctgagcatgggagagatgtgatctccttttcattctaacatgattgctgcagctgctgctggagaatggatgcaggagcaagagtagagactgggaaggtctgtgcatcctccaagcaagaggcgttgatggcatggaaagatgtctttcctctggcaggaaagacagagacaggggatgttttggaggcagaacagttgtgacttcctgatggatgggatgtcaagggcgaggaaaagggaggagtcaagggcagctcccaggtttctggacaactggatggattgactgagctggaaaagatgggggtagagagtggagaagaggtttgatggtaagaaatcacatggcctggcaagtattgtgcaaagtgcccatgggacctgcaaatgaagacactgagcagggtgggggtgccgggctgtggctgggggagatgctgggctcgggaatggccatcagcaggtggacctggtttaaaggcatggcacaggtgacatccttgagggaggtgtgcagggagaggagaggaggggagagtcagggcgaagttctggagctccgcctcctttagggcggggtctgttaccctctgctctgctgacattttgagccagataattccttgttgggggaggctgtcctgtgcattgcgcaatgtttagccgcatccctcagatgccatagcacaccctccagctccctccacacaaatgtcccgtggtgacgagtctcctggctgtttaactacaggtgtagagggtgggggaggggaagtagagaagactaggaaggagccagtggcattaggaagaaagccgggaacgtggggtctcaggtgccgagatggggtctggagagggaaggaggggctggctgtgtcagatgccgccaaggggttaaggcaagttggggagaagcagccattggctttggccacatggcggttctgggtgtccctgagaggagcttctgggcaagtggagtcttgggtgggcggcaggaaagtggggagaacgaccctctaagagtgcggacagcttctgagcaggtttgctggggtgaggggcagcctggggaggggcgtgggctgggaatggcttcccgaggatttcatgtacggagggccatgctgggtgtctgagcattgccaccgctcggtgagtgttgatgctggtgtttagagggggagagggttggggtctgctggcgggctttagggtgatgggtaggggtgtctaggcaggcgagggactgagaaagcattggtgggctgtgggcaggaggctgcccaggtctagccgggtggagcaggcggctcctggtaggcagcgtggggtccat

SEQ ID NO: 28630 - DNA, 1087 bp, Artificial sequence
  DNA replication origin
ctcagcatctgccaggaaagtggcgagtgctgcatgattctgcacccagccccgagccttcccttttagccccccatgtttattaccgaggagactgaggctcagagagcctaagaggcttccccaaggcctcagctggtgagagggtgctggggagtccaggcctggtctttctcactccagggtctgggctgtccacctggcaggtggacaagaggggaagcagggctagggatgaacccaggggtgggctggctgtgggcactgacatgatccgctctctcctctcctgcttcaggaccccggctgtgccaaccaagctctgatcagcaagaagcttaatgattatcgcaaagtgaggtgaggcctagccctcatggagcagtctcctctgtgggggtggtagggggctgaaggcagaggatgtcttcctggaccacctccagggctgccctctgctggggaaaggggtatccagggtatccagggtctccaggctgcagtttggcatggaggcattgcctcagggtggaggggatgtcccgaggggcaggaggccagggtgggtggcctgcttggccaccccaagtgaagacctctcctctccccctttttcctacacagccatagctctgggcccaaagctgattcctcccccaaaggctctcgcggcctggggggcctcaagtctgagttcctcaagcagagtgcggcacgtggcctcaggactcaggacctgcccgcagggagcaaaggtaggaaggtggccactgagacagggtggtgtgttggggaagagggcatggagaggggagagcatgtgtgtgtgtgttgggctgtgtctgctcgtgtgtgcctgactgtgtgccagggttaccggtatgtctgtctgcatgtgcatgcctgtgagggtctgggggctctcagggtcttggggtggaagggcctggagcctgattcccctccctgacatccctgctgggtggtcctctaatctttgctggtgtctccgcagggatgagaggcccaccctttccaagagcaacctttcccatttccctcacctttggctattagaaagttctta

SEQ ID NO: 28631 - DNA, 1425 bp, Artificial sequence
  DNA replication origin
gcccaaaggggctctgataaaaaagatattttggaaaaccatgaacatgggcagtgatgtcccatgagtcacacacgtgaaggctcatggaatacacaagtcttcctgtccttggagaatgaggagctgagacaagtgtgtgtgaaattgtggacaggagaaaaagatgatctctcatcagggaccacactgtgatgaggaaggacagggtgctcaggctggagcaggtggtggctggaggatttgagtattggaggaatgaataggagggggtaggtggacaggaagcctttcggggtgtgagacgatggcattttccaaaaccccagcaagggccagggagggcttgagggttaggacagagagtggatctacctcctgggcatgaaggtggagagggtgaggccccagggggacagagagggcatttgatggcttcactgaagacttcgaccttgatctgatggacagtagggagcttttgatggttcttaagctggggaggcatcgtgagtataaagttcaagaaagagtaatgctcctgctcatgtccattggataggaatgcggagggcaggggtctggggagaagtcactgatctatggaagcgctaagtgtcgggaggacttggtggtcccgggggaagggggaggatgggagcaaccctaagagttggctgcatgagagggaggaaggaggggcgaggaagagccgcatgtttgagctggggctggtggtatcttcccctggcagaaaccagggagtagggcagcgtgaggagaggtagaagggaagggccgtctcagggagtggctccattggatttggggtatggaaagtcccttgcatggggcgagggcataaacaggcgctagattgagcgtggactagagagtggcatgggtcctgctgcagctggggcatgggatgaccaagggtgggccacagaacagcaggggccatgtgctgagtgggacagaaggagaggaccgccggtgaggctggagtgagggcagacacttcactctggaggagccaggaagcactggccagggcattgggttaggcagctgggagttgagaggagctcacacctgagggccaggaggtaacggagtcgggtgggcaggagccgcactgggtgtgtgtgagatgagggggccatgctggcaggcaactggtccaagccagggccagctgggggcatacaaggtatattgagtgtgttgttttgtcttggatatcattgtgtcatttgttgtgggtcgtgctgggagtaagtgtagtgggggatgaatctaacccctggtgagcctgtggggagtgtattgtttatgggattgtctggcattaagctgtggatccattgtaatgagtgtgtgtactgctgtgctgtgtctctttgttgggggtattaggtcgct

SEQ ID NO: 28632 - DNA, 971 bp, Artificial sequence
  DNA replication origin
caaggagccgcggcagcggaggcaaaaagctgcggtggcaggggcaaatagcagcaaaaagccgcggcggcggggggcaaaacgacacaaaaagccctgacagtgggggcaagaagccgcggctggaaaaacctgtggcggagggggaaaaaagccgcggcggcgggggcggaaaggcgtaaaaagccgcggtggcctgggccaaaagccatggcggcaaaaagccgcaaaaagccggggcggcagggcaagaagccacggcgggaaaaacctgcggcggcgggggcgaaaagcagtaaaaagccgcggcgccgggggccaaaagccgtaaaaagccgcggcggcggtgacaaaaagccgcggcggaaaaattcacggtggcgggggcaaaaagctgtggcagcagggggaaaaagccgcaaaggctagggcaaaaagccgcggcggtggggggagaaagacccaaaaagctgcggcggcaaaaagccacggcggcgagggcaaagagccccaaaagccgcggcggcaggggctaaattccgcgaggccgggggcagaaagccgcggcggcgggggcagaaagccgcaaaaacccgcagcggcggggtcaaaaatccacgacggcaaaaagccgcgtcggcgggggcaaaatagtggaaatggggtagacagccagcacagcttggcattcctggagtgtgatgtggaaggaaaagtgcagaggaagacaaacaaagatgtaagtaggcttgactcagtgcagctaagaacccacatgttatcttgatgttatgtagcagctaattttttgtattttagtagagaaggggttttaccacgttggccaggatggtctcgatctcctgacctcatgatccccgcacctcagcctcccaaagtggtgggattagaggcatgagccacaaagtgctcaaaaaatctattaattaaaaaatgtgtatgtagccgtc

SEQ ID NO: 28633 - DNA, 1181 bp, Artificial sequence
  DNA replication origin
ccgcggcggtggggggtggcaaaaagcggcggggggcaaaaagccgcggtggcaaaattcgcagcggcgaggggtcaaaacgccgcggcgggctaaaagccctggcgctgggggggcacaaagccgcggcgggcaaaaagccatggcggcaaaattcgcagtggcgaaggtcaaaaagccgcggtggtcaaaaagccttggcgcttggggggcaaaaagccacggcgggcaaaaagcggaggcgcggtggggggaaaaagccgcggcggcaggggggggcaaaaagccgcggaggcaggggggggcaaaaagccgcggaggcaggggggggcaaaaagccgcggaggcaggggggggcaaaaagccgcggaggcaggggggggcaaaaagccgcggaggcaggggggggcaaaaagccgcggaggcagggggggcaaaaagccgcggaggcagggggggcaaaaagccgcggaggcagggggggcaaaaagccgcggcgacgggggggcaaaataatggagatggggtagaaggccggcacagcttggcattgctggaatgggatgtgataggaaatgtgaagccaaagacaaaaaaagatgtaagtaggcttgactcattgaagctaagaacccagatgttatcttgagggtattaattaataagcagtttaaatcagaatggcacattctgatttgttttttgtatgttcacatttggcaggcatagatactgtttgaagagagaaaagtcagtagagagaggtaacaaacttaaatatgtgccaagtctagaaacaagagaccaggggtataaggacctttcaaaataaaatgcaagatttgaaaactgattggctgggggatgaggaaaaggcagatctttaaggtccatccctgttttgctttaagttgttagggggtggttttatcacatgttgtagaatatgtcatttcagttttgaacatcttgagttaaattgtcctaacatatcttatgaatttgattttcttccctgggaagctaatatttcaaacacttaaagagtatatagatttccaacttgtatcccatttataaaactatctctaggctgctgatttcaggaggaggctcatgaatattctctttgcagagaatatatcaggagttaacaacagcttcaatatttgtggacgacc

SEQ ID NO: 28634 - DNA, 1073 bp, Artificial sequence
  DNA replication origin
cccaccgcggctttttgcccccaccccgcctcggctttttgccccccgccgccgcagctttttccccaccgcagctttttagccctcgccgccgcggctttttgtccccgccgccgcggctttttgctgccgcgactttttgcccccgtcgccgccgctttttgccaccgcgactttttgcccccgccgccgaggatttttgtccccgccgccgcggctctgagggcgggagcagcagactcggctgccggctctactggcgtcctggcaagggcagcgaccaggggtgctcctggtccagctctcctggctcagggattccttgccgaggcgccggcgccccgggctccttgcctaggcccctgtggcctgcatagagtggcgctgcctgcggaggcgatgggagagaataaggagggcggtggcgggggtgatgcggcggccacggagggtggcacaggggctgcggccagccgggcgctgcagcagtgcgggcagctccagaagctcatcgtcatcttcattggcagcctgtgcgggctgtgcaccaagtgcgctgtgtccaatgacctcacccagcaggagatacagaccctggaggtaaggggttcggggacccgggctgggctccaggagtggcctggacacctccttcggggccccagttcactcctggccgagttgcatccttgagcccacgtcacccccttggaggcttcccctccctcctgcactcgctgacgcggcagccagaggacccgggaccagccctcaccttgggcaggatttgtggagcaggcgcgtggtgggaactgggatggaggctccagggtcccgtgggggtgggggtgggctgagcgaggacatccccttaccccctgaatttccatctggtccagccctctcatcttgtaggtgaggaaaccgaaggcctgagggagaaatgacttgccaggaacccctgttaaggaaaattaacaaagtgtggttattaaagaagaactgagttgggagtcagacctggaggcccccacccttaggtaagacattataccaccttgagtctggcctgt

SEQ ID NO: 28635 - DNA, 1374 bp, Artificial sequence
  DNA replication origin
acaaatttgttctctcagagttctggagaccagaagtcccaaatccaggtgcgggcagggccatgctccctccacaggctctaggggaaggtccttccttaccttatccagcttctgggagctccaggcttccctggtgtggggacgcattgtgccagtctcagaggcctgcatcttcacatggcccctgcccctgtgttctgcatgtctttttctgtctctgaaaggactctttcattgagcttctttgactctaatccaacatgatgtcacctaaattcttaccttaaggacgtctacagagacctcattaaataagatcatattctgagttccgaatgtatgtgaagttgggggacaggcacagtttaatccataaagtgtttgtgtgtgtggagagtaagtatgagaaatgtgagctgagggagtggggtgagtgtgcatgcgactgagagtgagcacatgtgagtgtgggtgggtatgtgggtgtgctccagtgtgtgtgagaacatgcatgtattagtggtgtgctggagcatctgcacatattggtgagagtgtgttagcggttgatgggcaagtggctgagcgtttgtgttgcaagtgtgacagtgtgtttgtagcatgtggttgtgtgggtgtatgtatgcatgcatttatgtgagtggtgtgtatgtccgtgacagcatgtgagtgggcaggtgactacagtcaggtgaagtgggagtgaaagcgtcagtgcattgagccagtgtgtgtgtgagggtgagcacgagggaggcatgagtgtgagtgtgaggggattactgggtgtgccaatgagatgaagtgtaagtcagtgaggcttgatgagtgtgaggaagtatgggtggcagcacaagtgtaagtgtgcgattgtgagcatttgtgtaaatgtgtatgagtgccttgaatcagtgtgagcacgagtgacgttattgtgaaggcgtgtgagcgaatgtgagcattttgcttgtgtcagtgggaggtaacagtgtaggtgtgagtgtaaagtgagaaagtgggtgtaggtgtgagtgtaaagtgagaaagtgggtaaaggtgtgagtgggtgaggaatcggttgtgactagtgttgagtgtgagtgcatatgtgagtttttgtatgcagtgggaggggtaagtgtatgtgagagtgcataggagtgtgtgtcagattgcatcttaggttgtgtgtgcatacgtgtgactgggattgtgtgtgtgttagtgattgcgacagtggtgtgagtgcacctgtgtgagggtgggtgtgtgagtgcccatgagtgtgtctgaataacttagtatgggtgtgggtgtgaggatgcatgtgagggtgtgagagtgtgtgtg

SEQ ID NO: 28636 - DNA, 1053 bp, Artificial sequence
  DNA replication origin
gccctgccccgggatggctgagctccacagccacggggcctcatgggccaggccttgggacctcgatgcagcagcctcgcctcacctggccccaagtgcggcctcagcccgtgggctcccagccacacatgcacagaccccctgacaccacccaccccctcccgccaggtggtgtccacgcccctgtgacaagctcagccccttcctgtcctcaggccaggggatcccagggagcctggctccacaggccagggtgtggggggacctcctggccacacctcagccatgtggaggcagcacccgcatgcctgagctcacctgtccggctctctggcagcatgcgtccactgtggctcctctcctgcagggccgcccaccttcctcccagggaagcccgcccctccccccggcccctggcccccggcctggtcccctctcgggtgtgcccaggctgagctgcgcccggggtcgccctcacctggtgcgcagggcctgccaggcggcgttgatgtcggcgtagaggttcgtctcggagggcctgcccgagctggcaccgtagccagagtagtggtaggagaaaatgttgcagtggaggcgggaacacaggccaatgtagaagctgctcatctggcccaggtccaccgcgttgccttccttgttcatgcacctctggtcagacgcagttcagctgatctaggctgggcttggctagcattggcttgaagctgcagctggtgtccagatctgttctacgtatttgtgattctcctcagccctcccgggtacttgaagcatgttattgttatggcaaaagtcaggagtgcaacctgcctgtgcaaaaacatgccaggcttctgttgcctgaaatcctctaagatacccctttggcttaagcaaaatcacacagcaaggatcaaagtcaaggagtggggaattatatctgtcccttagagatggagataggagagagtgtgaacaaatgcaggaaaatgatctcatctaccagagtgtccttaaatattttaacataataaattcagtattgtttttgtt

SEQ ID NO: 28637 - DNA, 1309 bp, Artificial sequence
  DNA replication origin
cccgctcctgcaggggccaggcgcagctctgagaagtcagaggccctgggaggtggggtcctcgttgccttggagatatcccaggcagtccctgctgtgggcgtgggagctgggtcccctggcaccaccctggctctgggggcctcccggcagtgtggggcgccgaaaccaagcaccacttcatgcagcttcctggaccccctcctgtctctactgcccggggcactggcagagtcacaccccccatggccagctctgagctctgtctactctgccgtctgtcctgctgtcgctttgtcctgcaggatcctcagcccagagccgtgagggggaggccagatagcgctcagggcctctatggaggatgtgtcttgtttgattgtctgagtggtgacatctaggtggcagctgggggctcctgcctggagcaggtgacagggctgggctggctcagcacactactggccttggctgccagggagcaggccagggaggctgaggcagagctgcagccacaggcacaagccaggcagcatcctttggggcatgggtgagcagtgagctgtggagtgctgccaggaggctgggattccaggccagggagggagacagccctgctggtggagtccgaatgccagccagacgggacgcacacctgcccatgctcctgccttgcaggagggcatctgcctggcatcagagcctggagcttgtgggaggagagttctggggtctcggcatcgacagggtggcaggtgggtcccgcgtggttgggactgggcatgaggaggccttgggactggtgctgggtcagctgggccaggggccgcacaccagtgacctgggagtgggggtggccctgggtgggagctggtggtgctgaggtggcggaggacttgtccactcccaagggaaggcactggtgggaggagatgctgcccccgcagccaccaccctcgatgttgacctgggttgggctggcagctcattgggcatgggactctgagagtccaaaattgggtggagacatctggggacacagctgcctgaattcctcatggccaagggggtaggcaagggctgcagggaggaagagtgtaccctgtcccggccagtgcaccaggaagagctttctaacctgggcaggaaggcgtgaagcattcaggatgtgggaggccacacagttcccagtgtgcgcctaggggtgaccaagaggaggagaggtgccagggcttcccctaccctagcccgagggggactccctagccaggatccagcagatcctggctaggaaacgccagtgaaccat

SEQ ID NO: 28638 - DNA, 4411 bp, Artificial sequence
  DNA replication origin
aaatgatgaaatgaaatgatataaaatgatgaaatgatgagatgaagtgaaatgatgaaatgatgaaataatgaaatgaaatgatgaaatgatgaatcgatgaaatgaaatgatgaaatgatgagatgaaaagataaaatgaaataaaatgattaaatgaaatgatgagatgaaaagatgaaatgatgagatgaaatgaaatcatgagatgaaatgaaatcatgagataaaatgatgaaatgatgagatgaagtgaaatgatgagatgaaatgatgagatgaaatgatgaaatgaaaggatgaaatgatgagatgaaatgaaaggatgaaatgaaatgaaatgatgaaatgaaatgaaatgaaatgatgaagtggaatgatgaagtggaatgatgaaattatggcctggctggctggctggcatggctggctggctggttttggctgggtggcttggctggcttggctggcttggttggctggcaggcttggctggctggctggcttggctggcttggttggctgtgtggcttggctggcttggctggctggctggctttggctgggtggcttggctggcttggttggctggcaggcttggctggctggctggcttggctggcttggttggctgtgtggcttggctggcttggctggctggctggctggctggcttggctggcttggttggctgtgtggcttggctggcttggctggctggctggcttggctggctgcctggctggcttggctggcttggctggttggctggcttggctggatggctggctgtggctgggtggcttggctggcttggctggctgggtggcttggctggcttggctggctggcttggctgcctggctggctggcttggctggctgtgtggcttggctgtcttggctggcttggctggctggctggcttgtctggctggctggctggcttgggtggcttggctggctggctggctggctggcttggctggcttggctggctggctggctttgactgggtggcttggctggcttgcctggctgggttggttggctggcttggatggcttggccggctggctggcttggctggcttggctggatggatggcttggctggcttggctggctggctggctggcttggctggcttggctggctgggtggcttggctggcttggatggcttggctggcttggccggctgtgctggcttggctggcttggctggctggctgactgggtggcttggctggctggctggcttggctggcttggctggctggatggcttggctggcttggctggctggctggcttcactggcttggctggctgggtggcttggctggcttggttggcttggctggctgggtggcttggctggcttggatggctgtcttggctgcctggctggccggcttggctggctgtgtggcttggctgtcttggctggcttggctggccggctggcttgtctggctggctggctggcttgggtggcttgcctggctggctggcttggctgggtggcttggctggctgggccgcttggctggcttggctggctggctggcttggctggcttggctggctggctggctttgactgggtggcttggctggcttgcctggctgggttggttggctggcttggatggcttggccggctgggtggcttggctggcttggctggatggatggcttggctggcttggctggctttgctggcttggctggctggctggctggcttggctggcttggctggctgtctggctggattggcaggcttggctggatggctggcttggctggcttggctggctatgtggcttggctggcttggctggctatgtggcttggctggcttggctggctgggtggcttggctggcttggctggctggcttggctgcctggctggctggcttggctggctctgtggcttggctgtcttggctggcttggctggctggctggcttgtctggctggctggctggcttgggtggcttggctcgctggctggctggctggctttgactgggtggcttggctggcttgcctggctgggttggttggctggcttggatggcttggccggctgggtagcttggctgtctttgctggcttggctggatggatggcttggctggcttggctggctggctggctggcttggctggcttggctggctgtctggctggattggcaggcttggctggatggctggcttggctggcttggctggctatgtggcttggctggcttggctggctctgtggcttggctggcttggctggcttggctggcttggctggctggctggcttggctgggtggcttggctggctgggtcacttggctggcttggctggctggccggctttggctggctggcttggctggcttggctggctgggtggcttggctggcttggatggcttggctggcttggccggctgtgctggcttggctggcttggatggctgtcttggctgcctggctggccggcttggctggctgtgtggcttggctgtcttggctggcttggctggctggctggcttgtctggctggctggctggcttgggtggcttggctggctggctggcttggctgggtggcttggctggctgggccgcttggctggcttggctggctggctggcttggctggcttggctggctggctggctttgactgggtggcttggctggcttgcctggctgggttggttggctggcttggatggcttggccggctgggtggcttggctggcttggctggatggatggcttggctggcttggctggcttggctggctggctggctggcttgcctggcttggctggctgtctggctggattgacaggcttggctggatggctggcttggctggcttggctggctatgtggcttggctggcttggctggctatgtggcttggctggcttggctggcttggctggctggctggcttggctgggtggcttggttggctgggtcacttggctggcttggctggctggctggctttggctgggtggcttggctgggtggcttggctggcttggctggcttggctggctgcctggctggattggctggcttggctggttggctggcttggctggatggctggctttggctgggtggcttggctggcttggctggctgggtggcttggctggcttggctggctggcttggctgcctggctggctggcttggctggctctgtggcttggctgtcttggctggcttggctggctggctggcttgtctggctggctggctggcttgggtggcttggccggctggctggctggctggctttgactgggtggcttggctggcttgcctggctgggttggttggctggcttagatggcttggccggctgggtagcttggctgtctttgctggcttggctggatggatggcttggctggcttggctggctggctggctggcttggctggctgggccgcttggctggcttggctggctggctggcttggctggcttggctggctggctggctttgactgggtggcttggctggcttgcctggctgggttggttggctggcttggatggcttggccggctgggtggcttggctggcttggctggatggatggcttggctggcttggctggctttgctggcttggctggctggctggctggcttggctggcttggctggctgtctggctggattggcaggcttggctggatggctggcttggctggcttggctggctggctggctggcttggctggcttggctggctgtctggctggattggcaggcttggctggatggctggcttggctggcttggctggctatgtggcttggctggcttggctggctatgtggcttggctggcttggctggcttggctggctggctggcttggctgggtggcttggttggctgggtcacttggctggcttggctggctggctggctttggctgggtggcttgactgggtggcttggctggcttggctggcttggctggctgcctggctggattggctggcttggctggttggctggcttggctggatggctggctttggctgggtggcttggctggcttggctggctgggtggcttggctggcttggatggcttggctggcttggccggctgtgctggcttggctggcttggctggctggctgactgtgtggcttggctggctggctggcttggctggcttggctggctggatggcttggctggctaggttggctggctggcttcactggcttggctggctgggtggcttggctggcttggctggcttggctcgctggctggctaggctggctggctttggctgggaggcttggctgccttggctggctgggtggcttggcgggcttggctggccttgctggctgggtg

SEQ ID NO: 28639 - DNA, 1439 bp, Artificial sequence
  DNA replication origin
aaatgaagtgaaatcatgaaatgaaatgaaatgatgaaaagatgaaatgatgaaatgaaatgatataaaatgaaatgatgagatgaagtgaaatgatgaaatgatgaaataatgaaatgaaatgatgaaatgatgaatcgatgaaatgaaatgatgaaatgatgagatgaaaagataaaatgaaataaaatgattaaatgaaatgatgagatgaaaagatgaaatgatgagatgaaatgaaatcatgagatgaaatgaaatcatgagataaaatgatgaaatgatgagatgaagtgaaatgatgagatgaaatgatgagatgaaatgatgaaatgaaaggatgaaatgatgagatgaaatgaaaggatgaaatgaaatgaaatgatgaaatgaaatgaaatgaaatgatgaagtggaatgatgaagtggaatgatgaaattatggcctggctggctggctggcatggctggctggctggcttggctggctggccggctttggctggctggcttggctggcttggctggctgggtggcttggctggcctggctggcttggctggcttggctggctggctttggctgggtggtttggctggcttggcgggctgggtggcttggctggcttggccggctgggtgtcttggctgacttggctagcttgtccggctgggtggcttggctgccttggccggctggatttcttggctggcttgactggctggctggcttggctggcatggctggctggctggctaggctggcttggattgctggctggctttggctgggaggcttggctgccttggctggctgggtggcttggctggcttggctggcctggctggctgggtggcttggtttgcctggctgtctggctggcttggctggctggctggctttggctgggtggcttggctggcttggctggctggcaggcttggctggctagctggcttggctggcttggctggctgtgtggcttggctggcttggctggctggctggcttggctggctgcctggctggcttggctgtcttggctgactggctggcttgactgcctggctggctttggctgggtggcttggctggcttggctggctgggtggcttgtctggcttggatggcttggctggcttggccggctgtgctggcttggctggcttggctcgctgggtggcttggctggcttgggtggctctgtggcttggctggctgggctgcctgggtggcttggctggctggccggcttcgctggctggttggctggctggcttgtctggctgggtggcttggctggcttggctggctgcgtggcttgggtggcttgggtggcttggatggcttggatggcttggctggctatgtggcttggctggcttggcggcttgggtggcttggctcgcttgggtggctttgctggctggcttggctgg

SEQ ID NO: 28640 - DNA, 1635 bp, Artificial sequence
  DNA replication origin
ggtctgcagagaggcaggcggcggtgcggagccgggaaccacgcactcacccgccgagtccgacgggcccggcaggggtgggcaaggcactgggaacagccgccagctctagagggcgtgaggcggggcgcacggggagggggtgcggctaacgcgcgcgtgcgcggttcatgtgtgggcccgcgggggcgcgcgcgtggttagcgggcagcgagggtcgcctgggcggtgcgcagcacggcgggaacatggcgcgcggaaccggcgcgcgcgcctagctggcgggaccgttagatcgaggcggatgcggcccggaccccgtggatatggagcagtcgccgccgctggcgccggagcccacccaagggccaaccaccgcaaggagctgaaggcggcgggagcccgagtcgccgccggcgtcggtgccggtgagtgcgtgaggggctggggcccggagactttctttgtgaaactccggcggtgggagccaggccgggcctgaggctgaggagcgcctgtgaggcggaaggcgtctcgcagtccgggttccatcccagctgcgagccttcaggcggcgggacctggtccaaagcctgcctgcctcagtttccgctagagtgggtgtgggtgtgtgagggtgtgtatgggtgttggcctgcgcacaccggagagggggtgtcggtatacagtcggcgcctaatgctcgcggcgcctcccccactctccccagtccccgtgggtcggaacctggggactggagtccactggagcagtaggcggcacccgcggggagacaggtgtcagtgcagcccgggaggctcaggtgctacctttcctgggtggggtttgtgaggagggagctcttcgtccccggaggtgagcaagtctgtcggtggctcatcacagagtgctgttttggaaagcgttccacccacctcagcttcctgctgtgtttgggccactagtcagggggaaggatgctgagcgacatggactttagaggtggggcccccgctggacgggatgggtctgggctctcgagctaacccccaccctttcctcccaaacccgttagagcgtaggaatcattgggagcacctgataaaaatgccacggattgtggctcacctaagcagggaagccgatttggaacttaaacaagctcccaagttgtgatcagtcgagcttggcaagcactgtttgagagagtaggcttcccgcaagcaggagccggttttgtgtatacctcaccatggcatcttggtacctggcatggtgcctgacacacggtagatgatcagaaaatatctgtagaaagtctaaattattagggagagtgcagcatagtagttcttgagacattttcaggagcttcctgagattaatatctgtcagatttgttttacagtatatgatttttctcagctcccaacttttgtgattgttttaatgccgtgttttcagtatgttctaggcaaaagcagggtatatgttgcttagtatacactatccactaggccgattgcggtggctcactcctgtaatctcatcactttgggaggcagattgcttgagcccaggggcttgaggctgtagtgagccaaggacttagagaccagtgtgggaaacataccg

SEQ ID NO: 28641 - DNA, 1242 bp, Artificial sequence
  DNA replication origin
agcggccagctccagagggcgcgaggcggggcgcgcggggagggagggggcgcggcgaacgcgcgcgtgcggggttcgtgtgtgggcccgcgggggcgcgcgtggctggggggcagtgagggtcgcctcggcggcgagcagcacagcgggaacatggcgcccggaactggcgagcgcgcctagctggcgggaccgttagctcgaggcggacgcggcccggacccggtggatgtggagcagtcgccgctgccggcgcccaagccgaccccagggccgacccccgcaaggagctgaaggaggtgggagccccagtcgccgcgggcgtcggcgccggtgagtgcgtgaggggctcgggccgggagactttctttgtgaaactccggcggtgggagcctggccgggcctcagcggctgaggagtgcctgtgaggcggaaggcgtctggcagtccgggttccatcccagccgctagccgtcaggcggcgggacctggtccgccgcctgcctgcctcagtttccacgggagtgtgtgcgggtgtgtgagggtgtgtatgggtgttggcctgcgcacaccggagggggggtcggtatactgtcagcgcctaatgcgcgcggcgcctcccccctccccccagtccccgtggggcggaacctggggactggagtccaccggagcagtaggcggcacccgcggggagacagatgtccgcacagcccgggaggctcaggtgctacctttccctggtggggtttgtgaggagtgagctcttcgttcccggaggcgagcaagtctgtcggtggctcatcacagagcgctgttttggaaagcgttccacccacctcagcttcctgctgtgtttgggccactagtcagggggaaggatgctgagcgacatggactttagaggtgggacccccgctggacgggatgggtctgggctctcgagcttacccccaccctttcctcccaaacccgttagagcgtaggaatcattgggagcacctgataaaaatgccacggattgtggctcacctaagcagggaagccgatttggaacttaaacaagctcccaagttgtgatcagtcgagcttggcaagcactgtttgagagagtaggcttcccgcaagcaggagccggttttgtgtatacctcaccatggcatcttggtacctggcatggtgcctggcacacggtagatgatcagaaaatatctgtagaaagtctaaattattagggagagt

SEQ ID NO: 28642 - DNA, 1472 bp, Artificial sequence
  DNA replication origin
cggggtgtggcgcggagtgaccagccctgcccgctcctttcagcagcaggtgaagcggctgcagcgcgttctttaactttcccagaaagacctacagtttgtaaagcgcgcgatctcatgcatgtcccagccagcccagcagctggggggtgcagggccacgtccagtctgggacgctgcaggggcttcgctcctgggtcccacctcctgtgcatcccagggcgcagcgcgacagtctgaggtgctgcacgccgtggggagccgcgctgggggcgcctcggaaggacgcggttctccagccctttccgtgcctaaacaggaccgaggctgagtttcttcacgtgggtggaaactaaagcggggttggggactgggcgccggccacgggtgcggttccagcagcgggagcgggtcccggggccgggggtggggggggggggctcaggcacagcagggggcgagggcgcagcgccgggagtgcagatcccaggggccctcaccgcagtaggtgatgaaggtgtgcagcagcgccacaaagcgttccacagggcacacatacagcaaagcagcacgctgtgagcagtaaagatatgcaagtttgtcaattaaactttcataaagctggggaaaacagaagaaaaggaaccacaacaacaaaaaataaagccgagaaacatttaagagatttattagtttgttttaaaataacagaagcaagcccattacatggtaacataagtcgcatatttttgtgagaaatgttttccaaagcaaaaaaaaaaaaaaaaactgtgggaaagtggcggtgcttcagttgtgcgagctgtcacgtcctaacacagctgcatcctcagcccgctgtcccccggcaagacgctcccacttccagtgaaaagagatcaataacgtctccttattgtcatgaaacattcttgactcaacctcactcagctgctgacagggtcgtgaaaatcccaggggtccctggacggcacaattgagtgccactggttttttggagaaaagtttggaggagtactggggagtttggagagggtccagggaaggccgcaccgaccagtggtctcagggccagcatcagaaggagcagcaaggaggtagaggcagggagagggaggtaggagctgccgcattccaggcacagggaactgcaagtgttgaggaccccaggcaagtgcactgaggaatgaaaggccgctgtggccagagctggaggcagcagaagagaggccctagaggagggcaggggccacagcagcagtgaggccagacaagggccgcggcctagaagcaaagggaagccatggaaggagcctcggaaagtgacatcaagtttgcatgtttaaaagccacgctcaagaagtgccgtcagtcattagagacaggtatcagccaaataatcacataaatacttttaaaaaactaaacaataatttggtaatttcttggct

SEQ ID NO: 28643 - DNA, 1328 bp, Artificial sequence
  DNA replication origin
agctccgcgctcacgatgctcttcgggtctgtgttgaggagaacgcagcttcgccctggcaaaggcacacagcgccagcgccggcgcggcggagaagcagatagcggcggagaggcccagggcggcggcgcaggcgcggagaggcccacggcggcggcgcaggcgcggagaggcccacggcgccggcgcaggcccaggctccactccccagctgtgaaagggtaagaactgagggtggctgagactcggggttgttcagggcggggtgggctctggacccagcaggcccgtcacccaggtcagggctccaggggaggccaggtggggcgaaggccaaggaggtgccgggactggtcaggaagggctcctggtgaccagagcactttgcgtaagccagcgtgggagggaggtgggctggatgagccagggaggcgccggaaggggccttggcagaggcgaccccctccgtcagcccccaggccactgaaccctgggtagcgagaaccgacaggggaggctgcagacagaggagtggaggctccccggctttgggggctctgagtagaagcatctagggggtccctcaagaggcccccaaatgcttccccgtggtgagaaaacaaggcgcagagaggcgcacggtgctggcgccaagggccgcacagcgagatttgctgtgatttcttttattgccccaaatgtacttcatcttggtagatttctattggctttaaaaatgtgtgtgttttgctgttggggagtggggtgttatacggatgtcagattttgctggttgaactgttcagatcttttgtaaatccttgctccttttctgcctagtttcattctgtcacttacactagagtgcggtggcacgaacaagactcactgcagccttgacttcctaggctcaagtacttcccctggcttaacctcctgagtagctggtactataggtgtgtgccgccacacctggctaaatttaaaattttttggagaggtgaggccttgctatgttgcccaggctcgaactcctggcctcaagctatcctttgtctttgcctcccagagttctggtattacaggcatgagccactgtgcccggcctctgcctagttttaacagttgctaagaggaggatgttgaagtagatgtcttcttggtgggttaatccttttgtcattaagcagttgttagggtcacttccttttcaccccattggtgaaggaggggtccctgccctaaagtgtaggagatggctgaacacgacgcctggcgtggatggatgagattgacagcagtgttttagtcacatatacccacagctc

SEQ ID NO: 28644 - DNA, 1557 bp, Artificial sequence
  DNA replication origin
cgccgccgtgggcctctccgcgcctgcgccgccgccctgggcctctccgccgctatctgcttctccgccgcgccggcgctggcgctgtgtgcctttgccagggcgaagctgcgttctcctcaacacagacccgaagagcatcgtgagcgcggagctgagttctactctgcacagacttcggagatacagcgaaggcagagcagtgttctcctcagcacaaacccggacgggcgggccggtggcaccgcgagggtggagctgcgttctgctctgcacagaccttggggacactgcctcgctttgggacaactcggggccacatcgagggtgaataaaatccttcctgtttgcagccctgtttgcggttggtggcagcgatggacactgcagccagccacagcgtagaaaggcgtcggggtaagtgcgctatccaggctgcactgcgggtggcctgggacgggttgggagccctatctcaggcgtcactgcctgtcctgggtggctgtttgggtgtgctatctggggctgtgatgcctgcaccagggggggtggtttaggggcccaaaccggggctgcactgcctttggcggggagccggttgggggcactatcccagactgtattgctggcaacagtgaggtgggctaagtgtgctatccggggctgcactgtgcggctgtggggggttggcggtttcgggttgagggcgctatggggtgctgtaatgcccatggtgcggggaggcaaggcagtttgggtatgttgggtgtggtattgggggggtctacactgcaggtggtagagggcagggtgggttgggggccatatcagggactgcactgattgctttagctaggatttctggtactatgttaaacaacagtggtgacagggggcatccttatcatgttccagatcttagaggaaaacctttccatttttccccattccatatgattctagctgtgggtgtctttcctgtagtttttattatgttgcggtatgtttcttctgtgcccgtttctttgaggatttatagcatgaagggatgttgaatttcatcaaatgccttttcagtttcagttgacgtgatcatactgtttttgtcgtttatttggttgatatgtcgtatcacattgtatgttgagtgacccttgcatcccagggatacatctcacttggtcatgatgaattatctttttaatgtattactgaatttgattcactggtattttgttgaggatttttgcatcaatgttagagatactggcctgtagtttccttctttgatgcctttgtctgattttggtatcacagtaataatggtctcatagaataagtttggaagtattccctcctgtttttcaaaatagtttgagcaggattcgtactaggtctttaaattgtttggtgtgaagccatcagcagtgaagacatcagttcctgggcttttctttactgggagactttttctgatggcttcaatctcattacttgttaccaatctgttctggtcttggatgttttcattgtttgacctaagtaggttgtatgcat

SEQ ID NO: 28645 - DNA, 1031 bp, Artificial sequence
  DNA replication origin
atttcagagggggcctggggctcgggcgttcttgcttgatggactttttgacaacaaggggtcagaagagggggactcccttgttaccatgggcacatgaggggtgggagaggaacccctggattcagcgttcggttctccctccctctccgccatctctccttccccttctcttattttctctctctttctctgtctctctccctctttccttctctgtatgtctctgtctcagtacctatcaagcacgttctgtgtgccaggcatggttctaggttccagggacacagaagtgaatgagacagacagtgttctgcgtggcctccattcgagttggggacacagaaaataaaatgaacaaacaagaagaaaagagtttcccaaaagaagggaaggaggaatacgtgatggagaggctggcggggtgggtgggtggcacgcagtggtggctggtggggtttggctgagaggatggtggaggccagtgactctgggggaccatgagctaggggagcgggcatggggcaggtggcagggccagtcccgtggggcaggcagtggtgattctcatgccaggcagtggaagccaggggcgggttttaagcgagagagcgacatgaactgatctaatgctaaaatacactctccatttgtgggtgaaggacggaccagaacgagggcagaagggacactgggtgctccctggagaggtgactgcctgtgtccgagcaagagctattggtggcccggaccagggtgatggctgtgggatggggctgggtttgaggtggatcctggaggttttgctgagaggtggtgctctggattgcatggtgggaggtggtgcactgattgcacggtgggaagatggaagggcatggctgggggtattgtcacaatttcaatctggagccacacacctgtcgacagtggccttggccttccttaagacctttgcctggctgcagcaagcagacgccgtctcaaagtgatggccgtggcactcacatgacaccgcagacgtcgtccac

SEQ ID NO: 28646 - DNA, 1292 bp, Artificial sequence
  DNA replication origin
ggcggcgggggcaaaaagccgcgggggcaaaagccacaaaaagccacggcggcaggggcaaaaagccgcggcggcgggggcaaaaagccgcgccggcaaaaaacagcggcggcgggggcaaaaagccgcggcggcgggggcaacaagccgcaaaaagccgcggcggcgggggcaaaaaaccgcggcgggggcggcggcaaaagcggcggcggcggggacggaggcaaaaagccgcggcggcggcgacggcggcaaaaagtggcggcggcaaaaggcggcggcggcaaaaagcggcggcggcaaaaggcggcggcggcagaaagcggcggcggcggcagaaagctgcggcaaaaaggggcggcggcagaaagcggcggcaaaaagccgcggctgcgggagcaaaaatatatgtatagacatatatattttatatgcagtcttgctttgtcacccaggctggagtgcagtggcgcgatgtcagctcactgcaacttccacctcctgggttcatgcaattctcctgtgtagctgggattacaggcatgcgccagcatgcctggctaatgtttgtgtttttatagagacggggtttcgccatgttggccaggctggtctcgaactcctgacctccagtggtctgcccgcctcaccctctcaaagtgctgggattacaggcgtgggccactgcgcctggccccatatttggctttttaaaaacctgtctgtattgtctacagcctgggcagatctgtcagggaggtcttggctgggagatggaaacgatgcaagggagagggagaggctgacacagccagctggaagggcaggcaggagaggggagccgtgggagccggctgggagcctgccacactcccctcctcctgaagccttttggggttgctgccctgcctgtggccacgggtttaaggacccccctggtcatttttctttgtcccagatctgttgctaccaacggtgaggtattcctaatgttccccttggctgtgtcctgtgcatggagcaaggacctctcccctttttcctgcacgacagggctctgtgccacctattttctcaggccctcccacccccaggccccatcctggggcagtactcaccggtgaccagggtgaagtggcaggggctggtcatggtgacaaaggcgggggtcatgtagcgtgccttcaccccatctcgggccatggcgtccaggttgggggtgtccacgtcctgctcgtagttccagcggaagctgtcgaaggacaccaggagcagcttgttccgggagccct

SEQ ID NO: 28647 - DNA, 1264 bp, Artificial sequence
  DNA replication origin
ttttgcccctgccgccgtggctttttgtggcttttgcccccgcggctttttgcccccgccgccgcgggtttttgccgtcgcggctctttgcccccgccgccacagctctttgcccccgacgccgcgcctttttgcccccgacgccgcagctttttgcccgccgcggctctgagggcgggagcggcacactcggctgccagctctaccggcgtcctggctcgggcagcgctgaggggcgctcctggtccagctctcccggatcgggggtcccttgcctacgcgccggcgccccgggctccccgccttggccgctgcggcgctccgcgcggccgcgatgtgagagaagaaggagggcggtggcgggggtgatgcggcggccgcggtgggaggcgcaggggcggcggccagccgggcgctgcagcagtgcgggcagctccagaacctcatcggcagcctgcgcgggctgcgcaccaagtgcgctgtgtccaacgacctcacccagcaggagatacggaccctggaggtaaggggtgtgtggaccccggctgggctcgaggagcggcccggacacctccctccgggccctagttcacttctggtggagttgcatccttgagctcgagtcgcccggttggaggcttctccctcctgcactcgctgatgcggcagccggaggaccccggtccagccctcaccttgggcaggatttctggggcgggtgcgtggtgggaactgggatagaggctcgaggggcccatgggtggggtgggctgcgcgcggacatccccttaccccctcccccccgaatttccatctggtccagccctctcatcttgtaggtgaggaaaccgaaggcctgagggagaactgacttgccaggaacccctgttaaggagaattaacaaagagtggttattaaaggagaactgagttgggagtcagacctggaggcccacacgcttggttaagacattataccaccttgaatctggcatgctgactgagggtgagccactccatcctcgtctgattgtggggtcttgacctcaaggggtttcttgcaggaaaaagcaaataggcttgctttcctagctctgtccagtaccttagggaccctgaggaccggagagattcttggagagccatctggtgtatgtcatgggtgggccttttttgaaggtcagtctgcccagtgggctggctcagcccgaatgaactgtcttgaatctttggagttgtctgtgtacttttaagggcttctcat

SEQ ID NO: 28648 - DNA, 1467 bp, Artificial sequence
  DNA replication origin
caaccctgctttgccctgtctgttgtactgggttttcacgtacaattttatttgcccaaaggggctctgataaaaaagatattttggaaaaccatgaacatgggcagtgatgtcccatgagtcacacacgtgaaggctcatggaatacacaagtcttcctgtccttggagaatgaggagctgagacaagtgtgtgtgaaattgtggacaggagaaaaagatgatctctcatcagggaccacactgtgatgaggaaggacagggtgctcaggctggagcaggtggtggctggaggatttgagtattggaggaatgaataggagggggtaggtggacaggaagcctttcggggtgtgagacgatggcattttccaaaaccccagcaagggccagggagggcttgagggttaggacagagagtggatctacctcctgggcatgaaggtggggagggtgaggccccagggggacagagagggcatttgatggcttcactgaagacttcgaccttgatctgatggacagtagggagcttttgatgcttcttaagctggggaggcatcgtgagtacaaagttcaagaaagagtaatgctcctgctcatgtccattggatacgaatgcggagggcaggggtctggggagaagtcactgatctatggaagtgctaagtgttgggaggacttggtggtcccgggggaagggggaggatgggagcaaccctaagagttggctgcatgagaaggaggaaggaggggcgaggaagagccgcatgtttgagctggggctggtggtatcttcccctggcagaaaccagggagtagggcagcgtgaggagaggtggaagggaggggccgtctcagggagtggctccattggatttggggtatggaaagtcccttgcatggggcgagggcataaacaggcgctagattgagcgtggactagagagtggcatgggtcctgctgcagctggggcatgggatgaccaagggtgggccgcagaacagcaggggccacgcgctgagtgggacagaaggagaggaccgccggtgaggctggggtgagggcagacacttcactctggaggagccaggaagcactggccagggcattgggtttggcagctgggagatgagaggagctcacacctgagggccaggaggtaacggagtcgggtgggcaggagccgcactgggtgtgtgtgagatgagggggccgtgctggcaggcaactggtccaagccagggccagctgggggcatacaaggtatattgggtgtgttgttttgtcttggatatcattgtgtcatttgttgtgggtcgtgctgggagtaagtgtagtgggggatgaatctaacccctggtgagcctgtgcggagtgtattgtttatgggattgtctggcattaagctgtggatccattgtaatgagtgtgtgtactgctgtgctgtgtctctttgttgggggt

SEQ ID NO: 28649 - DNA, 1791 bp, Artificial sequence
  DNA replication origin
tgagacagagtctcgctctgctgcccaggctggagtgcagtggcgcaatctcagctcactgcaacctccgcctcccaggttcaagtgattctcctgccttagcctcctgagtagctgagactataggcacatgccaccatgcctggctaatttttttttaatagagacggggtttcactgtgttagccaggatggtcttgatctcctgacctcatgatcctcccacctcagcctcccaaagtgctgggattacaggtgtgagccactgcgcccagccgaagaattttttttaatggcgcccattgcggtcagccgtagctacactccaggggcctaggtagggattcctccctgtttacttctttggccaggagcctgcacagaagtgccttgagacacccacacaaagtcatgtgggcatcccgggcctggggtctctgccaagagggcagtgggcctgggcctgctctggccgtgggagggggcgctagtgcatggcctcttgctgaggacacatcctctcgctgaccaggctctgctctcccgggaacagctttccccactgcagggaggaaggcacctggaatttgggcctcctcctctgggggcctggcttggctgtctccaacaaggcttagtcaggggggttccaagtcacatcactatggcagtagcagtccctcctggggcacctcctccatgcctgctcagcatctgccaggaaagtggcgagtgctgcatgattctgcacccagccccgagccttcccttttagccccccatgtttattaccgaggagactgaggctcagagagcctaagaggcttccccaaggcctcagctggtgagagggtgctggggagtccaggcctggtctttctcactccagggtctgggctgtccacctggcaggtggacaagaggggaagcagggctagggatgaacccaggggtgggctggctgtgggcactgacatgatccgctctctcctctcctgcttcaggaccccggctgtgccaaccaagctctgatcagcaagaagcttaatgattatcgcaaagtgaggtgaggcctagccctcatggagcagtctcctctgtgggggtggtagggggctgaaggcagaggatgtcttcctggaccacctccagggctgccctctgctggggaaaggggtatccagggtatccagggtctccaggctgcagtttggcatggaggcattgcctcagggtggaggggatgtcccgaggggcaggaggccagggtgggtggcctgcttggccaccccaagtgaagacctctcctctccccctttttcctacacagccatagctctgggcccaaagctgattcctcccccaaaggctctcgcggcctggggggcctcaagtctgagttcctcaagcagagtgcggcacgtggcctcaggactcaggacctgcccgcagggagcaaaggtaggaaggtggccactgagacagggtggtgtgttggggaagagggcatggagaggggagagcatgtgtgtgtgtgttgggctgtgtctgctcgtgtgtgcctgactgtgtgccagggttaccggtatgtctgtctgcatgtgcatgcctgtgagggtctgggggctctcagggtcttggggtggaagggcctggagcctgattcccctccctgacatccctgctgggtggtcctctaatctttgctggtgtctccgcagggatgagaggcccaccctttccaagagcaacctttcccatttccctcacctttggctattagaaagttct

SEQ ID NO: 28650 - DNA, 987 bp, Artificial sequence
  DNA replication origin
gcgtggggtccatcccccggctgtcctctgtctgctactgtgagagcagtgggcagaactgacctctcaccactcctgtttcccccaaccccgtgtctccctgcagaaagcgggcagcggcctgcgccagtggaagcgggtgtacgccgcgctgctggcgcgctcgctctcgctgagcaaggagcagcgggagcccgggccggcggcggcgggggctgtgggggccggcgcaggtgaggacaaggcggcgcccgtctgcatcggctcctgcctcgtggacatctacagcgagaccaagaggaggcacgtgttccggctgaccaccgctgacttctgtgaatatctctttcaggctgaggaccgggatgacatgctggggggatcagagcgatctgggagaacagcagggccgagggcgaggtgagggcccggccagcccggcggccacagagggcgggcggggtggcctctcaccggctgtggacctgggatgtccgctctgagcctcacttccctctgctagaaaggggggctgacaggagtgcacctcgtgattgtgtccccctaggtttcggggtgacaagggtgcaagggcagggctcatggaggacctggcgtcctcgggtgcggggaccagcagtcaccatcctgaccctaatgatgacagggattattgtgactgtgttaggatcgccatgagcaggctctgatgtggagtggtcagctccaggccagtctcagcttttctcagcaggcgaggaaggcaggggcctcctatggagtgtgttagggcatgagtgtccccacaccagaactgcactgggctggcctgactgcaggaggatgaacacattgaccttgtgaggaggctgagaggcttggcctttggccacaggtgggcagggttggagccaagggcctcggcagggactttgggagaatttttttttttttttgagacagagtctcgctctgctgcccaggctg

SEQ ID NO: 28651 - DNA, 2282 bp, Artificial sequence
  DNA replication origin
gcatgggagctgcatgcagccttggtgaccaactccctcactcatttaccagccggagacactgaggcctgggagtgcggttgacttgtcctaggtcatgccgctggtttagcctcagagaggtgcccttgtcaccacctcactgtcacattaaaattctccctggagggctctgctgtctcctactctgaatgtccctgtccccctccagcagttctgtgatgagcagggctcacagctcaggatccacatgatgggaggccagatgtgggctgtgcccatctgccagccacgggacctctttgtctggtttgttctgagagctgaggcctgtgctggatgtggagccaccagccagcagagaggagctcttggtctgatgggagatggagctcctgccctcagggtgctccaaggatcattaattcatttattcagcaaatattgatgagcgcttgcatgctgctgtaggccctgggatatggaaatgagaggacggacaagctccctgtccccaggacagcctgaggctgcagtaagttcttggaaaggatcaagctgatcagaagcgggagctgcattgagggaaaaatatggccagagaaggcctcgctgaggaggtgacattggtgatgctggagttcagatctgaaggggaagaaggaagcagccacatatagaagtgagggaggggggcttaggcagaaggaacagcaagcggagaggccctgagaaaagaaaggcttggctcgctcacctgcaagggccccctggcttgacatagtgagaaaggtgtgaagatgaatttggagaaaggcaggtacagaccacaggagactttagatttgattctgagggcgatgggatctcttgagaggatgctgagcatgggagagatgtgatctccttttcattctaacatgatcgctgcagctgctgctggagaatggatgcaggagcaagagtagagactgggaaggtctgtgcatcctccaagcaagaggcgttgatggcatggaaagatgtctttcctctggcaggaaagacagagacaggggatgttttggaggcagaacagttgtgacttcctgatggatgggatgtcaagggcgaggaaaagggaggagtcaagggcagctcccaggtttctggacaactggatggattgactgagctggaaaagatgggggtagagagtggagaagaggtttgatggtaagaaatcacatggcctggcaagtattgtgcaaagtgcccatgggacctgcaaatgaagacactgagcagggtgggggtgccgggctgtggctgggggagatgctgggctcgggaatggccatcagcaggtggacctggtttaaaggcatggcacaggtgacatccttgagggaggtgtgcagggagaggagaggaggggagagtcagggcgaagttctggagctccgcctcctttagggcggggtctgttaccctctgctctgctgacattttgagccagataattccttgttgggggaggctgtcctgtgcattgcgcaatgtttagccgcatccctcagatgccatagcacaccctccagctccctccacacaaatgtcccgtggtgacgagtctcctggctgtttaactacaggtgtagagggtgggggaggggaagcagagaagactaggaaggagccagtggcattaggaagaaagccgggaacgtggggtctcaggtgccgagatggggtctggagagggaaggaggggctggctgtgtcagatgccgccaaggggttaaggcaagttggggagaagcagccattggctttggccacatggcggttctgggtgtccctgagaggagcttctgggcaagtggagtcttgggtgggcggcaggaaagtggggagaacgactctctaagagtgcggacagcttctgagcaggtttgctggggtgaggggcagcctggggaggggcgtgggctgggaatggcttcccgaggatttcatgtacggagggccatgctgggtgtctgagcattgccaccgctcggtgagtgttgatgctggtgtttagagggggagagggttggggtctgctggcgggctttagggtgatgggtaggggtgtctaggcaggcgagggactgagaaagcattggtgggctgtgggcaggaggctgcccaggtctagccgggtggagcaggcggctcctggtaggcagcgtggggtccatcccccggctgtcctctgtctgctactgtgagagcagtgggcagaactgacctctcac

SEQ ID NO: 28652 - DNA, 1444 bp, Artificial sequence
  DNA replication origin
actaacctgcacaatgtgcacatgtaccctaaaacttagagtataataaaaaaaaaaaaaaaaaaaaaaaaaagaccagactggccaaaatggtgaaaccctgtctccactaaacacacaaaagttagccaggcgtggtgttgggcgcctgtaatcccagctactcgggaggctgaggcaggaaaattgtttgaacctgggaagcaaaggctgcagtgaccgagatcgcaccactgcactccagcctcggcgacagagtgagactcagtctcaaaaaaaaaaaaaaaaaagaaattacacatttgtgaggtgatggatattttaaatagcttgattaacaattccatgatgtatacatgtatcatagcatgtgtgaagcgacctacctgtatgaaggtgaggtgacctggtcacgtgacagtgaggtgacctgggggatgtgtgaggtgacctgggggatgtgtaaggttacctgggggtatgtgtgaggtgaacttgggctcatgtgaggtgacccagggtgcatgtgtggtggcctgggtgcgtgtgaggttacctggacatgcatgaggtgacatggggaactcatgaggtgacttgggcatgtatgatgtgacctaaggcatgtgtgaggtgacctgggggacgtgtgaggtgacctgtgggacgtgtgaggtgacctgggggatgtgtgaggtgacctgggggatgtgtgaggtgacctgtgggaatgtgtgaggtgacctgtgggacgtgtgaggtgacctgtgggacgtgtgaggtgacctgggggacgtgtgaggtgacctgggggatgtgtgaggtgacctgtgggacatgtgaggtgacgtggcagatgtgtgaggtgacgtggggaatgtgtgaggtgacctgggggacgtgtgacgtgacgtggggaatgtgtgaggtgacctggggaacgtgtgaggtgacctgggggatgtgtgaggtgacctgtgggacgtgtgaggtgacctggggaatgtgtgaggtgacctggggaacgtgtgaggtgacctgggggatgtgtgaggtgacctgtgggacatgtgaggtgacctggggaatgtgtgaggtgatgtgggtgcgtttgaggtgacgtgggggatgtgtgagcttagcaggagtgtgtgtgaggtgacatggggaatatgtgaggtgacctgcctgatgtgtgaggtgacctgagcacatgtaaggtcacctaaggcgcatctgaggtgacatgggggacgtgtgaggtgacctggggaacgtgtgaggtgacctgtgggacatgtgaagtgacctggggaatgtgtgaggtgacctgtgggacatgtgaggtgacctggggaatgtgtgaggtgatgtgggtgcgtttgaggtgacgtggggggatgtgtgagcttagcaggagtgtgtgtgaggtaacatggggaat

SEQ ID NO: 28653 - DNA, 1007 bp, Artificial sequence
  DNA replication origin
ggacactgcagtccccagatggcttatcccgttaagctaagccctcggccatccctccagctttaggaagaaaagcggttctggcccaagccagactgagcttcctgggtgagggaggggcagtgtccctacccaggcttggaggaggagcctcaaggggtgtgtgtggttgggggagacaggcggtgtcacctgtgcttagaccaggggcggtgggcgggtacccttgaggtggcaaggtcacactgctcatcagaagtttctcactagggtcttctctggcccagcctttgactgaagctggtctggagacaggggcgttagagaagtgactcatagatggcctaaataagcggggccactcaaggacccaggacagggggaagagggccaacccatctggaccgcaggcaaaccccatggcctttgagagaagagagaagaggacccggtgaagtaggctccgagggcctcagcccagcaggagcgcagggtgggcgcgtgatgtcatcgaagggaagacagtgacctgggggagggccgctttgagggagagtgcaggccaccgccagagagctctgggagccgagggcagggaagactttcagatgttgcttgtccaaggggtgggggtggaagggagagagagcagaggctcgagagggatgtaggagagctgatggcactttggggacagcctcagggctgcaattgaggagggctctctccctcatgcaggcttttcctccaggagctgcaccaggaactcacagaggatcagggagaattctgagaacatgctactgtggtgctgcctagagaggaaggataaatgatgacaagtacatctctgagtaacgtatgggcacttgttcatgaaaactgtttttctgaaagcttgtgaaggtcttgaaatactcgctatcagttgaggacaaacatttacaccctccttccacagggagttcaagcaggctggatgggtccatctatggatgatcttcccc

SEQ ID NO: 28654 - DNA, 1254 bp, Artificial sequence
  DNA replication origin
atcgccccacccccacggctggccggcccccctctccctcccgccctgctcgtcacagtccgcccaccttgtccctgccctcctcccggggaggagtcgccgctccagcgggaggcaggatggttgctacctggggcggccgccagctcctcccgcagtgctccgggccgcccctcaccccagggtcgcccgctcctagtgtggcccaggcttcccggcctgcccctcccagccctaggaagacgtcccccgggccccctcagccctccgcctccccttctctccctttctccccgctcctggcaggctgcagccgtctcctcccggtgctcgctccttccttgagctctgtccaccgctgcccactgggggctagagcttcccggctaccctggaagctggaggctgggaccagctcttcaggtgacaggcctctgtgtctccacagtggccagaggggagcctgcctgactgatgagcaaggctccactttgtcaccaaggcagagaaggggcccgggtaaatgaccccggtggcccccacccctgcctggcatgagagtgggtaggggcttcggacttgaggggactggagcgggaataaggcaaggctgccccctggtgcctggcgggtgcacagacccttccccaaaggcctcaggtctgaggtcctggctgcccgccccccacccaccccgtgttcctctccccaggacccccaggcctacccagcaagagccagcttgttgggctgcctctccgccaccagctgagcagcttggttagaattttctagggcaagagtagcctgggggtggggtggggaaggaagtggtcattctcctggcctgggaggtaaagtgtgcccccctcaacttcaagctccctgatctgatcgtggacactgcagtccccagatggcttatcccgttaagctaagccctcggccatccctccagctttaggaagaaaagcggttctggcccaagccagactgagcttcctgggtgagggaggggcagtgtccctacccaggcttggaggaggagcctcaaggggtgtgtgtggttgggggagacaggcggtgtcacctgtgcttagaccaggggcggtgggcgggtacccttgaggtggcaaggtcacactgctcatcagaagtttctcactagggtcttctctggcccagcctttgactgaagctggtctggagacaggggcgttagagaagtgactcatagatggcctaaataagcgg

SEQ ID NO: 28655 - DNA, 1269 bp, Artificial sequence
  DNA replication origin
atgcctggcctgtccttgccttgtggagctgcctatgccccctctagtccctgcttccccaagttcactgtgcggcctgaacatctcctccaggctcccccctcgagactgggatgccatcacgtggccccaggcctggtgctcaggacaggaaaagatttctcaagtgggagccagctgggaaaagggggcagtccctgaggctggccaagggctgctcacctttgaacaagggacagatgttccagacattgatgctgccggccttcatgaactggcccagcgagatctccaagaagaaaatggggattcctccgaccagggctatcaggatgcagggaataaggaacacacctgggggtggaggcacagggtggactcagggtggcccccagccaggctgcccaggcccagcgggccagcccagactccaaaggccccatcacaacttcccactgggtgagtcagtgtaggggtggccactgactcgggccccacgtagggtcttgaggggctgggttcagtgtgttgaagaggtgctacagtagcccctgggccattgaagtcctattccctgggtggcagagaggcactaggcccacagggcttccacccccacggtcacttggggtgatggccatggaggacacgcacgctcagacacgcagcctgtccctagtgccgcaattccctgtttcaggcagcacagtgagggcacgtgcgtgtgtgcatgtgcgccaaggctgggtgatcaggcctgaggggctcatccaaaggcagggagcgcgactgtcctgcacttggacgcttgcctgcaagtgtgaggtccaaggcagagggcgggtgggtcacagtcccctgctggtgggatggccacgtgcaaggacagagggatacaggtgcgggaagaggggccaggccggccttagcaagcccagggagtcaggctctacaggagataggcagggcatggcacaggccctggccagcaggctggggtgggggtggcaaaagggcagggagagctgggtgccactacccccttctcctctctgggcctcctacccttgccctggctgggctcgctccactactcagaggccgagcttggctgcaacttgcctgactccaggtcccagcatccttctcctaactttgggcaaaggcctttgctctggacctctgtttcccacccatcactgggtcacttcggcttccagaaaccccagtgctgttttgtagtcacaggacacacgcgtgcccatcgct

SEQ ID NO: 28656 - DNA, 1739 bp, Artificial sequence
  DNA replication origin
caccagcaggggactgtgacccacccgccctctgccttggacctcacacttgcaggcaagcgtccaagtgcaggacagtcgcgctccctgcctttggatgagcccctcaggcctgatcacccagccttggcgcacatgcacacacgcacgtgccctcactgtgctgcctgaaacagggaattgcggcactagggacaggctgcgtgtctgagcgtgcgtgtcctccatggccatcaccccaagtgaccgtgggggtggaagccctgtgggcctagtgcctctctgccacccagggaataggacttcaatggcccaggggctactgtagcacctcttcaacacactgaacccagcccctcaagaccctacgtggggcccgagtcagtggccacccctacactgactcacccagtgggaagttgtgatggggcctttggagtctgggctggcccgctgggcctgggcagcctggctgggggccaccctgagtccaccctgtgcctccacccccaggtgtgttccttattccctgcatcctgatagccctggtcggaggaatccccattttcttcttggagatctcgctgggccagttcatgaaggccggcagcatcaatgtctggaacatctgtcccttgttcaaaggtgagcagcccttggccagcctcagggactgcccccttttcccagctggctcccacttgagaaatcttttcctgtcctgagcaccaggcctggggccacgtgatggcatcccagtctcgaggggggagcctggaggagatgttcaggccgcacagtgaacttggggaagcagggactagagggggcataggcagctccacaaggcaaggacaggccaggcatagccgggctggggatgggacctgcccagcacacttggctctctaggtaggtcctactattactgtccccaaggacgctggggcacagacaggtggagcgacgtactgaggttgcccactacgggggcaactgtctccaacactacctcaggctactagaaactccccccctccccaccaccaccaccaccagctgctgaggactggagctactgggtggccaggtggaggcttggacctcctggaaccgccatggtggcagtgggacccacagaaggggccaggtgtgtaaggctggagactcaacagcacttggtcagatggggacaggaggagaggggctcgctctgccttgggtctagggggcggctggaggagaggagagaggctggggagtcagcccagtgttggggctcacacaagggggagtccaggggagtcaggagcaccacaaacaaggctccagaaggacagacggtgggagcactgccagcctgggtggggagataaaggggtggcaggggaggtggccaggaaagaatctacatggcaaggacttcccggccccaggcctgggctatgcctccatggtgatcgtcttctactgcaacacctactacatcatggtgctggcctggggcttctattacctggtcaagtcctttaccaccacgctgccctgggccacatgtggccacacctggaacactcccgactgtgtggagatcttccaccatgaagactgtgccagtgccagcctggccaacctcacttgtgaccagcttgctgaccgccagtcccctgtcatcgagttctgggagtgagtccagcacctctgggccaagcccatcccatcccccaggtctccctcat

SEQ ID NO: 28657 - DNA, 780 bp, Artificial sequence
  DNA replication origin
ccaagaatgaagtagttacatgcaggtgcctagggggctgctgcaggagcccccagaaggcgtccctctgatggggtgggagatctgaaagggtttctgggggggaggtgaggattgagctgggtcgagaggacattccggcctggaggactgccacacagagccaggtgtgttccaggaatggtgaggggttaggtgttactagagaagggggccacgtggttagtgagggaggagagctcactgagggtgtgcatgctggcagcaggtggcttaagcagagggctaacgtggtcggatttgccttgctctgggaggtggatgggaaagccgtatggtggcagatagggaggaggcgccagcagtggggatgatggcgggcatgtttgcagttgacatggaaagcgctgggttgcggcctgggctagggggccaagagggccgagtctaaggtggtttgcctgcccacgactacagcaggggctacacgaggtggtcaggtcaggcaggacaagggaaggcccattttggacaagctgagtctagaatgtctctggggacatccaggagccaatgtttagcaggaggttaggtgtgagtctgggccgcagagaaaaccctttcagggataagagtggctgggaagaaggtatagggtgtcagctgaagagtgcagatcccagagggagcagaataacagtgggaggagggtgttgcgaggggacctcaggagggtaacttagcagcagagcaaggagctcagggtgaccgcctgcctgg

SEQ ID NO: 28658 - DNA, 1375 bp, Artificial sequence
  DNA replication origin
cccgcacggctttttgcctccgccgccgcggctttttgcccccgccgccacgactttttgcccccgccacagcggctttttgtggctttttgcccccgctgccacaggttgttcccaccgcggctttttgcctccgccgccacggctttctacacccgccgccgcagctttttgcctttgcggctttttgcactcccccgccccgccactttttgcccccgccgccgcggctctgacttcgggatccgccgactaggctgccagctctaccggcgtcctggctcgggcagcgccgaggggcgctcctcgtccagctctcccagctccggggtttcttgcctagacgcccgcgcccctacctccccgccttgaccgctgcagcctgcatagactggcgctgcgcccggctgcgatgggagagaaaaaggagggcggtggcgggggtgatgcggtggcgcagagggaggcgcaggggccgccgctagccgggtgctgcagcagtgcgggcagctccagaagttcataggcatctccatcggcagcctgctcgggctgcgcaccaagtgcgctgtgtccaacgacctcacccagcaggaaatacggacgatggacgtaagggggtccgggacactggctgggctcgaggagtggcccggacacctcccttggggccccaattcactcctggccgagttgcatccttgagcccgcgtggcccccttggaggcttctcttccctcctgcactagctgatgcggcagccagaggaccccggaccagccctcaccttgggcaggatttgtggggcgggtgcgtggtgggaacttggatggaggcttgaggggcccgtgggcggggtgggctgcgcgcagacatccccttacaacccgaatttccatctggtccagccctctcgtcttgtaggtgaggaaaccaaaggcctgagggagaactgacttgccaggaacctctcttaaagagaattaacaaagtgtggttattaaaggagaactgagttgggagtcagacctgggagcccacacccttggttgagacattataccaccttgagtctggcctgttgactgagggtgagccactccatcctcgtctgattgtggggtcttgacctcaaggggtttcctgcaggaagaagcagatgggtttgctttcctagctctgtccagtaccttagggaccctgaggactggagagattcttggagagctatctagtgtatgtcatgggtgggccttttttgaaggtcagtctgcccagtggactggctcagcccgaatgaactctcttgaatctttggagttgtctgtgtacttttaagggcttctcatccttgcaccaaaagatcccctggaaa

SEQ ID NO: 28659 - DNA, 911 bp, Artificial sequence
  DNA replication origin
caaaaagccgcggcggcggggaagaagccgcggcggcgggggcaaaaagcaacggtggcaaaaagccgcggcggcaaaatccgtggcggcgggggcaaaaagccgcggcggcgggggaaaaaagatgcaaaaactgtggcggcgggggcaaaaagcctcaaaaagccgcggcagcgagagcaaaaagccgtggcttaggggacaaaaagccgcgatatcaaaaagcagcaaaggctggggcaaaaagccgcggcggcaaaaagccacggtggcaaaaagccacagcagcggggggcaaaaagatgcaaaaagccccggcagcgggggaaaaatcagcgggagcaggggcaaaaaaccacaaaaagccgcggcagaggggggaaaaagccgcggaggcggcggcaaaaagccgcggagtcgcgggggaaaagccgcggaggcggcggcaaaaagccgcggagtcgcgggcaaaaagccgcggcggcggaagcaaaaagccgcggcagcgggggcaaaatagtggaaatggggtagaaggcccgcacagcttggcattgctgtagtgtgatgtgataggaaaagtgcagccaaagacaaaaaaaagatgtaagtaggcttgactcagtgcagctaagaacccagatgttatctggagggtattaactaataagcagtttaaatcagaatggtgcgttctgatttgttttttgtatgttcacatttggcaggcatagatactgtttgaagagaggaaagtcagtagatagaggtaacaaacttaaatatgtgccaagtctagaaacaagagactagggggataaggacctttcaaaataaaatgcaagatttgaaaactgattggctgggggatgacgaaaaggcaggtctttaagatcaatccctgttttgct

SEQ ID NO: 28660 - DNA, 1121 bp, Artificial sequence
  DNA replication origin
ggaatggagtggactcgagtgaagggattggagtgaagtggagtggagtggaatggagatgaatggaatgtgatggaatggaatgaagtggagtggagtggggtggactggagtgtagtggaaaggagcggaaaggaatgggacggagtggaatggagtggaatggaggtcagtggagtgcagaggaggggaatggagtggaatggaattggatgtaatggaatgtagtggagtgcagtggagtggaacagagtggaatggaatggaattgcatggaacggaatggaatggaatgcaatggaatgcaatggaatgcaatggaatagaatgcaatgcaaaggaaatttgacatgtaatgtgagctgagattgggccactgcactccagcctgggtgacacagtgatatcctgttgaaagaaaggaaagaaatgcaatggagtgaaatggaatggaatggaatggaatgggatatagtggaatggagaggaatagggtggagtggagtggagtggagtggaatggagtttagtggagtggagtggaatggaatggggtggagtggagtggagtggaatggagtagagtggactgtagtggagtggagtggaaaggaatggaatggaatggaattaaatggagaaaagaaatgtgtgctgagattctgccactgcgctatagcctgtgtgacagagggagatcctgtcgaaagaaaggagtggaatggaagggattggaatggaatggattggagtggagtggagtggaattgagtggagtggagtggagtggaatggaatggaatggtgaaatgaaatgtgagctgagattgtgccactgaacaccagcctgggtgacagagtgagttcctgtcaaaagaaaggaatggaatggaatggagtgtaatggaaagggatggagtggagtggagcggaaaggagtggaatggaatgggatggaatggaaaggagtggagtagactggaatggagtggagtggagtggaatggattggagtggagtggagtggattggaatggaatggaatggaatggaatggaatggaatggaatggtgaaatgaaatgtgagctgaggttgtgccactgtgctacaagctgggtg

SEQ ID NO: 28661 - DNA, 1157 bp, Artificial sequence
  DNA replication origin
atggaatggaatggaatggaatggtgaaatgaaatgtgagctgaggttgtgccactgtgctacaagctgggtgacagagtgagatattctcgaaagaaagaaatggaatggaatgcagtggaatggaatggaatggactggaatggactggagtgaagtggagtggggtgaagtggagtggagtggaatggagagggatggaatgggatggaatgaagtggagtggagtggggtggagtggagttcagtggagtggagaggagtggaatggagtggaatggaataggatgtaatggaatatactggagtggagtggagtggagtggaaaggagtggaattgaatgtaaaggaatggaatggaatggaatggaatgcaatggaacgcaatggaatagaatgtaatgcaatggaaagttgacatgtaatgtgagctgagaatgtgccactgcactccagcctcagtgacacagtgatatcctgttgaaagaaaggaatggaatgcaatggagtgaaatggaatggaatggaatggagtggagtggagtggagtagaatggagtagaatggaatgggatggagtggaatggaatggagtggagtggagtggagtgaaacagactggaatggaaggggatggaatggaatgtagtggaatggtgaaaagaaatgtgagctgagattgtgccactgcactccagcctttgtgacagagtgtgatcctgtggaaaaaaagaaatggaatggaatggagtggaatggaatggaatggagtgaagtggagtggagtggactggagtggagtggagtggaatggaggggagtggaatggagtggagtggaatggagtggaatggaatgcagtggagtggagtggagtggaatggaatggagcatagtggaatggagtggaatggaatgcagtggagtggagtggaatggaatggagtggaatggaatggaatggagaggaatggagtagagtggagtggaatgaagtggagtggattggagtggagtggaatggaatggagtggaatggagtggagtggaatagactggagtggagcggaatggaatggaatggaatggaatggaatggaatggaatggaatggaatggaatgcaatggaatggaatggaatggaatggaatggaa

SEQ ID NO: 28662 - DNA, 918 bp, Artificial sequence
  DNA replication origin
aatggaatggaatggagaggaatggagtagagtggagtggaatgaagtggagtggattggagtggagtggaatggaatggagtggaatggagtggagtggaatagactggagtggagcggaatggaatggaatggaatggaatggaatggaatggaatggaatggaatggaatgcaatggaatggaatggaatggaatggaatggaattgagaaaagaaatgtgtgctgaggttgtgccactgcactacaacctgtgtgacagagggagatcctgtcaaagaaaggagtggaatggaagggattggaatgaaatggaatggaatggattggagttgagtggagtgggattgagtggagtggagtggagtgcagtggaatggaatggaatggtgaaaggaaatgtgagctgagattgtgccactgcacacgagcctggatgacagagtgagatcctgtccaaagaaaggaatggaatggaatggaatggagtggagtcgagaggaatggagtggaatggaatgggatggaatggaaaggagtggagtggagaggaatggagtggagcagagtggagtggaatgaagtggaatggaatgggatggaatggaaaggagtggagtggactggaatggagtggagtggagtggaatggaatggaatggaatggtgaaatgaaatgtgagctgagattgtgccactgtgctccaggctgggtgacagagtgagatactctcgaaagaaaggaatggaatggaatgcagtggaatggaatggaatggaatggaatgaaatggagtggactggagtggagtggagtggaatggagaggaatggactgggatggaatggaatggaatgaagtggagtggagtggggtggactggagtgcagtggaaaggagcggaaaggaatgggac

SEQ ID NO: 28663 - DNA, 1294 bp, Artificial sequence
  DNA replication origin
tgggacagagtgaaatggagtggagtggaggtcagtggagtgcagaggaggggaatggtgtggaatggaatcggatgtaatggaatgtagtggagtggagtggagcagagaggaatggaatggaattgaattaaatggaatggaacggaatagaatggaatgcaatggaatgcaatagaatagaatgcaatgcaaacgaaagttgacatgtaatatgagatgagattgtgcgactgcactccagcctgggagacatagtgatatcctgtcgaaagaaaggaatggaatgcaatggagtgaaatggaatggaatggaatgggacatagtggaatagagtggaatggaatggagtggagtggagtggaatggaatggaatggagaaaagaaatgtgtgctgagattgtgccactgtgctacaacctgtgtgaaagagggaaatcctgtcgaaagaaaggagtggaattgaagggattcgaatggaatgaaatggaatggattggagtggagtggagtgggattgagtggagtggagtggagtgcagtggaatggaatggaatggtgaaaggaaatgtgagctgagattgtgccactgcacaccagcctgggagacagagtgagatcctgtgaaaaaaaagggatggaatggaatgaatttagaagggaatgtaatggagtggagtggaatggagtggagtggagtggaaaggagtggaatggagtgggatggaatggaaaagagtggaatggattggaggggagtggagtggaatgaattggagtggagtggagtggagaggagtggaatgaaatggaatggaatggaatggtgaaatgaaatgtgagctgagattgtgccactgcactccaggctgggtgacagagtcatataatctcgaaagaaaggaatggaatggaatgcagtggaatggaatggaatggagtggactggagtggagtgaagtggggtggagtggaatggacaggaatggaatgggaaggaatgaagcggagtggcatggggtggagtggagtgcagtggaatggagcggaatgcaatgggatggagtggaacggagtggagtggaatgcagtggagtggagaggagtggaatggagtggaatggaatcggatgtaatggaatatagtggagtggagttgagtggagtggaatggagtggaatagaatggaattgaatggagtggaatggaatggaatggaaaggaatgcaatggaatgcaatggaatagaatgcaatgcaatggaaagttgacatgtaatgtgagctgaga

SEQ ID NO: 28664 - DNA, 1074 bp, Artificial sequence
  DNA replication origin
ggagtggagtggactgcaatggagtggagaggagtggaatggagtggaatggaatcggatgtaatgcaatgtagtagagtggagtggaacggaacagaacgtaatggagaaatgtgtgctaagattgtgccactgcactacagcctgtgtgacagagggagatcctgtcaaaagaaaggagtggaatgcaatggcatggcatggaatggaatggaatggaatggcatggaatggaatggaatggaatggcatggcatggaatggaatggaatggaatggcatggaatggaatggaatggaatggaatggaatggaatggaatggcatggcatggaatagaatggaatggaatggaatggaatggaatggcatagaatggaatggaatggaatggaatggcatagaatggaatggaatggaatggaatggaatggaataggctttcaggttgtgccactgcactccatgctgggtgacagagtgagatactctcgaaagaatggaatggaatggaatgcagtggaatggaatggaatggaatggaatggaatggaatggactggagtggagtggagtggagtgaagtggagtggagtggaatggagaggaatggaatgggatggaatggaatggaatgaagtggagtggggtggagtagagtgcagttgaatggagcggaatggaatgggatggaatggaaaggagtggagtgcactggagaggagaggagtggaatgcagtggaatggaatcggatgtaatggaatgtagtggagtggagtggagtggaacgcagtggaatggaatggaatggaatggaatggaatggaatggaatggaatgcaatggagtgcaatggaatagaatgcagtgcaatggaaagttgacatgtaatctgagctgagattgtgccactgcactccagcctgggtgacacagtgatatcctttcaaaagaaaggaatggaatgcaatggagtgaaatggaatggaatggaatggaatggaatggaatggagtggagaggagtggagtggagttgaagggagtggaatggaatggaatggaatcaaatt

SEQ ID NO: 28665 - DNA, 885 bp, Artificial sequence
  DNA replication origin
aattgaatggagtggagtgaagtggagtggaaatgactggaatgggatggaatggaaaggagtggagtggagtggaatggagaggagtggagtggaatggtttagagtggggtggagtggagtggagtggagtggaatggaatggaatggaatggaatggaatggaatggtgaaatgaaatgtgagctgagattgtgccactgcgctccaggctggatgacagtgagatactcttgaaagaaaggaatggaatggaatgcagtggaatggaatggtatagaatggaatggagtggactggagtggagtggagtgaagtggagtggagtggaatggagaggaatggaatgggatggaatgaaatgaaataaagtggagtggcgtggagtggagtgcagtggaatggagcagaatggaatgggatggagtgaaatggagtggagtggactgcaatggagtggagaggagtggaatggagtggaatggaatcggatgtaatgcaatgtagtagagtggagtggaacggaacagaacgtaatggagaaatgtgtgctaagattgtgccactgcactacagcctgtgtgacagagggagatcctgtcaaaagaaaggagtggaatgcaatggcatggcatggaatggaatggaatggaatggcatggaatggaatggaatggaatggcatggcatggaatggaatggaatggaatggcatggaatggaatggaatggaatggaatggaatggaatggaatggcatggcatggaatagaatggaatggaatggaatggaatggaatggcatagaatggaatggaatggaatggaatggcatagaatggaatggaatggaatggaatggaatggaataggctttcaggttgt

SEQ ID NO: 28666 - DNA, 905 bp, Artificial sequence
  DNA replication origin
gagcacattacagcttcctgagtataaggaaatatcctctcataaaaactaaacagaagcattctgagaaacaactttgtgatgtgtgtggattggagtggaatggaatggaatggaatggaatggagtggagtggagtggagcggagtggcatggagtggagtggaatgggatggagtggagtggaaaggagtggaatggattgggatggaatggaatggagaagaggggagtggagtgaagtggagtagaatggaatggaatggaatggagtggagtggagtgaattggagtggaatagaatggaaaataatggaaaggaatggaatggaatcaaacataatggtacagaatagaatgtaattgaatggtgaaatgaaatgggagctgagattgtgccactgcactacagcctgtgttacagtgtcagatcctgtcaaaaggaaggaagagaatggaatgcagtggaatggaatggaatggagtggaatggagggagtagagtggagtggaaaggagtggaatggaatgggatggaactgaaaggagtggagtggactggaatggagtggagtggagcgcagtggaattgagtggagtggagtagagcacagtggaatggaatggaatggaatggaatggaatggtaaaatgaaatgtgagctgagattgtgccactgcacaccagcctgggtgacagagtgagatcctgtcaaaagaaaggaatggaatggaatggaatggagtggagtggagtggaaatgagtgaaatggaatgggatggaatggaaaggagttgagtggactcgaatggagtggagtggagtggaatggaatggaatggaatggaatggtgaaatgaaatgtgagctgagattgtgccactgtgctccaggctgggtgac

SEQ ID NO: 28667 - DNA, 904 bp, Artificial sequence
  DNA replication origin
ggccattttggagactccccatgttgcaggaaacaggaatccgtcgtcaggccgtaatgcctcagtcccctgcccaggctcaaggcccatcaggcggcctctctttcactcacattccaggccttcccccagctcgcgagctcccgagcttccaatatatcgggctggctcaggacagggtgtgctccgaggcgtcagggcccggggcccacagtcctgggatcacctctggtcctccgccttgccacggaaaaattgttttggatccctcgccgcccttcttgcaaggccccctcttgccccacacacagagaacagccgccagggctgcccaggggcgaacagccggcccagccccacggggcctttttctcacaacgcccacaccatcgtcgcttcttccaacgaagacccgccagtggccaacaggacaggaaggccctactttgccccgcgctggcactagagccccagcagcctgatcccgggaaagaggggctgacagacacccagacacaccacaccaccaccacgagcaaacccacacagacacacacacagatacacacgggtgcacgcgcacaggcacacacgcacacacagggacacacacaacacacagacacacacacatggacacacaaagactcacacacagacacatggacacacgcacacggacacacactgaaacacacacaaggacatacagacaaagacacagacacagcttgaaagagagctagggagaccgggatggagagatagaaatggggggagagagagaaagttgcagggggagagagacagaaggtaacagaagagtgagaggtggagggtgaagtagagaaagggagagggtgagggagttgcagagcaagagagacagaaccttggagaggga

SEQ ID NO: 28668 - DNA, 698 bp, Artificial sequence
  DNA replication origin
ggcggtagtgcagtggcgtgatctcggctcactgcagcctccgcctcccaggttcaagtgatgctccctcctcagcctctcgagtagctggcattacaggcgcctgcccccccgcgcccgactcaatttagtatttttagtagagacggggtttcgccgtgttggcaaggctggtctcgaactcccaatctcaggtgatccacccgcctcggcctcccaaagtgctgggatgacagacgtgagtcaccgagcctggccttaaccgtgtatttttaagtcaaggagctgatcagggaaatatgagaagtagggacgccacacgtaacagagagaaaagcttgaaaatgccccttccatccaagtggggacccggcctcgacctcccgaaatcatacgccgagtggcgaagcctagcaagtctcatctgtctagattcctctcggcctctctaagcaggcgcttctcactttcgtggaaggggcaggaccctccccggcacggggggtctgacagactgacagagaaagagacagacatagaaagacagagatggacagagagagacggagagaaacagacagaaagagagagagacagagacagagagagagagagaaacagacagggagggagagagacagagagagagagacagacagagacagacagagagaaacaaacagaaagagagagagaca

SEQ ID NO: 28669 - DNA, 884 bp, Artificial sequence
  DNA replication origin
cttggctcactgcaacctccacttcctgggttcaatgactgtggctcgcgcctctctggaaacattggaaatctctcttctacgcgcggccaactgaaaccacaggagctcggaacacaagccaccatccacctcactgctttcgggagagaatgatgagtctcttaccgactctctcttgagagagtcctccgcggtggggaccgagggcggctcgtcacctactgtgtggcccgcgcctcccccttccgagtcgggggaggatcccgccgggccgggccggcgtcctagcggttgggaggctgcgcgagcggtggctgtgccaggcgttccgtccggcgcgtgacccgctccgctgcgagccggctctccacccgctcccctgaggagcagcgaccggtgccgacaaccgcgtttgcgtggcacggggttgggatgcctggccatgggaagcatcccaagtggggggcgcgccggtctcccggagcttgacagtgtcggaggatggacaagaaaccagcaacgtggccctggcgttgggtttgtggctgaggtcgcttcggggtcccgatggcgggacccaggctcgtgaggcgggtctcggtgggtgccaggggccgtccggcttcctaggcggggcgccgcgggacctccctcgtatctgtggcggtgggatcccgtggccgtgttttcctggtggcccggctttgcctgaggtttcttcccgagccgcccctctgcgggctcccgggtgcccttgcccttgcggtccctggccttgcctgtctgtgcccccctccccgcccgcgtatcctctctccccgagcggctcaccagcttaggctgtggtggccccctctgggaccaaacccggctccgccttg

SEQ ID NO: 28670 - DNA, 2538 bp, Artificial sequence
  DNA replication origin
cccggctttgcctgaggtttcttcccgagccgcccctctgcgggctcccgggtgcccttgcccttgcggtccctggccttgcctgtctgtgcccccctccccgcccgcgtatcctctctccccgagcggctcaccagcttaggctgtggtggccccctctgggaccaaacccggctccgccttgtgtggcgctgccacgggccactggttggccggttgtccctgtccccgggcgcgcgccttccggaccaggtcggcggcgctccgcatgggcctggtgagagcccggagggtatggggtcggcgtgcagcgcgcgcagggaagagggttccgggggctggccgcgatggcggaggcggtgggggagccgcggggccgccttcatgcttggaggccgctggcggtgagatcccgggcaccgcggtccgcctctggttcgctgcccaaacgtctgggctgccccgcgcccgccacgcccgagtggccgccggtccctcgcagctgccgtgcacgggtcgggcggtctgcctgttcgcacgtgggcgcgaaggttcgggagtggtgagcccatcggggggtgttctgtagtgtgggtgtatgggatgtccggttcgccgccccaccacccccctcccaccgccccgcgctgctccctccctcccacaagccgggtcgcccgccctgccgcgcccatcctcgcgactgggacgccgggctcatcctcgcgaggcctggaggccgctttctacctacttggttgatcctaccagtaccatatgcttgtctcaaagattatgccatacatgtctaagtaggcagggccggtacagtgaaactgcgaatggctcattaaatcagttatggttcttttggtcgctcgctcctctcctacttggaaaactgtggtaattctagagctaatgcatgccgaagggtgctgacccccttcgcggggaagatgcctgcatttatcagatcaaaaccaacccggtcagcccctctccggcccctgcctaggggtcgagtgccaccggctttggtgactctagatagcctcgggccaatcgcatgcccccctgtggcagcaacgacccattcgaacgtctgccctatcaactttcgatggtagtcgctgtgcctaccaaggtgaccacgggtgaaggagaatcagggttcgattctggagagggagcctgagaaatggctaccacattcaaggaaggcagcaggcatgcaaattacccactcctgactcgaggaggtagtgatgaaacataacaatacaggactctttcgaggtcctgtaattggaatgagtccactttaaatcctttaacgaagatccattggagggcaagtttagtgccagcagccgcggtaattccagctccaatagcgtatattaaagttgctgcagttaaaaagctcctagttggatcttgggagcgggcgggcagtccgccatgaggcgagccactgcccgtccccgccccttgcctcttggcgccccctcgatgctcttagctgagtgttccgcggcccaaagcgtttactttgaaaaaattagagtgttcaaagcaggtccaagccgcctggataccgcagctaggaataatggaataggaccgcggttctattttgttggtttatggaactgaggccatgattaagagggacagctgggggcatttgtattgcaccgctagaggtgaaattcttggaccggcgcagtttggaccagagtgaaagcatttgccaagaatgttttcattaatcaagaatgaaagtcggaggttcgaagacgatcagataccgtggtagttctgaccataaacgatgccgactggcaacgtggcggtgttattcccatgacccgctgggcagcttccaagaaaccaaagtctttgggtttttaggttccggggggagtacggttgcaaagctgaaacttaaaggaattggtggaagggcaccaccaggagtggagcctgcggcttaatttgactcaacatgggaaaaatcccccgggccggacagggacaggattgacagattgatagctgtttctctgttccatgggtggtggtgcatggccttagttggtggagtgatttgtctggttaattccaataaccaacgagactctggcatgctaactagttacgtgacccccgagcggtcggcgtcccccaacttcttagagggacaagtggccttcagccacccgaaattgagcaataacagatctgtgatgcccttagatgtccgggactgcacgcgcgctacactgactggctcagcgtgtgcctaccctacgtggcagaggcgggtaacctgttgaacctcattcgtgatggggatgggggattgcaattattccccatgaaggaggaatttccagtaagtgcgggtcataagcttgcctgaagtccctgccctatgtacacactgcccgcctctactactgataggatggtttagtgaggccctctgatcagccccgccgggtcagcccactgccctggtggaacgctgag

SEQ ID NO: 28671 - DNA, 1364 bp, Artificial sequence
  DNA replication origin
gtcatggcggggtgggggtctcggtgccctccctgccggagccgtcgtcccgccctgtcccaccagctcggccccatcccgccggctcccgttggggccggccgggttcccattgctgccgctgccgccatccttgcctctgccacaccgcgccaccgggcccggcctggcccgcttgctctctccagccttcccgctagggcgtctcgagggtagggggccggacgcctgtcgccccctcctcgtccgcccccgccgtccaggtacctagcgcgttctggcgcggaggtttaaggaccccttggggggttgtccgtccgcccatgggtcgggtgcggtgggcccgcgggggagtccgttcgggaggggcccgcccctccctcgcctcccccgccgactccatcccctcggccagccggggccgcgcctcactttcaagtcgccgctgacgctggtgggggctttaccggcggccgtcgtgccatcgcgcgcctgccgcgcgtatggcctgtgcaccgtgctgtgggggcgggaatccccgggcgcccgtggggtgctgtcagtgttcgccctccgcccccgtggtcgacaccgcctccctgtgttgtgaaaccttcctacccctctctggagtctggtctcgttgctgtctgactggcgggcctgagggaaaccctctggcggacgtgctgtgccaggagggcctcctggtgttgggagcgcccttgccaaatccaccttgtatgacttttagcggtggatcactgggcttctgtgtcgatgaagaacgcagctagctgtgagaactaatgtgaattgcaggacagattgatcatcgacacttcgaacgcaattgcagcccgggttcctcccagggctttgcctgtctgagcgtcgcttgccgatcagtagtccccgggggtgcctccgggctcctcggggtgcatggctgggggttccctgacgtggcctgccggggccctccgtccccccaagtgcagaccggcgacgtccgccctcctctgccgccgtgcccgccccttctccctccccccgcaggccctgtgtggtcacgcattgggtggcatggggaagggggactcccggctgtgaggaagagagagagggcggcaccgccacccgcgaaaacagagagggaagagagccggctggggccgagttcccgtggccaccaccgcggtccagattcctccctcggaggctccctcgcgcctcacgcagctcgtggtgcggggttcgttggccctggcggggtggaaggtcccgtgccgtcgttgtcgatcgtcgtgggtagtgggggcttgttgccggggggaggaaggcaagtaggaaggatccgccag

SEQ ID NO: 28672 - DNA, 889 bp, Artificial sequence
  DNA replication origin
acccagcagccaccccgtctgggaagtgaggaacatctccacccggcagccaccccgcctgggagggaggtgggggacagcccccgcccagccagccactccatctgggagggagatggggggtcagcccctgcccggccagccaccccgtccatgagggaggtgggtggtcagcccccacccggccagccgccccgtccgggagggaggtgggtggtcagtccccacccggccagccaccctatctggtagggaggtggggggtcagcccccgcccggccagccgccccatccgggagggaagtggggggcacctccgcccggccagccaccctgtcctggaggtggggggcacctctgcccggccgccccttctgggaagtgaggagcccctctgcccggccgccaccccgtctgggatgtggacccaacagctcattgagaacgggccatgatgatgatggtggttttgtggaatagaaaagggggaaaggtggggaaaagttagagaaatcagattgttgctgtgtctgtgtagaaagaagtagacatgggagacttcattttgttctgtactaagaaaaattcttctgcattgggatgctgttgatctatgaccttacccccaaccctgtgctctctgaaacttgtgctgtgtccactcagggttaaatggattaagggctgtgcaagatgtgctttgttaaacagatgcttgaaggcagcatgctccttaagagtcatcatcactccctaatctcaagtacccagggagacaaacacccgcggaaggccgctgggtcctctgcctaggaaaaccacagacctttgttcacttgtttatctactgaaattccctccactattgtcctatgactctgccaaatcc

SEQ ID NO: 28673 - DNA, 1198 bp, Artificial sequence
  DNA replication origin
ctgaccacccacctccctcccggacggggcggctggccgggtgggggctgaccacccacctccctcatggacggggtggctggccgggcaggggctgaccccccatctccctcccagatggagtggctggctgggcgggggctgtcccccacctccctcccaggcggggtggctgccgggtggagatgttcctcacttcccagacggggtggctgctgggtggaggggctcttcacatctcagacagggcagctgctggacagaggggctccacacttctcagatggggcagctgctgggcagaggggctcctcacttctcaggcggggtggctgccgggtggaggggctcctcacctctctaatggggtggccaggcagagatgctcctcacctcccagacgggattgcagctgggctgaggcactcctcacatcccacacggggtggaggggcagaggtgctccccacatctcagacgatgggtggctgggcagagatgctcctcacttcctagatgggatggcggccgggaagaggcgctcctcacttcctagactgggcagccgggcagaggggttcctcacatcccagatgacgggtggccaggcagagacactcctcacttccaagacggggtggcggcttggcagaggctgcaatcttggctcttcaggaggccaaggcaggcagctgggaggtggaggttgtagccagccgagatcatgccactgcactccagcctgggcaacattgagcactgagtgaacgagacgccatctgcaatcccagcacctcgggaggccaaggctggcagatcactcacggttagcagctggagaccagcccggccaacacagtgaaaccctgtctccaccaaaaaaaatacgaaaaccagtcaggcgtggcggcatgcacgtgcaatcgcaggcactcagcaggctgaggcaggagaatcaggcagggaggttgcaatgagccgagatggcagcagtacagtccagcttcggctcggcatcagagggagacagtggaaagagagggagagggaggccatgtggagatggagacagagggagagggagaggaagagggagagggaaagggagaccgtgtggagatggagacagagggagagggagaggaagagggagagggaaagggagaccgtgcagagagggagacagagggagagggag

SEQ ID NO: 28674 - DNA, 1063 bp, Artificial sequence
  DNA replication origin
ctttgttaaatgtttacatttccatgaaaacctatacctaacaacttaaaattttgtgtaaaatccttcgtgccctgcacttaggctccactgcataatgaataaaaggaaaatggattctcctgcgggaagttctgctgggctctccctttcttttccctgcaacatacggagagcattttgaggtctccatggggtgaggtggccgtgagtgccgggaggagtgcatgtgtggagatgtgtttcgtgcccacgattctcccttgggtctttctgactgtggtggtggctttgaggatggtttctgaggatcctctccaggggagctctccgcttgtgagatctccatctggggaggggggaagatgtctggggagggatttatggggtcgcccctgtgtgacagaggcgccctgtgcggggtctccgggaaagcatatttttaggggtggctgggggaagccatcgtctgggtggagggtggggcctagtctcccctgtagggggggcgggatgtctgagggagtgctggagggtcctcctgtgagtcggggtcgctgtgcagggtctcagtacagccctcgacctggggaactcattgtggagaccccgaggtggttggggcggggaagggggcagcctgggcagttgccgcagtgtgtcagtgtcgctgatgccaggagacaggtttgggaggagtctttggaggggaataattgtggagtcccatgttccgggcggggaacactcgagggtgctccaaggccagaggtcaatgcggggtgcgcgtgaataacctagggggacactcaggggaatgatggctcccccgagaggtaaagggtggaaagaaggggcctcagcaggttaggtcttgcagggtccttctgtagggcgtctgggagatagatccgtggggctcctagggtcgcccctacccggcgcggggtattttcccgtcttcagacctttctgggtcccggaggaaggaagtgaaactggcatcgctctctgcatcgcccggtggacgcggccaggaggcctgggctcccgcctgccacac

SEQ ID NO: 28675 - DNA, 1475 bp, Artificial sequence
  DNA replication origin
caaaaagccaaggcagtgggagcaaaaacttcggcggcggaggcaaaaaaccatggtggcaggagcaaaaagccacggcggtggtggttaaaaaaatagctgcggtggcaaaaacccgtgacgggggcaaaaacccacagtggcagtggaaaaaacagcggtggcaaaaagccacagaagtgggggcaaatagccccggcggcgggtgcaaaaagccgcagcagggagggcaaaaagccttggcttcgggggcaaaaagctgcagcagcaaaaagctgtagctgcgggggcaaaaagccatggcagcgggaggcaaaaagccgcaaaaacagcggcagccagaacaaacaccaaggcggcaaaaagcctcagtggcgggggctaaaagccaaggcggcggggagtaaaatgccgcaaaaagccgtggtggcgagggcagaaagctgtggcttcggggacaagaagccatagcggcggggcaaaaagccacggcggcgagggcaaaaagctgtggctttgggggtaaaaagccgtagtggcggggcaaaaagccacggcggcaagggcaaaaagttgtggcttcgggggcaaaaaaccatagcagcggggcaaaaagcagtggtggcggcggggccagaaaaaccacaaaatcccgcggcgatggggggaaaagctgcaggggcaaaaagccgcagcagcagggggaaaaaagccgtaaaaagcagcagcggcgggggggcaaaaaccgtggcggcaaaaagcctcagcggcaggagcaaaaagccatggcggcaggggcaaaaaccgcagtggaaagaagactcagtggcaggagcaaaaacgatggctgtggggggcaaaaagccatgactgcaaaaactgcggtggtgagcccaaaaagccatggcggtggggataaaaagccacagctgcaaaaagcagcggtggtggggataaaaagccgtggcggcaaaaacccgcagcagcacaggcaaaaagccgtggcagcaggggcaaaaagccacggtggcaggggcaaaaagccgcggcggtgagggcagaaagctgtggcttcgggggcaaataaccacggcggccaaaagccgtagtggcagggcaaaaagctgcagcagtgggggcaaaaagcagcgggagcgggtgcaaaaacccacaaaaacccatggcaacgggaggaaaaagccatggtggcaaaaagccacagtggcggggggtaaaaagccatggcggtgagggggcaaaaagccacaaaaagcagcgtcggcggggacaaaaaccacggcggcaaaaagcctcagtggcaggagcaaaaagccatggcggcggaggcaaaaagccgtggcagcaaaaacccgtggtggcaaaaacccgtggtggcaggggcaaaaagccgtggctttggaggcaaagagccgtggctgtaaaaagccatagtggcgggagcaaaaagccacaaa

SEQ ID NO: 28676 - DNA, 962 bp, Artificial sequence
  DNA replication origin
aaaaacccatggcaacgggaggaaaaagccatggtggcaaaaagccacagtggcggggggtaaaaagccatggcggtgagggggcaaaaagccacaaaaagcagcgtcggcggggacaaaaaccacggcggcaaaaagcctcagtggcaggagcaaaaagccatggcggcggaggcaaaaagccgtggcagcaaaaacccgtggtggcaaaaacccgtggtggcaggggcaaaaagccgtggctttggaggcaaagagccgtggctgtaaaaagccatagtggcgggagcaaaaagccacaaaaagccacggtggcgggggcaaaagccacggcgccgagggcaaaaagccgtggcttcgggggcaaagagccgcagtggcaaaaagctgcaaaaagccaaggtgacggggcaaaatgccacggcggcggggttaagaagccacggcggcggggcaaaaagccgcggcgggagaaacccgcagcagcgagggcaaaaatccatggcagcagtgacgaaaagccacagcagcggtggcagaaagccgtgaggcgggggaaaaatccgcagcagcggggtcaaaatggcactgcagcgggcaccaaaagccacagaaagccccagtggtgggtcaaagagtcgcaaaaagcaccagcgttgggggcaaaaagccgcagaggcggtggcaaaaagcaacggaggcaaaaacccacggcagtggcgacaaaaagcagtggtggcaaaaagccgcggtggcaggggcacaatagtggaaatggggtagaagaccaactcagcttggcattcctggactgtgatgtggaaggaaaagtgcagcggaagacaaagatgtaagtaggcttgactcagtgcagctaagaactcaaatgttatcttgatgttatctatcaactaatttcttgtattttagttgagaaggggttttaccacgttggccaagat

SEQ ID NO: 28677 - DNA, 1076 bp, Artificial sequence
  DNA replication origin
ggggggcacatagccgcggcgggcaaaaagccgaggcggggtgggggcaaaaagccgcggcggcggtggggcaaaaagctacggcggcagtgggtaaaagccgcggcgggcagaaagccgtggcaggcaaaaagccgaggcggggtgggggcaaaaagccgcggcgggtaaaaagccgcggggggagcggggaaaaagccgcggcggcgggggcgcaaaaagtggcgggtggcaaaaagccgcggcgggggcgcaaaaagtggcgggtgtcaaaaagcggcggcgaggggcaaaaagccgaggcggcggtgggggcaaaaagccatggtggcaaaattcgcagcggcgaggggtcaaaaagccgcagcgggcaaaaatccctggctccgggaggggacacaaagccgtggcgggcaaaaagctgaggcggtgtggcgggaaaaagccgcggcggcggtgggggcaaaagccgcggcggcggtcgggggaaaagccgtgtcggcgctggggcaaaaagccgcggcggcggggtgcaaaaggccgcagcggcggagggcaaaatagtggagatggggtagaaggccggcacagcttggcattgctggagtgtgatgtgataggaaatgtgcagccaaagacaaaaaaagatgtaagtaggcttgactcattgcagctaagaacccagatgttatcttgagggtattaactaataagcagtttaaatcagaatggcacattctgatttgttttttgtatgttcacatttggcaggcatagatactgattgaagagagaaaagtcagtagatagaggtaacgaaattaaatatgtgccaagtctagaaacaagagaccagggggataagaacctttcaaaataaaatgcaagatttgaaaactgattggctgggggatgaggaaaaggcaggtctttaaggtcaatccctgttttgctttaagttgttagggggcggttttatcacatattgtagaatatgtcatttcagttttgaacatctggagttaaattgtcctaacatatcttatgaatttgattttcttccctgggaagctaat

SEQ ID NO: 28678 - DNA, 1083 bp, Artificial sequence
  DNA replication origin
ttcgggggcaaataaacacggcggccaaaagccgtagtggcagggcaaaaagctgcagcagtgggggcaaaaagcagcgggagcgggtgcaaaaacccacaaaaacccatggcaacgggaggaaaaagccatggtggcaaaaagccacagtggcggggggtaaaaagccatggcggtgagggggcaaaaagccacaaaaagcagcgtcggcggggacaaaaaccacggcggcaaaaagcctcagtggcaggagcaaaaagccatggcggcggaggcaaaaagccgtggcagcaaaaacccgtggtggcaaaaacccgtggtggcaggggcaaaaagccgtggctttggaggcaaagagccgtggctgtaaaaagccatagtggcgggagcaaaaagccacaaaaagccacggtggcgggggcaaaagccacggcgccgagggcaaaaagccgtggcttcgggggcaaagagccgcagtggcaaaaagctgcaaaaagccaaggtgacggggcaaaatgccacggcggcggggttaagaagccacggcggcggggcaaaaagccgtggcgggagaaacccgcagcagcgagggcaaaaatccatggcagcagtgacgaaaagccacagcagcggtggcagaaagccgtgaggcgggggaaaaatccgcagcagcggggtcaaaatggcactgcagcgggcaccaaaagccacagaaagccccagtggtgggtcaaagagtcgcaaaaagcaccagcgttgggggcaaaaagccgcagaggcggtggcaaaaagcaacggaggcaaaaacccacggcagtggcgacaaaaagcagtggtggcaaaaagccgcggtggcaggggcacaatagtggaaatggggtagaagaccaactcagcttggcattcctggactgtgatgtggaaggaaaagtgcagcggaagacaaagatgtaagtaggcttgactcagtgcagctaagaactcaaatgttatcttgatgttatctatcaactaatttcttgtattttagttgagaaggggttttaccacgttggccaagattgtctggatctcctgagttca

SEQ ID NO: 28679 - DNA, 1422 bp, Artificial sequence
  DNA replication origin
caggggcgaaaagctgcaaaaagccaaggcagtgggagcaaaaacttcggcggcggaggcaaaaaaccatggtggcaggagcaaaaagccacggcggtggtggttaaaaaaatagctgcggtggcaaaaacccgtgacgggggcaaaaacccacagtggcagtggaaaaaacagcggtggcaaaaagccacagaagtgggggcaaatagccccggcggcgggtgcaaaaagccgcagcagggagggcaaaaagccttggcttcgggggcaaaaagctgcagcagcaaaaagctgtagctgcgggggcaaaaagccatggcagcgggaggcaaaaagccgcaaaaacagcggcagccagaacaaacaccaaggcggcaaaaagcctcagtggcgggggctaaaagccaaggcggcggggagtaaaatgcctcaaaaagccgtggtggcgagggcagaaagctgtggcttcggggacaagaagccatagcggcggggcaaaaagccacggcggcgagggcaaaaagctgtggctttgggggtaaaaagccgtagtggcggggcaaaaagccacggcggcaagggcaaaaagttgtggcttcgggggcaaaaaaccatagcagcggggcaaaaagcagtggtggcggcggggccagaaaaaccacaaaatcccgcggcgatggggggaaaagctgcaggggcaaaaagccgcagcagcagggggaaaaaagccgtaaaaagcagcagcggcgggggggcaaaaaccgtggcggcaaaaagcctcagcggcaggagcaaaaagccatggcggcaggggcaaaaaccgcagtggaaagaagactcagtggcaggagcaaaaacgatggctgtggggggcaaaaagccatgactgcaaaaactgcggagtgtgagcccaaaaagccatggcggtggggataaaaagccacagctgcaaaaagcagcggtggtggggataaaaagccgtggcggcaaaaacccgcagcagcacaggcaaaaagccgtggcagcaggggcaaaaagccacggtggcaggggcaaaaagccgcggcggtgagggcagaaagctgtggcttcgggggcaaataaacacggcggccaaaagccgtagtggcagggcaaaaagctgcagcagtgggggcaaaaagcagcgggagcgggtgcaaaaacccacaaaaacccatggcaacgggaggaaaaagccatggtggcaaaaagccacagtggcggggggtaaaaagccatggcggtgagggggcaaaaagccacaaaaagcagcgtcggcggggacaaaaaccacggcggcaaaaagcctcagtggcaggagcaaaaagccatggcggcggaggcaaaaagccgtggcagcaaaaacccgtggtggcaaaaacccgtggtggcaggggcaaa

SEQ ID NO: 28680 - DNA, 1062 bp, Artificial sequence
  DNA replication origin
cttaggatgggtttattatctattatctgtatctttgttaaatgtttacatttccatgaaaacctatacctaacaacttaaaattttgtgtaaaatccttcgtgccctgcacttaggctccactgcataatgaataaaaggaaaatggattctcctgcgggaagttctgctgggctctccctttcttttccctgcaacatacggagagcattttgaggtctccatggggtgaggtggccgtgagtgccgggaggagtgcatgtgtggagatgtgtttcgtgcccacgattctcccttgggtctttctgactgtggtggtggctttgaggatggtttctgaggatcctctccaggggagctctccgcttgtgagatctccatctggggaggggggaagatgtctggggagggatttatggggtcgcccctgtgtgacagaggcgccctgtgcggggtctccgggaaagcatatttttaggggtggctgggggaagccatcgtctgggtggagggtggggcctagtctcccctgtagggggggcgggatgtctgagggagtgctggagggtcctcctgtgagtcggggtcgctgtgcagggtctcagtacagccctcgacctggggaactcattgtggagaccccgaggtggttggggcggggaagggggcagcctgggcagttgccgcagtgtgtcagtgtcgctgatgccaggagacaggtttgggaggagtctttggaggggaataattgtggagtcccatgttccgggcggggaacactcgagggtgctccaaggccagaggtcaatgcggggtgcgcgtgaataacctagggggacactcaggggaatgatggctcccccgagaggtaaagggtggaaagaaggggcctcagcaggttaggtcttgcagggtccttctgtagggcgtctgggagatagatccgtggggctcctagggtcgcccctacccggcgcggggtattttcccgtcttcagacctttctgggtcccggaggaaggaagtgaaactggcatcgctctctgcatcgcccggtggacg

SEQ ID NO: 28681 - DNA, 1161 bp, Artificial sequence
  DNA replication origin
cctgatcttggtgaataggagttcaccccaggagataatgcctgaaaagggggttccagccccacctgtgagggccacctggggttccctggggcacaacaaagactgagatccagacagaaatccattgcccccagctgagaagcagcaggcatctggacttgggccatcctggggccactgtccactcccaccttcccctacattgcagatgctccatccttgggaggtggggaagatgggaggaccaagctaagacacaggcaagatcagattccatgcacacagattgtctaggggtgaggcctgctttccttccaactagctgtggccttgagtagcaggggagaaactgaggcctggggatgacctccttggagtcacacaatggttgacatcccctcagggtgaaggtggggctgggccatccagatgtccctcgatgctttgtgctgggctctgggtggctggctgggggtgggaggagatgcccatgctgcagatggggagattaaggcaaggcctcttggggtcccaggagctgtgaggaggccaggactggcctgtggagacttttatgttggggttctgggtgaggtgactactgcaggtgtgagcacagcagttggtatggactcaggtggctgccgtggggcagatggatggaagggttaaggcaccaggagataaaagctacagcccagcaggaggggagggtggctgtgggggctgtaaaaggggtgccaacagcatttttgggggatggactgtgggcgtgagagatcaggaagggagacaatgcctaggcattctggcctggaagagtggcaggtggactttgcccagctgtggaggggtctgtcagggaggtggggcttctggtttcagaggatcccagagatgtgctcatgcagatgagggtccttgtgggatggaaatcgaaggggcagctacaacctggggaccattggtggtgggctgagcccctgggacctctgggataagcaggcaagaaagtgagaaagaatcagccagggagacacaggagagagaaaaaaaggaaagtaggcccaaggagaggagtagacccaggaacaggatgaaaatttctgctcacctgccccattggcctctccccctgcccacataccctagtgccct

SEQ ID NO: 28682 - DNA, 972 bp, Artificial sequence
  DNA replication origin
gatgaacacaggatatattttccattttgtattcttcaattttttatcatcattttatagttttcagtatgcagatctttactattcttcgttaaactcattctatttaatgacttaagtatttaattctatttgataatattgtaaatggaattgttttctttattcctttctcagatactttgttgttactgtacaaaaatgcaactgattttcatgttaatattgtatcctgtaagtttattgaatttgtttttcagctataacatggttttgttgttgtttttggcaaagtggtgggtatttttaaggctagttatactttacatggatagttgctactatcattctttaaaatatgaccacaagggtttctgttgtcatgacttcagtggaattcagatcttcccatttgaaataattttgtcggttttgcctgggccccgggatgggtgggggggccaccccacgggagtcgggagattcaggataaggagggagaagcggtcagggaggaggctgagcgcggaaagcagacaggctccagggacagcagggaggagagggattcctgtcagtgacccagtggggagagagaatgggccagaagaggggaaagggtgggagtgggcatcaggactgcttcctgacacgggtggggggcagggaactttgctaaaactgcaggccccagggaacagtgcaggtagggtgggagggagtagagaagaccaggcggaccccaaagtcatttgagaaaggggtatttcccagttccttcacctctgcccagcgttctgtgggcatggaccccagggccagggtaggggaggaggcggctcctggcatgcagggagagctgaggagcgcacacccgctttgtagggcggtgtgatggtggaagcaagtgaaggctgaggataccgttggctcagtggatgggctcggggggcaggggtggggtcgagctca

SEQ ID NO: 28683 - DNA, 840 bp, Artificial sequence
  DNA replication origin
ccctcccgcggaggccgagagaggccaccggccctttgttgatctgcgagaaatcaaactacgaacacgacaagcattagcctgcagctcgaggagacaaggtgtcacaattacaaggggaaactagccgccctagctccactgtctccccagcacgagagatttgagaacagaaaggcttccctccgcagggcgaaactgctgggctgcctggaagggcgaggcagggagcggaaccgtcttcaggaaatttcgggagttccggggtcaggtccactccccggctgttgttgtgttgttggcagggcagagggtctaggatgccagcctgctccgggctgcgctgtgcgcctagcccagggcggggggatgcggggcgacacccgcctcccggtgcatccaggagttgtagtctcttcaccggttccccactgtgggtggtggggctgcaggaggacaattcaaattgagataggagcggaggcggagcgcggccgtgcagggaggggcagggcggtgtaggcggcttcatttaccaagctttgctggccattgtttccatgccaaacccttgccaaggggattgtcaggagaggaacttgaaggggaggcgtgggctggccagtgaggagggtgtgtttttgcgaagtgcgccccgtctttgccgaaattaggagtgtctggtcctcactcacgcggctctctgctgctcaggtcgattttctctcccaccctcacccaggctctttccacagcatcacccctgccccagcccctggagccacctgctttcctaagtggttttggaaactgggctgaggtcccaaagggtgtccactg

SEQ ID NO: 28684 - DNA, 969 bp, Artificial sequence
  DNA replication origin
tgggcactaccactatcagcagcatcagcacgctggcgtggggagcggaggtggggggcgccaggcagctcggctgcgccagcagcacaatgttgccagtggttggggcctgcaggcaaggggcccgcgctcaccggggtccggctcacccagggtctggaggagctgtgggcatggggctgggcctcgggccccgcgctgagctgtctgaagtgaggaacccccgcctccacccgcctccaacccagctcctcctgtctccttgctctccggccagcagcactggctccgcgtggctcagagggcaccagggcagggctgcggacgccccgtggtgggaggggcagagaggggcacgactcgaggtgggaggggcagagggtcgggaccacagatgggaagggtagaggggggcggagccgcggggacccgaggtgggaggggcagagaaggggcgagggccgagatgggaggggcagaggggcggggccgcgaagccctgcgcgggagacccagaggaagagcaagacttaggaagccagagactgagactcggaaatggggaggcggctagaaccagaaaaacaggagaggttcttccagggaagggaagagtaaggaccaaagtgcgaaccgaagagaggaccatggggagagctagacagcgccaaggggtttgagaaaggagaggccccgagagtcggtcacgcgaaaaactgaaagggacaaagggaggcgcgaggggcccgaaccgcagcgggtggaagcgagggatggtgcccgggtctgcaggggtcaaagaaagcgatttgggggacgacagggtggacgtcgaaagggtaggatgaggaacagggttgtgaggggaaaagaggataggagtaaggttcgtgggccccgaagaccccagtctgggagatccgggggtggaatgaaggccagtcgggacgcccagcggagcccgcgtac

SEQ ID NO: 28685 - DNA, 2184 bp, Artificial sequence
  DNA replication origin
gggggctggcacagtggggccagagagtcaaggggccattggaaagcattgcagcaagctgggaaaattggaagggagcaggaagccgaaagcctccagcccccagtctccccaggccgtcccccatccaagcccggtacagacccgacccttttgagcttccgggctggggcgtcctcgggctgctatggcaccaggggactgccaggagaagcatccatggaaaggtcctgggccgcggcaggggcgcaggttgggggaaaggggaggccagagagtccgggggtggttggaaagtgttgcagcatcaggagaaagtgggaagggagtgagaagccaaaagccttcagcccctggtcttcacagggggtcccctatccaagacccagccaggcccagccctgcttttcttacagactggggtgccctcaggctgctatggcccctgggtgctgctgggacgaaccccaacagggagatcccaggccgctttggaagcgaaggcgggcgggaaaggggggccagagatcccggggacagttgagaagtgttgcgacaagcgggggaaagcaggaaggaagcaggaagctaaaagcctgaagcccccagtctcaccaggtggtctcccatccaagccccaaccaggtccaaccctgcttagcttctgggctggggcgtcctcaggctgctatggcacactggggcagccaggaccgaccgccacggagaggtccctagccgcggcatgggcgcaggcaggtgtgaaagagcgggtcagagagttagggggcagtttggaagcgaggtgacaagcagaggaaagcaggaaggcagctaaaagcctccaggccccagtctccccaggtagtcttcaatccactccccagccaggcctgaccctgcttagcttccagaatgtggtgccctcaggctgctatggcaccctgctgggggctgcctggcaggcttccacggggaggacaaggtcccggcacaggcacaggcaggcgggaaagaagcagctagagagtgagggggcggttgggaagtgggggacaagtgggtaaagcgagaagggagtgggaaactgaagcctccagcccccagtctccccaggctgtcctccctccaagccccagccagacccgaccctgcttagcttccgaactggggtaccctgaggctgttatcacaccagaggctgccagggtgggcccccacaggaaggccccaggcggaggggggcccaggagagagggaaagggggagccagagagtcagggggcagctggaaagcgacaagcaggaagggagcaggaagccaaaagcctccagccccctgtcttcccatttggccccccatctaagccctagccagcctgagcctgcttagctttccagctagggtgccctcaggctgctgtggcaccaggggctggcgggatgggtcccacaggaaggccccgggccgtggtgtgtgtgcaagcgggcaggaaagggggagttagagtcaggggtggttgggaagcggggccacaagttgggggaagcgggaagggaaccagaagccaaaagtctccagcctctggtctccccaggtggcccaccatccaagtcacacagtcaggcccaaccctacttagcttccgggatggggtgacctcaggctgcaatggaacctgggctgccagggcgggcccccaagcggagaccatggggcaccgcaggggtggaggcaagcgggaaatggggagcctgagagtcaccgggcagttgggaagtgggaccacaagcaggataaagtggaaagggagcaggaagcaaaaagcctccagccgctggtctccccatgctgtccctcatccaagctccagccagtcctgaccctactttactttcaagctggggcaccgtcaggctgatatgacactgggggctgccagggcggtccaaggggggccccgggtcatggcggggcacaggcaggtaaaaagtgggagccagggaatcagttggctgttgggaagcgggaccacaaacaggggaaagtgagaagggagtgggaagccaaaagcctccaaccctcttaggccttataatgaaagagaattttggccaacagcaggcagtctaatgataaagatatttgttcaactccaggcattctaatggaagacactcctt

SEQ ID NO: 28686 - DNA, 1522 bp, Artificial sequence
  DNA replication origin
tatggcgcctgggggctgccgagacagacttccatggggaggccctgggtcatagtaggggtgcaggtgggtgtgaaatggggagccagagagtcagggggcagttaggaagcattagaacaagcgggggtaagcgggtagtcaaaagcctccagccccggttgtccccaggcagtcaaccattcaagccccagccaggtttgaccctgcttagcttccgggctggggcgtcctcagtcagctatgctacccaagagctgccaggtcagacccctgtgggtaggtcccaggccgcagtgaaggagcaggcgggtggaaaatgggggcaagattgaaaattttgcaataagagagggaaagcgggaaaagagcaggaagccaaaagcctccagcccctggtctccccaggcggtccgccatccaagccccagccagacctgaccctgatatctaccaggctgggggccctcaggtttctgtggccccctggtgctaccaggaggaacaaccaaggggaggtcctgggcagtggtgggaatgaaggcgggcagcaaagaaagggtgagagagtcaaggggcggttgggaagcattatgacaagcaggggaaagcgggaagaaagctagaagggagcgtgaagccaaaagcctccagcccccggtctgctcaggcagtcccccacccatgccccagccagtcccgaccctgcttagcttcctggctgaggtgccctcaggttgctatggcaggagctgctgtgacggactccatggggaagtcctgggccttggcaagggcacaggcgggcggaaaaggtggggccagagaaacaggggcggttgggaagcattgcaaaaagcgggaaaaagtgggaagggactgggagtcaaaagcctccagcacttggtctccccaggtggtcccccatccaagtcccagccaagaccgaccctgcttaccttcccggctggggcaccctgagtttgctatggtgcccaggggctggccaaatggagccccaaaaggaggtcctgggctggagcaagaatgcagtcatgtgggaagcgggtggcgggggggtcacagaatcgggaaatgttgtaacaagcagggaaaagtgggaagggagcgggaagccaaaagcctccagccccgatctccccaagtggtccctcatccaagtcccagccaggatcaaccctgcttagcttccgggctggagcaccctcaggctgctatggcgcccgggggctgccaggaccaacccccactgggaggtcccaggccgtggtgttggtgcaggtgggcaggaaagggaggggccagagagtcagggtgcagttaggaagagttgcgacaagcgggggaaagtgggaagggagcgggggaaagtgggaagggagcagggaagtcaaaagcctccagccccaggtctccctaggcgttcccctatccaagccccagccaggcccaaccctgcttagcttctgggctgggtagcttctaggctggggcaccttca

SEQ ID NO: 28687 - DNA, 1955 bp, Artificial sequence
  DNA replication origin
gatggtggcaggggcacaggcgggtgggaaaggagggccagagagtcagtgggtggttgggaagcattgtgacatgtgagtgaaaacaggaacggagcagcaagccagaagcctccaggacccagtctccccatgcgtccccccacccaagcttcagccaggcccctccctgcttagcttccgggctcaggcgtgctcgggcagctatggcgcccccgggctgccaggacagaccctgacgggaaggtcccgggccgcggtgggggcacaggcgggcaggaaatgggggaccagagactcaaggggcggttgggaagcactgagacaagcaggggaaagcaggaaggggaggaaagccaaaagcctccagcccctggtcacccccggcggtccccacatccaagccccagacaggccctaccctgcttagcttcctgcctggggcgccctcaggctgttatggtgcccgtgtgctgctgggatggatcgccacggggaggtttcgggccgcggcggcgaagcaggcaggcggggaatgggcagtcagagagtcagcagcgattaggaagtgttgtgacaagtgggggaaagcagaaagagtgggaagacaaaagcctccagcccctggtctcccaaggcaggctcccatccaagccccagccaggcccgaccctgcttaccttctgggatggggcgctgtcagactgctgtggcgcccgggctgctgggacggaaacccactgggaggtcctgggccctggaaagggcaaaggtgggcgggaatttgggggccaggtgtcagaaggctattgggaatcattgagacaagtgcggggaatcgggaaggcagcgggaagccaaaagcctccagcccttggtctccccaggtggtcccccatccaagcaccaccaaggtccgatcctgcttaccttccgggctggggcaccctcatgttgctatgatgcccgggaatgccgagactgacttccacggggggaggggtgtagcgggccaccgggggggggggcacaggtgggtgggaaacagggtactagagagtcaagaggcagttgggaagcattgtgactagtaggggaaagtgggaatggagaggcaatccaaaagcctccagcccagtctctccaggcggtcccccatctaaaccccaggaggcctgaccctgcttagcttccaagctggagcaccctcaggctgctatggtgcccacgggctgccaggacggacccccgcgcggaggtgggaggtcctgggactcacaggggagcaggctggtggaaaagagaaggccagagagtaaaaggagggttgggaagcattgtgacaagtgacagaatgcaggaagggagtgggaagccaaaagccttcagcccccattcccccaaggttgtagtcccccatccaagccccgccaggcccaacccttcttagcttccgggctggggcccccttgggctgctagggcgccagggggctgccgggagagactcccaaggggaggtcccgggccatggtgggggcacaggcgggcaggaaaagggggtaccagagagtcagggggtggttgggaagtgttgggacaagcggaagaaagcgggaagggactgggaagccaaaagcctctagcccctggtctccccatgcagtcccccatccaatcttcagccaggcctgaccttgcttacctttcaggctgggatgccctcaggctgctatggcgcctgggggctgccgagacagacttccatggggaggccctgggtcatagtaggggtgcaggtgggtgtgaaatggggagccagagagtcagggggcagttaggaagcattagaacaagcgggggtaagcgggtagtcaaaagcctccagccccggttgtccccaggcagtcaaccattcaagccccagccaggtttgaccctgcttagcttccgggc

SEQ ID NO: 28688 - DNA, 2214 bp, Artificial sequence
  DNA replication origin
gggtcgcagcggggatgcaagcggactggaatgggagagccagagtcagtgggcagttggaaagcaggacgaccagcagggaaagccgtaagggattgggaagcaaaaagcctccagcccccagtctccccaggcagctcgtcatccaagccccagcgaggcaggaccctgcttagcttctgggctgggcaccctcaggctgctatggcaccagggctgccagggcaatcccccatagggaggccccaggtcgcagtgggtgtgcaggcgggtgggaaagggggagccagagagtcaggaagcagttgagaagctgggtgacaagtggaggaaagcaggaagggagtgagaagcctgaagcctctagccaccagtttccccaggcagtcccccatccaagcaacagtcaggcctgaccttgcttagcttccgggctgcggtgccctcaggctgctattgcgccgagggatgttggggcggacccccacctggaggcccaggatcgtggcggaggagaaggtccgggcagaaatgagggagccagagtcagggagcggttgggaattgcgccaacgagcgagagaaagcctgaagaaagcgggaagccaaaagcctccagagcccggtctccccaggcggtcccacatccaagccccagacaggcccaaccctgcttagcttccaagctcaagtgcccttaggctgctattgcaccgagggctgccagggcacacccccacaaggaggcactgggctagggcgggggtgcaggcgggcagttaaggggaagccagagtcagggggctgttgggaatcaggccaacaagcaagagaaagcaggaagaaagcgggaagccaaaaacctccagagccctatctcctcaggcggtcccacatccaagcccctgccaggctcgactctggttagagttcctctaagccccgggctgggccactctaaagctgctatggcgcaggggtctgctctggcagaccccaaaggagaggtcccgggccctggtgggggcccaggagggtgggaaatgtggagtcagagagttagggggcagttgggaagcaggctgacaagtgggggaaagtgggaagggagtgagaagccaaaagcctccagccaccggtccccccaggctgtccttcatccaagccccagccaggctcaacccggcttagcttcctggctggggtgccgtcaggctgtcatggcacaaaaggctgggggggcggacccccacggagagggcccgggcctttgcaagggtgcaggcaggctggaaatgggaagccagagtcacagggtggttgggaagcagggagacaagagggggaagcgggaagggagcaggaagccaaaagcctccaggccctggtgtccacaggtgatcctccatccaagcctaagccagtcccgaccctgcttagcttccgggatggggcgccctccggctgctacggtgcctgtgggccaggacggacagcccggggagatcccagttcattttgggggtgcaggtggtgggaaagtgggggccagggggtcaggaggggaaggttgggaaaccttgcgacaagaggggaaagtgggaagggagcagagagccaaaagcctctaacctccagtctccttaggcggtctttcatacaagcttcagccaggccttaacctgcttaacttccgggctggagcaccctcaggctgctatggttcccgggggctgctggggctgattcccacagggagttctcaagccacatcgggggtacaggagggtgggaaagggtcagccacagtcagggggtggttggttattgttgctacaagcctggcaaaatgggaagggagcaggaagcaaacagcttccagcccccagtcttcccagatggtctcacatccaaggcccagccaggccagaccctgcacagattccagtctggggtgacctcaggctgctatgaattttgggggctgctgggacagactagcatggggcagtcctgggctgtggcggaagcgcaggtgggctggaaagtggaggtcagagagtcagggggcggttgggaaatgattcaacaagcgggggaaagcaggaaacgaatgggaagccaaaagcatccagccctggtatccccaggcagtccctcatccaagctgcagccaggcccaaccctgcttagcttccgggctggggtgccctc

SEQ ID NO: 28689 - DNA, 1466 bp, Artificial sequence
  DNA replication origin
gccacgcagcttattgtcgccgaggctgtttgcctcggccgccgtggcttgatgcccccatcgtcccggctttttcccccaccgccccggctttttgaccccacgttgcggctttttgcggctttttgccccccgccgccgcggctttttgcccccatcaccgcggctttttccccgccaccgcggctttttgccgatgcggctttttactcccgccgccacaggtttttaccaatgcggctttttcacaccgccgtcgcgggtttttgcccccaccgccgcgggtctgagggcgggatcggcagactaggctgccagatctaccgtcgtcctggctaaggcagcgccgagggtcactcctggtccagctctcctggttcgggggttccttgcctagacacccgcaccccaggctctgttcctgggccgctgcagcctgcatagaacggcgctgcgctcggccctgatgggagagaagaaggaggtctgtggagggggtgacgcggctatcgcggagggaagcacaggggccgcagccagccgggtgctgcagcagtgcgggcagctccagaagctcatcggcatctccgttggcagcctgcgcgggctgcgcaccaagtgcgctgtgtccaaggacgtcacccagcaggagatacggaccgtgcaggtaagggggtcggggaccagggctgggctccagcaccggactggacatctcccaggggccccagttcactcctggccgagttgcatccttgagcccgcgtcacccccttggaggcttctcctccctcctgcactcgctgatgcggcagccgcaggtcccaggaccagccctcaccttgggcaggatttgtgggccgggtgcgtgttgggaactgtgatggaggctcgaggggcccgtgggcagggtgggctgcgtgtggacatccccttacgtcccgaatttccatctggtgcagccttctcatcttgtaggtgaggaaaccgaaggcctgagggagaaatgacttgccaggaacccctgttaaggaaaattaacaaagtgtggttatcaaaggagaactgagttcggattcagacctggagtcccacacccttggttaagacattataccaccttgagcctggcctgttgactgagggtgagccactccatcctcgtctgattgtggggtcttgacctcaaggggtttcctgcaggaagaagcaaatgggtttgctttcccagctctgtccagtaccttagggaccctgagaactggagagattcttggagagccatctggtgtatgtcatgggtgggccttgtttgaaggtcagtctgcccagtgggctggctcagcccaaatgaactgtcttgaatctttggagatgtctgtgtacttttaagggtttctcatccttgcaccaaaagatcccctggaaattaggtgggaaaaccttaacttttgtggagccttgta

SEQ ID NO: 28690 - DNA, 1770 bp, Artificial sequence
  DNA replication origin
gcttctggagctgcccgcactgctgcagcacccggctggctgcggcccctgtgcttccctccgcgatagccgcgtcaccccctccacagacctccttcttctctcccatcagggccgagcgcagcgccgttctatgcaggctgcagcggcccaggaacagagcctggggtgcgggtgtctaggcaaggaacccccgaaccaggagagctggaccaggagtgaccctcggcgctgccttagccaggacgacggtagatctggcagcctagtctgccgatcccgccctcagacccgcggcggtgggggcaaaaacccgcgacggcggtgtgaaaaagccgcattggtaaaaacctgtggcggcgggagtaaaaagccgcatcggcaaaaagccgcggtggcggggaaaaagccgcggtgatgggggcaaaaagccgcggcggcggggggcaaaaagccgcaaaaagccgcaacgtggggtcaaaaagccggggcggtgggggaaaaagccgggacgatgggggcatcaagccacggcggccgaggcaaacagcctcggcgacaataagctgcgtggcaggggcaaaaagctgcggcggcgggggcaaaaagctgcggtgactgggtaaaaagccgtaaaaagccgcagcgtcgggggcagaaagccgcgacggcaggagcaaaaagccgcggctgcaaaaagatgcggcggcgggggcaaaaaggcgcggcgggggcaaaacggtgaggcggcggcaaaaagccgcggcggcgggggcaaaaagcctcaaaaagccgcggcgtctggtgccaaaagccgcaaaaagccgcggcagagggggcaaaaagcaggggcggcaaaaagccacgacggcggggacatgaagccgcaaaaaccctcggcggcaggggcaaaaacgcatggcggcggaggcaaaaagcggctggggtgataaaaagccgcggcggcgggggcaggaagccacgtagggggcaaggagccggggcggagggtgtaaaaagctgcgatggcgggggcaaaaagccgcaaaagcatgggcagtggggtcaagaagaggcggcaggaaaaacctgcggcagcggggtaaaaaagccgcggcggcgggggcgaaaaggcgtaaaaagccgcggtgctgggggacaaaagccgcggcggcaaaaagctgcaaaaagccggggcggcagggcaagaagccataaaaagccgcagcggcggtgacaaaaagccgcagagaaaaaattcacggtggtgggggcaaaaagctgcggcagcagggggtaaaaagcctcaaaaagccgcggcggcggggggagaaagacgcaaaaagctgcggcggcgagggcaaagagccccaaaaagccgcggcggcaggggctaaattccgcgagaccgggggcagaaagccgcaaaaagccgcatcggcgggggcaaaatagtcgaaatggggtagaaggccagcacagcttggcattcctggagtgtgatgtggaaggaaaagtgaagaggaagacaaacaaagatgtaagtaggcttgactccgtgcatctaagaacccagatgttatcttgatgttatctatcagctaattttttgtattttagtagagaaggggttttaccgcgttggccaggatggtctcgatctcctgacctcatgatccacgcacctcagcctcccaaagtggtgggattagaggcatgagccacaaagtgctcaaaaaatctattaattaaaaaatgtgtatgtagccg

SEQ ID NO: 28691 - DNA, 1899 bp, Artificial sequence
  DNA replication origin
tcttttccttcctctttccttcttttctcactttctttctctttctttcttgagttcttgctttcttttttctcctttcctgcctttctcccttcctccctccctcccttctctcatttcttccttttctttcttctttccttccttcctttttctttcttttctttctctttattacaattcatattatttttaaaaaattaagaaagagaggcagaaaaataaagcacaatttaatctgcaggtaaatagattatgtctgctgtagacaaagtaatggcctcccaaaaatgttcatgtcctaattcccggagtctaacatacaaatatgttaggttgcatggcagtgggaaattagatttcaagtgaaattaaggttccaaaggcagtgggggcaaaaagccacggtggcaaaaaggcgcagtggcaggggcaaaaaccacggcagcggttggagaaagacgtggcggtgggggcaaaaagcctcgctgagggggtaaaaagctgctgaggcgggggcaaaaagcagcgggaggggggtaaaaaaacacaaaaagccttggcggctggaggaaaaagccacgttggcagggggcaaaaaagctgcagtgacaggggcgaaaagctgcaaaaagccaaggtggtgggggcaaaaacctcggcggtggaggcaaaaaactgctgcggtgggggcaaaaagccacggaggtggtggttaaaaaaaaagctgtggcagcaaaaacccgcggcggcgggggcaaaaacccgtgctggcaggggaaaaaaacagcagtggcaaaaagccacggaagcgggggcaaacagcccctgcggcgggtgcaaaaagccgcagcggtgagggcaacaagccgtggcttcaggggcaaaaagctgcagcggtaaaaagccgtagcggcgggggcaaaaagccgcaaaaacagcggcggcggtaacaaccaccgcgacagcaaaaagcctcagcggtgggggcgaaaagccacaagaagcaagggtaaaaagctgtggcttcgggggcaaaaagccacagtggcaaaaaaccgtagcagtggggcaaaaagctgcggcagtgggtgcaaaaagcagcaggaacaggggcaaaaaaatcacaaaaacccgtggagacagggggaaaaatccacgggggcaaaaagccgcggtggcggggggcaaaaagccgcaataagcagtggcggcaggggcaaaaaccgtggcggcaaaaagcctcagtggcaggagccaaaagccacggtggcgggggcaaaaagccacggctgcaaaaagccacagtggtgggtccaaaaagccgcggcagtggggataaaaagctgtgactgcaaaaagccacggtggagggcccaaaaagccacggcgatggggataaaaagccgcggtgggggcaaaaagccacggcggcggggagtaaaatgctgcaaaaagccgaggcggcgagggcaaaaagctgtggcttcgggggcaaaaaaccatagctgcggggcaaaaagccgcagcggcggcgggggcagaaaaactgcaaaatcccacggcgacggggggaaagttgtggggccaaaaagccgcagcagcaggggaaaaaagccgcaaaaagcagcagcggtgggggcaaaaaccgtggtggcaaaaagcctcagcggcaggagcaaaaagccatggcggagggggcaaaaagccgtggcggcaaaaaactgcggcggcaaaaacctgtggcggcaggggcaaaaagccgtggattcggaggcaaagagccacggtggcaaaaagccatagtggcgggggcaaaaagccgcggcggcgggggcaaaaagctacggcgccaagggcaaaaagcagtggcttcggaggcaaagagccgcagcggca

SEQ ID NO: 28692 - DNA, 1037 bp, Artificial sequence
  DNA replication origin
agctgcggggcaaaaagccgcagcggcggcgggggcagaaaaactgcaaaatcccacggcgacggggggaaagttgtggggccaaaaagccgcagcagcaggggaaaaaagccgcaaaaagcagcagcggtgggggcaaaaaccgtggtggcaaaaagcctcagcggcaggagcaaaaagccatggcggagggggcaaaaagccgtggcggcaaaaaactgcggcggcaaaaacctgtggcggcaggggcaaaaagccgtggattcggaggcaaagagccacggtggcaaaaagccatagtggcgggggcaaaaagccgcggcggcgggggcaaaaagctacggcgccaagggcaaaaagcagtggcttcggaggcaaagagccgcagcggcaaaaacccgcaaaaagccacggtgatggggtcaaaatgccaccgcggcaggggtaagaatccacggcggcgggggcaaaaagccgcggcgggagaaacccgcagcggcgggggcaaaaagccgcggcagcggtgacgaaaagccatagcggcgggggcagaaagccgcgaggcgggggaaaatgccgcagcggcgggggcaaaaaggcgcggcggagggtgcaaaaagccccggtggtgggtcaaggagccgcaaaaagccccagcgtgggggcaaaaagccgcggcggcagtggcaaaaagcagtggaggtaaaaaacactcggcagtggcgacaaaaagcagcggcggcaaaaagccacggtggcaggggcacaatagtggaaatggggtagaaggacaacacagcttggcattcctggactgtgatgtggaaggaaaagtgccgcagaagacatagatgtaagtaggcttgactcagtgcaggtaagaactcagatgttatcttgatgttacctatcagctaattttttgtatttttgtagagatggggttttaccacattggccaggattctctggatctccggagcttatgatccacgcacctcagcctcccaaagtgatgggattagaggcctgagcca

SEQ ID NO: 28693 - DNA, 1031 bp, Artificial sequence
  DNA replication origin
tccttaagccagcgtcgcactggccccaccgaggcctcagcccacctccctctgcttccccccgccacctccaccattgccccctcccctgcactctggcccctgaccccacctgctcccactctttggcaatttatcaacaaaggaagagatgacactgttctccttccgccccagagcccgggctgccgggagagcttagcctgccaaggggaggaaacaagccggctttgttttgtctcacacacttccccatcttctctcccagcccagttttaagggccggaagggcagtggggccccctcctggtgggatacagcagggcaggagcccctgcaaccccaggtacaggtcttgagtccctggacaccggcttttgtgcctgagagggggtgggaacgcttctctgtaggaaatggcttcagtccaggatccaggggtaggggaacctcgaccatggggtgggttgctcctgccagggggtactaggggcaaggccccagggtggagccagttctgggagctgtgtccagctaggcatctgtgaccccaaatggcatgaataaaagggcaggttgctaagagccaggggagggcatggggcagggagaccaggttggcccagacaggacagaggtgctccagggacagggtgctggagtgaagccaggtggagcggtggagctgtggagcctttgaaacatcctgagggcccaggcctgccacagggtgacctgggcagaggagaagcccagaggacagcaaggtgcccaaatgaggtcagggcttctggggtggagggacgggggggcacagtggcggcgggggaaggaacgttgagtcccaggtgagcctgcctttccaggccaagcccttggagtgagggtgctcctgcctggggggcgagaagtggaagtggctcacagtccaaggtgacaaatgaacccatcaccggtcagctaccatccctgtgaaggagccagggtggaaggccctgtccatgtcctccctccctccctaagccctgagg

SEQ ID NO: 28694 - DNA, 860 bp, Artificial sequence
  DNA replication origin
agtgaggagcgcctcttcccggccgccatcccatctaggaagtgaggagcgtctctgcccggccgcccatcgtctgagatgtggggagcgcctctgcccggctgcgaccccgtctgggaggtgaggagcgtctctgcccggccgccccgtctgagaagtgaggagcccctccgcccggcagccgccccgtctgggaagtgaggagcgtctccgcccggcagccaccccatccgggaaggaggtaggggtcagcccccacccggccagccgccccgtccaggagggaggtggggggtcagcccccgcccggccagccgccccgtccgggagggaggtggggggcgcctccgcccggccagccgccccatccgggaggtggggggcgcctctgcccagccgccccttctgggaagtgaggagcccctctgcccagccaccaccccatctgggaggtgtacccaacagctcattgagaacgggccatgatgacaatggcggttttgtggaatagaaaagggggaaaggtggggaaaagattgagaaatcggatggttgctgtgtctgtgtagaaagaagtagacatgggagacttttcattttgttctgtactaagaaaaattcttctgccttgggatcctgttgatctatgaccttaaccccaaccctgtgctctctgaaacatgtgctgtgtccactcagggttaaatggattaagggcggtgcaagatgtgctttgttaacagatgcttgaaggcagcatgctcgttaagagtcatcaccacttcctaatctcaagtacccagggacacaaacactgcggaaggccgcagggtcctctgcctaggaaaaccagagacctt

SEQ ID NO: 28695 - DNA, 1097 bp, Artificial sequence
  DNA replication origin
aatttttcttagtacagaacaaaatgaaaagtctcccatgtctacttctttctacacagacacagcaaccatccgatttctcaatcttttccccacctttcccccttttctattccacaaaaccgccattgtcatcatggcccgttctcaatgagctgttgggtacacctcccagatggggtggtggctgggcagaggggctcctcacttcccagaaggggcggctgggcagaggcgccccccacctcccggatggggcggctggccgggcggaggcgccccccacctccctcccggacggggcggctggccgggcgggggctgaccccccacctccctcctggacggggcggctggccgggtgggggctgacccctacctccttcccggatggggtggctgccgggcggagacgctcctcacttcccagacggggcggctgccgggcggaggggctcctcacttctcagacggggcggccgggcagagacgctcctcacctcccagacggggtcgcagccgggcagaggcgctccccacatctcagacgatgggcggccgggcagagacgctcctcacttcctagatgggatggcggccgggaagaggcgctcctcacttcccagactgggcagccaggcagaggggctcctcacatcccagacgatgggcggccaggcagagacgctcctcacttcccagacggggtggcagccgggcagaggctgcaatctcggcactttgggaggccaaggcaggctgctgggaggtggaggttgtagcgagccgagatcacgccactgcactccagcctgggcaccattgagcactgagtgaacgagactccgtctgcaatcccggcacctcgggaggccgaggctggcggatcactcgcggttaggagctggagaccaggccggccaacacagcgaaaccccgtctccaccaaaaaaatacgaaaaccagtcaggcgtggcagcgcgcgcctgcaatcgcaggcactcggcaggctgaggcaggagaatcaggcagggaggttgcagtgagccgagttggcagcagtacagtccagcttcggctcggcatcagagggacac

SEQ ID NO: 28696 - DNA, 1102 bp, Artificial sequence
  DNA replication origin
gggaaaggcagtgtgtgatgagtttgtcaagaaggaatggaaggagggggagccgacaagtccacgttcaccgcatctgcgttggcgattgcgctattgatgcgcatgcgcaaaaggaagaccctgattggtttgtgggacggtctcaacgtcctgtcctaaccaatccagatgcgccgggggtggggcctggctctcactggccggtgcagcctttgcgcgcgggtttcgttgacccgcggcgttcacgggaattgttcgctttagtgccggcgccatggggtcggagctgatcgggcgcctagccccgcgcctgggcctcgccgagcccgacatgctgaggtgagttcggccgcgcaagaccagggctgggcttccgcctcgcggccctgggccctcaggtgaggcccgcgcccttcccaggcgacgggcggcgggggagtgacggggagcgctggggccgggcggggtttagggcctacttcaagaaaaacttctcggccgtgagcttgaatgagatggcaagaagggcgatagcaaacggcgatggcacacgtccctgggaacagccagccctgtccgtgggtagaaaaatgagccagggagaactttccgttcattccgccaacgcctactgcagtcgggtttatagcggggaacccgacaacgaggcgcagaccccgctgtctgtaagggcgaggactgtgtagaccttaaccgggcaatgctcctgagccactgggcttggggtggagcgcggcctagcggctgcctttaacacaaagaaacaaacaaaactcggaaaagcaggcgccgttcccgctgaggccggattgatggcagatgctaggcgaggaaagatatggcaagagcagcccaggcaggggcgacagctcctgtaaaagcgttgagatgggaagcgggatccggggttcgaaataaagccattgtagctaaaacgtggagcagtcaggcgagggaaggcaaggaaaacagcacttaaaagatttgaagacaaacctgcaggactcggtagtcatttagaacagtggttctcaaaatgtggttcctggaccagcaacagccatatcatcttgtcact

SEQ ID NO: 28697 - DNA, 1371 bp, Artificial sequence
  DNA replication origin
gggcactgtcctgggtgccgggagacctgggtttgagtgctgtctgtcacgggctcccttctctgccgaatggatggctctactgagatggtttggagaaaaggtttcaaataccagggctgtacatagggcctggtggaccaagagaagctaagtgggtctggcacaggtgaccgagaggtgtgggctgcacagaggaggctcacaggtccttattgcctcctgagcagatgacagtccggccccaccagctccttttgaacaccgggtagtgagcgtcaaggagacctccatctctgcgggttacgaggtgtgccagcacgaagtcttgggagggtaggtgggcatctgccttggttggggggcttagagcaggagtcacggggcagggtcgggaccacctggagaactggggtgggtgctgcaggatgactctctctcgagctgatggagccaaggctggggtgggacatcctgtacagcatggggtgcatggtggcccacagagtaggggaaagagaatagcttgagaggacacgagagcccacgtggcatcggggaggggaggctcaggagggcgggcaccctgtgggtatgggaggaggcacagcctggaggtggccggaaagccgacatgaggtggggtgaggagaagcttctttagggtggatagcccaggtggtgtggggtgaggggatgttccctgggatgcaagatggcccaggtggtgtggggtgaggggatgttccctggggtgcaggatggcccaggtggtgtgcggtgagggggatgttccttcaggtgcaggatggcctcagtggtgtggggtgaggagatgttccctggggtgcaggatggcctgggtggtgtggggtgaggggatgttccctggggtgcaggatggcctgggtggtgtggggtgaggggatgttccctggggtgcaggatggcctgggtggtgtggggtgaaggggatgttccttcgggtgcaggatggcctcagtggtgagggatgaggggatgttccctgggatgtggaatggcctgggtggtgtggggtgaagagttgctttgcaggtttcgggatagccagcagggttttggggtgatgacaggctgcactctgggatgtaggatggtccacatggcctgtgtgtggatgagttggacccagaagtccagggatgggtgtgggatgagcctctgggctctcagcctgccgtgtggctatgtctctgcaggggtcggtttggccaggtccacaggtgcacagagaagtccacaggcctcccactggctgccaagatcatcaaagtgaagagcgccaaggaccgggtgaggcatctggctgggccaggtccctgtggccag

SEQ ID NO: 28698 - DNA, 780 bp, Artificial sequence
  DNA replication origin
tggtgggagactggccaggcagccagtgtttggagagctggaggcatggtgtccccttcctgtgtgacctgttgatggggaaaaggagagctggaaacttacaggtcataggtggatttccagtccggacactgcctgccattctccccagggaagggaagaagcggggctctggccaggactgcagggtcttggcagctccagggaacctagctgtgggggacacgctggcggtttgggagggaggaccaccacacttctctgacacccccgtgactgcccttctgctccttcacacatggggtgggacaggcaggagtggccagtttgtcctgatggagccctgctcagaaacccacccgccacctcctgtccccaaccttgagcttagctccagagggagtggagagtgcagctgcctgtggggagacgagtgttgacagtgacccagggggacagcaggcaggagccggagcctgggggtggagggtggcattcctgggagcggctgttcctaagagttgcataatcaatcctgcaggctaatggaagcttggctgctgggagaaggatatggggggtgaggtctgtagagggaacaccctgtttggggacagctaggggtcagccacttagcaacactcagacaacctggagccaccatttcagacccctgcagtgactcaccagcctctggcaagagatgagctggggtcagaggggtccgtgcttgactctgtgtcggctgcctgccgaggacaggagcatgcctcccctccc

SEQ ID NO: 28699 - DNA, 929 bp, Artificial sequence
  DNA replication origin
agtcaggaggctgaggcaaggctgagaatcgcttgaacccgggaggtagaggaagcagtgaaccaagattgtgccattgtactccagcctgggtgacagagagagaccctgaaaaaaaaaaaaactaggtatgtatcattaatatccttgttttacagataaggaaactgaggcctagagagaccacacagtcactgtattagtttcttatgcctgctctaattaccacaaacttagtggctcaaaagaaatttattccttcatagttcaggaactatgctgactaatgcgtgctctagaggcctcggaggagagcccattccttgtatcttccagttgctggcagccactggctttcgtggtttgtggctgcatcgttccggtctctgcctccaggaccacacatcctcctctgtgtatgtcacacctccctgtgcctccctttcatattaatacacgtgattgcatcgaggcccccctggctaatccaggacagtctcccaatctcaagatcctgaacttaatcacatctgcaaggtcctttttttgatttgtaaagtgacattcacaggttccagggattaacataggaacatcttttttgggggggccattatctagtctaccacagtcacccatcctgttactatcaggtggtggctgcaggtctcccttctcacgtgctcaagagggctcattaagccagatggggtggctcacgcctgtaatcccagcactctgggaggctgaggcaggaggatcgtttgaggccaggagttcagagccagtctgggcaccacagggagaccctgtctctacacaaaattttaaaattagctgggtatagtggtgcatgcccggagctagttactctggaggctgaagcaggaggatcacttgggcccacgagtttgaggatgccatgagct

SEQ ID NO: 28700 - DNA, 1289 bp, Artificial sequence
  DNA replication origin
gaccctgtctctacacaaaattttaaaattagctgggtatagtggtgcatgcccggagctagttactctggaggctgaagcaggaggatcacttgggcccacgagtttgaggatgccatgagctatgattgcaccactgcactccaacctgggcaacagagtgagactctgttgaaagaatgaaagaaccaaagaatgaaaggaaggaaggagagagagagagagagagagagggagggagggagggagggagagagggagggagggagggagggagggagggagagagggagtgagggagggagggagggagagagagagagagagagaaagaaagagaaggaaagagaaagaaagaaagaaagaaagaaagaaagaaagaaagaaagaaagaaagaaagaaagaaaggaaaaaagaaagaaagaaggaaggaaggaaggaaagaaagaaagaaagaaagaagaaagaaaggaaggaaggaaggaaggaagaaagaaagagagagagagttggttagtggtgaacgtgtagcacagaggctaaaagtccaggctttggcaccaggcagactgggtctgaagcccagctctctcaggaatctgaagcactgtgtgacttaagcaagtgacccaactgctctgggcctcagtttccccatcaaggcctactgcatgggaatattttgaggattaagtgagaaaatgaatgtgaaactcatacaacagtgcctgcacatagtcaggtgcccccttagtggtagctgctcttgttaagagcaggatataagctggagttctgacccagccttgcaaagggacacctggtgagtaccaagtttctgcagattaaaaaaatgtgaaaatgggaagtaaagtcattctgccacacagccagtgaaattcaatgctaatctcagcatagcagaactctgaaaatcttttggtgtggaatggtagaaaagacctgccagaactggccatgtaaaggatttgtgctctttcaaaagtgaagacctcggccaggcgcagtggctcatgcctgtaataccaagcactttggaaggctgaggcaggaggattacttcagcccaggatttcaagaccagtctgggagacatggtgagaccccattgctacaaaaaataaaaaaaaagttaggcaggcatggtggcatgtcccgtgcctatggtcccaactactcaggaggctgaggtgacaggatcacttgagcccaggaggtcgaggctgcaatgacttgtgatcacaccactacactccagcctgggcaa

SEQ ID NO: 28701 - DNA, 1321 bp, Artificial sequence
  DNA replication origin
caggcgtgcagcactcccccacacaagcccagccaagggctctttcagcgagcggtgccagcctggcttcggcgctggtgcccatcccccggcgacccggaccctccacggcgccgctgaagcaccaacgcacacccaaccggctttcgcaaaggctgcgcccaaggcatgcatgcaacgtgcctgtcgcccctggtaggccctcgccgcactcggttagctcgcgcgcctggagcagctacccggccccggcgcccacagccgcatccccgcgcccggcgcccgcgccgcccggcccctgcgctcgcacacccaccaccgtcggggccgccccgggcctgtgcgctgcctcctgggccctgtagttcccctggctgctccggagcggctgcggagagtgacgcgaactacaagtcccacagcgccccgcgccgggccggaccgggaccggacagtaggcgggagcgttcgtccgaacgtggccggggctgggcgggctctttgtcccagttgaggggctggagagcctggaggggcggggcaggggccgtgctctctgtcgcgtctgcgaagctagagctgttggcagcctgtccccagtggcgcgtccgcccccctaccgccctcactgcccgcacctgcgaggacgcaggctgctggatggtgcagtcatcgccccgagtttcatcatccaaggccacacggtgcctgcggctgcccaccagagctggcaggaaggcgggtgaggagtctgggacttggccacgccgccctgactaccgaacgccagcttccttctcagcaaaacggggatctgcccacggcctctgagggttgttgtgagacttcaaggaccatctgccaagtggtcaggttttcccgaccactccatctgacctcagacctccatcacttccgttttattttctgcctaccatctgaaattatcttcggttactttttactggcttatggtttacctcccccgactaaccgtgcgagctccagaggggcagaggcagtgtctttcttgttcatggcattcgcagcacctctaacagttcccgccacagaggagccactcagtaaatatttgttgaagaatgaatgcccagcacaagggggctattatgtttggtaacggtgtctgctggcgaaaggctccctggcttgcccagagcaagagcagggcaagactaggaggtggcgtagggtggcgcaaagggagttctggaagactcggggtctaatggagacaccaaaatctacaaaatcaaaaatacaaatacagaatctacaaaatcccgtctaggtcccagat

SEQ ID NO: 28702 - DNA, 1530 bp, Artificial sequence
  DNA replication origin
gcggcgccgtggagggtccgggtcgccgggggatgggcaccagcgccgaagccaggctggcaccgctcgctgaaagagcccttggctgggcttgtgtgggggagtgctgcacgcctgggcagtgcgcgacgtgtttgttctttttctctttttgtgccagggtttctctccgcaagcgcgcgatgcagcgggcggcggcgctggtccggcggggctgtggtccccggacccccagctcctggggccgcagccagagcagcgcggccgccgaggcctcggcggtgctcaaggtgcggcccgagcgcagccggcgcgagcgcatcctcacgctggagtccatgaacccgcaggtgaaggcggtggagtacgccgtgcggggacccatcgtgctcaaggccggcgagatcgagctcgagctgcagcgggtgagcgcgcgctgggccccggggaggctggggccgctgagcaagggaaaaaccgcagcagccccagctggggtccttcccacgacgtccacccccatggccagctcctcagtcagccaagcctggctaaaacgagagaatgccccctcccgcccgttcacttactggtgcccagcaccgggcactcagtgaggccttgcaatacggttcacttgttgaattgaattcgtcaattgttgagcgggccgtgctgccaggcaccgcacgttgtgtgtctgccctactctcgtggaaccaaggtccagtggagagaggaacataagcgaatgaagaaagaagcaatagagtctcagtgataagttcttggaaaaaagtaaaacggaagagggttgggatgggggcggtgggagggaaaccattttaggtaggaggggagacggggtggggggggctctgcggaaagttggttctgttccccagtctctttctccgtgtctttggcctttagggtctttgccaatcctgattcccggaagagagtcggcagaattccttcctttaggcccctctggagccttggccgaccagccacttctgtggtctggggacagtcaccgaggtggggaaccagagagttgggcctgtcgggctttggtaagggggccctgggactttcttcatcttggtggtcggccggctggctaggatcttggcttgagtttatagcttcatgtaaggtgagcccacagccaggaaggatttctgcctccccacaaccaggatgtctggggtgggtgatagaggggtccctaggacctaggagagagttatagcctgggtggaattcaggaggcagagccaggaggggttatcttaaaaagtaaatactcctaagatttgtaagaagctaataatcacctagctgcttgctagagagagtctgactgagaatagaagtgggaaggagggttccttgatcttgccctcacccgggtcactagtgtcccatgaatgcatggcagtaagcttcagggggatcatgacacttggtcccattccagtggggacttgggggttttaatgagctcctgggcctcctgagacc

SEQ ID NO: 28703 - DNA, 773 bp, Artificial sequence
  DNA replication origin
agtcctgggcttgggggactggtggagcctgcagtcctgggcttgggggactggtagagcctgcagtcctgggtttgggggaccggtggaggtttcagtcctgggcttgggggactggtagagcctgcagtcctgggtttgggggactggtagaggtttcagtcctgggtttgggagaccggtggagcctgcagtcctgggcttgggagaccggtggagcctgcagtcctgtgtttgggggactggtggagcctgcagtcctgggcttggggaagtggtggactacagtccttgcgggggactggtggagcctgcagtcccggtgggggactggtggagcctgcagtcctgtgtttgggggactggtggggcctgcagtcctgagcttgggagactgatggagcctgcagtcctgggcttgggggactggtggagtctgcagtcctggggtggggggactggttgcctgcctatccctttctgcacacgcctcccagggcctggaatggtgctgggtgctgtcaactcatctgttctcagggagccatgtgctgtctgaacgcttcctttaatggggctttgtttcctgacctgtaaggctcttgtttgttgagtgcttttttcctttcccaaagcctttcttacacgttaagctcttattggagcccatgggaaatggaggcccagagacattaagtggtctacctgcctagagtcagttcttgtgacatttgggactctaacattggagctccagctaccaatcacatcat

SEQ ID NO: 28704 - DNA, 1238 bp, Artificial sequence
  DNA replication origin
cagcctgtgtgtctgactctcctcagccagttatgcgagggagaaggggttctcacctggctctcttatttttttttttttaatttttttgagacggagtctcgctctgtcacccaggctggagtgcagtggcacaatctcggctcactgcaagctccgcctcccgagttcatgccattctcctgcctcagcctcccgagtagctgggattacaggcatgcgccaccatgcctggccaattttgtatttttagtagagacggggtttctccatgttgatcaggctggtcttgaactgccaacctcaggtgatccgcccgcctcggcctcccaaagtgctggaattacaggtgtgagccaccacgcccggcccggctcttatttttatgaaggctttgtgtgtaggtgtggtgtggtatttgtaggtgtggtggggtgtgtgcacgcatacactcacatgtgcatgtgtctgtgtgtggtgtgttggcatggtgggatgtgtgtgtgtgtaggtgtggtgggtgtgtgtgtgtctgtgtggtgtgtgtgtagttgtagtgtggtgtggggtgtatgtgtctgtgtatgtgtgtaggtgtgtgtgtaggtgtgatgggggtgtgtgtgtaggtgtggtgggtatatgagcctgtgtgtggggtgtgtgtatgtggtgtgtgtgtgagtctgtagtgtgtgtgtgggtgtggtgggggtatgagtgtgtgtgtatctgtgtgtggtgtgtgtataggtgtgttgaggtgtgtctgtgtgtggtgtgtaatgtgtgcaggtgtggtggggtatgtgtgtctgtatttggtgtgtgtgtaggtgtggtggggtgtgtgtctgtatatgttgcgtgtgtaggtgtggtggggtgtaagagtgtgtttgtgtctgtgtggtgtgtgtgtaggtgtgttggggtgtctgtgtatggtgtgtaatgtgtgtgcaggtgtggtggggtgtgtgtgtctgtatttggtgtgtgtgtaggtgtggtggggtgtgtgtctatgtggtatttgtgtaggtgtggtggtgtgtgtgtgtgcacacacatgtgcatgtgtgggtgtctgtgtgcagtgtttgtagtatgtgtctatgtgtggtgtacgtctctgtggtgtgtgtgtatgtggtgtgtgtgtggtatgtctgtgctgcagaacagaaaggcatggaagcatcataaggagcagggagaaaaggcctgctacaatg

SEQ ID NO: 28705 - DNA, 951 bp, Artificial sequence
  DNA replication origin
gactacatggcagcttgcgacacctggtgttttctctgtcacttgttccgaggttgactgatgtctgagaggtcagggagggcagatagagcagacaaacagatgctgttaggctgactggctgtgctctgggtgcagggctgccttaggcactgtgtgacctcagaggctaaagggtcagctgtaatcctgtgtctgttcattcagctaatgtttactgagcacttacgatgagtccggcactgatctcagcaccgcggatgccgcagcgaacaccctcctgccggcacaaagcgtgggttctagtgaggggggagagctgtaggcaaatgagtaaatcgtgcgtcccacggagaacagtcattaggagagaggtaggggtggggtcgaaggctgaagtggtgcagcctcactgaggagttggcttctgagttaaaccccgaaggagtgtggtggggaactgtgcagatatctgggggaagagcattgcaggcagcgggagcagcctgggcaaagaccctgtggtagcagcacacctgctgtgctggcagaacacacctgccatgttggcggaacagccaggagctggaaaggagggggcacgggggcagtggcaggagtggagacctgagaattataggaggccaggtcacctggtccactttgctgattgtatttttcacttgtgttcagcatgagataggagctgttggagggggtgtggccttgcttagctggtgtgttgctccttctggctgctgtgtgatgggggatggggacagaggccaggaggctgttacagtctcccaggtgagatatcgtgcaccagacagagatggggagaggatcctggatgtatttgaaggtggagttgataggaattgtgagtggaaaagacaggtgtgggagagaagagtcaaagatgaatcctggccaggtgcagtggctcac

SEQ ID NO: 28706 - DNA, 1674 bp, Artificial sequence
  DNA replication origin
ccagtaggggcggccgggcagaggcacccctcacctcccggacggggtggctggccgggtggggggctgacccccccacctccctcccggacggggcggctggccgacccccccacctccctcccggacggggcagctggccgggcagaggggctcctcacttcccagtatgggcggccgggcagaggcgcccctcacctcccggatggggcggctggcggggcggggggctgacccccccacctccctcccggactgggcggctggccaggcggggggctgacccccccacctccctcccggacggggcggctggctgggcagaggggctcctcacttcccagtaggggcagccgggcagaggcgcccctcacctcccggacagggcggctggccaggcggggggctgaccccccccacctccctcccggacggggtggctgccgggcagagatgctcctcacttcccagacggggtggctgccgggcagagaggctcctcacttctcagacggggcggctgccgggcgagggtctcctcacttctcagacggggcagccgggcagagacgctcctcacctcccagacggggtggcggctgggcagaggcgctcctcacatcccagacggggcggcggggcagaggcgctccccacatcccagacgatgggtggccgggcagagacgctcctcacttcctagatgtgatggcggccgggaagaggcgctcctcacttcccagatgggatggcggccgggcagagacgctcctcactttccagactgggcagccaggcagaggggctcctcacatcccagacgatgggcggccaggcagagacgctcctcacttcccagacggggtggcggccgggcagaggctgcaatctcggcactttgggaggccaaggcaggcggctgggaggtggaggttgtagcgagccgagatcacgccactgcactccagcctgggcgccattgagcactgagtgaaccagactccgtctgcaatcccggcaccttgggaggccgaggctggcggatcactcgcagttaggagctggagaccagcccggccaacacagcgaaaccccgtctccaccaaaaaaatacgaaaaccagtcaggcgtggcggcgcgcgcctgcaattgcaggcactccacaggctgaggcaggagaatcaggcagggaggttgcagtgagccgagatggcagcagtatagtccagcttcggctcggcatgagagggagaccatggggagagggagaccatggggagagggagaaggagagggccatttattttttatttttctgagacagagtcttactctgtcacccagtctggagtgcagtggcatgatctcggctcgttgcaacctctgcttcccgggttcaagccattctccggcctcagcttcctgcatagctagctgggtctataggctcacaccaccatgcccagcagctaatatttgtatttttagtagagatggggtttcaccatgttgaccagtctggtcttgaactcctgtcctcaagtgctccccctgccttggcctcctaaagtgctgggattacaggtgtgagtcactgcgcctggcctacttttataattttttatacagttttttgttgttggttcagacaagatctgactctgtcatccaggc

SEQ ID NO: 28707 - DNA, 935 bp, Artificial sequence
  DNA replication origin
gtccgggagggaggtggggggggtcagccccccgcctggccagccgccctgtccgggaggtgaggggcgcctctgcccggctgcccctactgggaagtgaggagcccctctgcccagccagccgccccgtccgggagggaggtgggggggtcagccccccgcctggccagccgcccagtccgggagggaggtgggggggtcagccccccgccccgccagccgccccatccgggaggtgaggggcgcctctgcccggccgcccatactgggaagtgaggagcccctctgcccggccagctgccccgtccgggagggaggtgggggggtcggccagccgccccgtccgggagggaggtgggggggtcagccccccacccggccagccaccccgtccgggaggtgaggggtgcctctgcccggccgcccctactgggaagtgaggagcccctctgcccggccaccaccccgtctgggaggtgtgcccaacagctcattgagaatgggccaggatgacaatggcggctttgtggaatagaaaggggggaaaggtggggaaaagattgagaaatcggatggttgccgtgtctgtgtagaaagaagtagacatgggagacttttcattttgttctgtactaagaaaaatttttctgccttgggagcctgttgatcttgtgaccttacccccaaccctgtgctctctgaaacatgtgctgtgtccactcagagttaaatggattaagggcggtgcaagatgtgctttgttaaacagatgcttgaaggcagcatgctcattaagagtcatcaccactccctaatctcaagtacccagggacacaaactgggaaggccacagggtcctctgcctaggaaaaccagagacctttgttcacttgtttatctgctgactttccctccactattgtcctatgaccctg

SEQ ID NO: 28708 - DNA, 877 bp, Artificial sequence
  DNA replication origin
cggggggctccggaggcggcggctgggaggaccccgcgggagggcgccggggaggccgcgaggaccgcgccggggggctgcgcccaggcaagctgtgtccctccgaggcgaagataggaagctgccccgcggcgcgcggtccccaggcagggtgctcgcgggcggagtcaacacagcctggcttctgcaccggctcaggccgccagagggcgcgcgggttcgggaaatggcttccccccccgcaggaggagggccgagctccccgcggggcgggaggaggagggaaaaccgaggacaagcccccgccttggcgtcgagggtctccaccaaagccccacgcgagaacgggccgcgtgtttctggtgagaggggtctcgatagtgccatccaccgcgaggcccgactcccagcggcgtccaggaagcaagggagggagggcgggagcggggacgcggccgttcccacccggctcctctcacgagacccgtgacaaatcgctggtcggagagagagtgcacggccccaaggaagggaggcactcagagccctgtccttccagacattcagactattaactgatggttggtctagaggggacaggacggcagagagacagagaaagctggcgaaggacgcgcaggatttcagatgtaatgcgtgactcagagagattgcataacttcttccaggcctcagtttcgacgtctgtcaaatgggagtacattttccctcagcgggaggatcgttttgagtccaggagtttgaggctgctgtgagcccagatcgtgctactgcacgacagcttgaggacagagtgagactgtcccccccgccaaaaaagaggatgtcaaagtgaaattcaaatttcaaatagaca

SEQ ID NO: 28709 - DNA, 1178 bp, Artificial sequence
  DNA replication origin
gcagctgcccaaaccgtggctgcagacccagacctcctgctctacgaagcaggcaaacgccccgccctcctgggcagggttacagccacccaaactgcggctgtggatccaagactcgctgtgctcttgaagggggcccgggagcaggcaggatctgcccttgcgggtgcagctgcagtcccccaaactgtggctgcagacctgggcctcccgcttcacagagcaggccggagccggggacaagcgggagtcctgccccttccaggttggtgggacaggagctcctggatgcagctgcggccaccctcccaggcacaggcccagtgcatctctgcagcctgcgtcctcaaggcggctggggaagaccgcccagcctcctgtccctgctcctgctgcctggtttctctcccgtcctggcgcccactccgatactggagcagggcttagggccgagccccaggggtcatgaatggcagcaggaggcagacagattcctgggtggaagcgggggaccccagtaaggccccaccttcaggccagagagggcctgaaggctgggggctgggctgccagtcctgcggacctgagtgcggactcatggtgcctcttccaggcccacccatggccacccatggaccagtgggcatgcacttcctcccctctgagcgacataaaagccctgggctcagccagagcaagagagaggatggccagagcagggcagagaaggtgaaggacagagagaggacaggaagaccagctacagagagaggctatcctttctgctcagagcttcagagacctgcagagacgtgggaataaccagcctcctggagaggagctaccctttccagggcctcctctctgctgagagctgaactggatgggcaacctgcctacagagatgagctacccactgcggatctcccgagctgttttaacactaaataaagcttctctttgtcttcttcatccttcacttgtctgagtacctcatttagaactcaggtgaaggcccatgagccacagaagtttccaggaagaatatcaacatcctcctcaaagatcccttaacaatatcagtaatcttaggactccctttccccagaagggacagcccaagaatgaaagacacccaaagggaaggagagccaaagccctcgcaccccagaatacca

SEQ ID NO: 28710 - DNA, 1522 bp, Artificial sequence
  DNA replication origin
gagtgcggacgcgcggcgcgggaccggcaggcagctccgcccgcggccccggcgcgggatccactgaagtggcgggcgcggggcgcccaggctcatttaaggagggagcgcgagcgccgcgtgccggctgcgccgcctgtgcgcatgtgcccgccccgccccgccccgcgccgcgcctcgcgcgcccgccgcggcctcgcgccgtgggacggcgtcgctccccgccggctgccgttagggctgggagccggctgggcgcgggggtagtgagggtgcctctcgccgtggctgcgcggcggcctcgtccgagaggccggcgccggggcagtgaccggcccgtgcccagccgccgcgcagggcgcccggggcagctggccgagccctcgatgcctcccgtctgacggaggcgcccgggaagcgccgcccacctcggccccgcaccctcgccggcctgccgggtctccgccagccctagcagacagagaggggcgccggtccctagtcccccagacctccattcaaggtcaaaactttgcccagctcagccttgctcgaccctgggcagggaagcgcggacatcggcagagggagcccgaggctctccgtgcccttcgcgccggtgagttcccgacccgcggcgctgccggcgtttccctagcgcccgccaggttgacaggcactttagtaccaactcctcagactccccctcatgaagtaggttttaggggattggaaagtcgaggccagagaggtgaagcccttcgtccagagccgcgtagcgaatgagcggcagggctgtgcacctcccccggggctgccctcctagcagctaaccactacgctgggcagcttcgccagctgatgggagtctccaggtctgccaacaactgcctggctgttggtggtattcatgatcctgctttattttctccacagcggttatcacactgatatgaccttcctcatttatttatttgttcatcctttatatctccctcaccctcacaccattaaaatatcagctgcttgcaggcaggccgactgcattcatttttttcactccacacatacgtattgggtgttaattatgtgcagaagacaatgattggtgctggagataacaaccgtgatcaaggccttaccataatagaatatttatgcctgtctctgcgtgtagtaggaactctgtaaacgtttgtctaaccaattgtagctaaagacaatgtcaggcaactgaaacatttttcaggtgttaagctcttctctctcactttgtattccttcaagaaaggtacaaaagcataaataattcatgagatttacaaaggaaaaacatacttaacaccaattaatatcgaggtgtttcaccctttgccatgtgctgtgaatgggggcataaaagatgggtaagtttgggttcctaaaggtaaccacctactacagttaagatcgcacacgagaaccaattaggaaataaaacatttaagaactttttcccacggatatgaaaaggtggctcacg

SEQ ID NO: 28711 - DNA, 1380 bp, Artificial sequence
  DNA replication origin
cttttccccacctttccccctttactattccacaaaaccgccattgtcatcatggcccattctcaatgagctgttgggtacacctcccagatggggtggtggccgggcagaggggctcctcacttcccagtaggggcggccgggcagaggcgcccctcacctccctcctggacggggcggctggccgggcgggggggctgacccccccccacctccctgccagacggggaggctggccgggtgggggggctgacccccccacctccctcccggacggggcggctggccgggcgggggggctgaccccccccacctccctcccggacggggcggctggccgggcgggggggctgacccccccatctccctgccggacggggtggctggccgggcggggggctgacccccccacctccctcccggacggggcggctgccaggcggagacgctcctcacttcccagacagagacgctcctcacttcccagacggggtggctgccgggcggaggggctcctcacttctcagacggggcggctgccgggcagagggtctcctcacttctcagatggggcggccgggcagaggcgctcctcacatcccagatggggcggtggggcagcggcgctccccacatctcagacgatgggcggccgggcagagacgctcctcacttcctagatgggatggcagcctggaagaggcgctcgtgacttcctagatggtatggcggccgggcagagacgctcctcactttccagactgggcagccaggcagaggggcttctcacatcccagatgatgggcggccgggcagagacgctcctcacttcctagacaggatggcagccgggcagagacgctcctcactttccagactgggcagccaggcagaggggctcctcacatcccagacgatgggcggccaggcagagacgctcctcacttcccagacggggtggcggccgggcagaggctgcaatctcggcactttgggacgccaaggcaggcggctgggaggtggaggttgtagcgagctgagatcatgccactgcaccccagcctgggcaccattgagcactgagtgaacgagactccgtctgcaatcccggcacctcgggaggccgaggctggcggatcactcacggttaggagctggagaccagcctggccaacacagcgaaaccccatctccaccaaaaaaatacgaaaaacagtcaggcgtggcggcgcgtgcctgcaattgcaggcactcagcaggctgaggcaggagaatcaggcagggagattgcagtgagccgagatggcagcagtacagtccagctttggctcggcatcagagggagaccgtggaaagagagggagagggagaccgtgggga

SEQ ID NO: 28712 - DNA, 945 bp, Artificial sequence
  DNA replication origin
atctgagaagtgaggagaccctctgcccggcagccgccccgtctgagaagtgaggagcccctccgcccggcagccaccccgtctgggaagtgaggagcgtctctgtctgggaagtgaggagcgtctccgcctggcagccgccccgtccgggagggaggtgggggggtcagccccccgcccggccagccaccccgtccggcagggagatgggggggtcagcccccccgcccggccagccgccccgtccgggagggaggtggggggggtcagcccccccgcccggccagccgccccgtccgggagggaggtgggggggtcagcccccccacccggccagcctccccgtctggcagggaggtgggggggggtcagcccccccgcccggccagccgccccgtccaggagggaggtgaggggcgcctctgcccggccgcccctactgggaagtgaggagcccctctgcccggccaccaccccatctgggaggtgtacccaacagctcattgagaatgggccatgatgacaatggcggttttgtggaatagtaaagggggaaaggtggggaaaagattgagaaatcggatgtttgctgtgtctgtgtagaaagaggtagacatgggagacttttcattttgttctgtactaagaaaaattattctgccttgggatcctgttgatctatgaccttacccccaaccctgtgctctctgaaacatgtgctgtgtccactcaggttaaatggattaagggcggtgcaagatgtgctttgttaaacagatgcttgaaggcagcaggctccttaagagtcatcaccactccctaatctcaagtacccagggacacaaacactgcggaaggccacagggtcctctgcctaggaaaaccagatacctttgttcacttgtttatctgctgaccttccctccactattgtcctatgaccct

SEQ ID NO: 28713 - DNA, 1004 bp, Artificial sequence
  DNA replication origin
taagttttcaagatttacgacattcacaggttagtctgtgattataatttccaacttacttagtcctggttgatatttgtgtggctccaatgctcagaacctgcccctttcctgtggtttctccaccattagttctttatctggactcctcttttaagtggctgaattttgttgttgggtgattttttcaaaaggactcaggagtgttgcttttccatggttctctcctgtggagaatctctgctactgtgacatcagaaggacatggtattggaaggcaatagattgggaaggtgcgtaacatccagcccctgtgaccagagaggacagatgtgctgccagcttcttagcctgctgggttgcaggggtccaaatgtagctgcatttaggaggaggagaaggaggtggaggatggggagagagagggaagaggaggggaagcaggaggagggagtggagagggagggaatggaggagtagggggaagagagaaaggggaggagggagagggaaagaaggaggagaagcaggaggagggagaggaaggggagaaagaggaggaagaagaggagaagggaaaggaacaggaggaaggaaaggggaaggaggacgaagggaaggagagaaaagaggagggagagtgggaccatgtgttagggtgggcactgactccgcaggagaaaaggatcccctggactggtccttcgtgggtgccagaaaaaggctgcccaccagaagttcacccccacattcgtcccagctcttggagcagctgcacatagaatgcaaaggagaaggacaaaagcccccatgaaatcccagaggccaggaagtgagcacaaacagtcctgccagggaactaacgaggaaatcctgccacctgaaagccaaaccctctgtggaataaagcagggtgaaactaacaaataaatcagagtcaaagcaatgaaaaggcggtgagggtgggaggaaatgaaaagctggtgaacaggcacagctggccc

SEQ ID NO: 28714 - DNA, 1005 bp, Artificial sequence
  DNA replication origin
ggaagagaagatggcacttgaattgggctttgaaagatggatctagcatccttcatatgtggcatatttagcagagattttgctcctagggcagaaactgtggctctcagggccataggaagcaggagggtgggaggaaattgaaggtgggaggtgttgaggggaggaagatgtgctgcgcagtctgagtcagattggcaaatgtagtaatagcaattatagcccccactgatggagaatttgccatgcagcagacactgtgctaatggcttcacatgtttttctgctccattctcacaacaacccaatgagaattagttgtttgcacaattttatagagcagagagtgaggatcagggaggtacagtcacttgtccaaggtcgcccagctggattcaaaccattctctgattccaaggcccctcatcataactgctatgtacaccaaccccaaagtttgtgtgtgggcatgatgcttgggctgtgcccaggttctgttttggggcctgtgtgcaaccggaagggcagctgctcatgcctgccactctctttcttgcctctttattgggaaggtctgtcttttgatgtctgagttgtgaggcctgcccattgttactcgctgaaggaaagagggtcctgatgacgataatgccaatgatatcaatcaatcaattctgtcatcaaccaaccaatcagccactgtggaggcaggcaacctgctgagcaggacagaaacctaaaggcccagtggtgctgctcagcagctgctgggagggagcacaaacctgagccaggcactgcaggcatcctgagcaggagttgggtccccaaggcggctgtgcgggggctctgtgatgcctggggaaggttctgcttatggtgggggctgtatgagtgaggttgagttgcagagaaaaccgagggaggagggtgtgggcatctgtcataacatggggacgacatcccagtgaccacggacgttcctaggttcctcggtgccagaag

SEQ ID NO: 28715 - DNA, 958 bp, Artificial sequence
  DNA replication origin
cacattataaagtaaaaacagcagaaatcttaacattttattaaccccaagtactcaaaatattacctttccaacatttaatccatataaaatgtattaatcaaaaagttttttcaaaatctggcgtgtattgtacacttacagcacatttagggtgaccaacctcctggtttccctgggacggaggggctaaaacataggactttcaatgctaaaacagacaatcgcagcaaaccaggacaactggcaattctatcatctcaatttgacgagccacatgcactacacagtactggacagcaaagtcatccatcatgcatggtgcaaagtggaatatacacattattcaatttattcttcataacttgcctaagagatggatgctgtcagtttccaaattgcagaataaaagaaatagaggttaaagctctcacccaaagtcacaccaatagggcgagggtactgggcaatatagtagtaagcctggggcctaagaaatgttatgagtgaaggagcagaggtgagaagctaggaaagttccagaaagggggaccagcgaaaatgtgagcagtaaaggccctttacaaagggaaacagaaggattagggggagaaggagaagggtggcagggagtatagaagaaaggcacccacaaatagtgcagtttaggaatgaaacaggaaaagttaaaactcacggagcagagaatgcctcagcggacaaaaatgatgggtgacagaaaaggggaggcggataggagtaaagggcagtggggagaaaggtgaaaagcgaaggcaagtgaaggcagagatcaccggggagaaagaaagggcctggaaagttaaaagcactggcctaggaggctgaagaccgagggcgaggaattgcggagagggggaagaggattcaaattaaattatccagaacggtagggaactgcgtagtttcaccaggtgtc

SEQ ID NO: 28716 - DNA, 1199 bp, Artificial sequence
  DNA replication origin
gccgccccccgcccctcccctgccttcagccttcgcaagccggctcgcccccgcccctggagccccgggcccggcggggtggcggcgggggtcggccccgcgcggccgggccgagggcgggggaagggcctcggcggcggcccggcccccgcgcgcccgggaggcgggcccggccgggggtggcgcccggcgcgccccgcgccctcgtgccggcctttgttgtggagggtcccggggtgtgcggccaacatggcggaggtcagctgagtgcgggcagctgccggggccctgccctccctccccctcctccccgcggcgcccggaggcccgggccgcaccgcgccgctcggcgggcctcggcctccgctctctgcccccgacccccggctggagccgtccgggacggggctgcgctcttcctgccgcttcggccggaggcttcattgtgcagtgggaagaatgcagcctcctcccttgtttatgtcgttagagaggagagcgcgtgaacggcgtgccggggaagctctagcttattataaacctggcatttcctagggttcatttgccgggtagtttggggtcctttcttaactctcccaaatttataacttaaagtgaataacctgggccactccgatgcgtaggttcgttttcgctgtctgcccgttcctggaaagatacataatttgtttgctcggacattcagaaaagtccagcttgggtgttcggaaaatcagattgtgtgtacttcttttgccaaagtcatagaggccataaacaaacagagagacatggatactggatatgggacggtgttctgactgtcccttcctagcagttgagcatttacctttgcttatagcggctgtcaagggtaaattgttaactcttcagcagttggatgttgagagcacgggctgtgaagtccgactgtctgctttgggtcaaatcctgctccactggtttgtgaccttgggcagatacttctctgtgcttcgctttccttatctgcaaaatgggtgtaacgacagtatctacctcaagccctgttgagaattgatgagatgacaataggtggactgaaagcagtggcagccccatactaagttctcaacaaatgcttactgttaagactgtagtttaatagctaaacttacgaggttttcttggcatgatgtgttggtatgatgaaagtgcat

SEQ ID NO: 28717 - DNA, 922 bp, Artificial sequence
  DNA replication origin
gcacggggttgggggtgaggttatagatttaacagcatcccaaggcagaagaatttttcttagtacagaacaaaatggagtctcctatgtctacttctttctacacagacacagtaacaatctgatctctctttcttttccccacatttctcccttttctattcgacaaaaccgccatcgtcatcatggcccgttctcaatgagctgttgggtacacctcccaaaaggggtggcggccgggcagaggggcccctcacttcccagacggggcggctgccggggggaggggctcctcacttctcagggcggccgggcagagacgctccttacctcccagacggggtggcggtctggcagagacactcctcagttcccagacggggtcgcagccgggcagaggcactcctcacatcccagacagggccgcggggcagaggcgctccccacatctcagacgacgggcgaccgggcagagacgctcctcacttcccagacgggatggcggccgggaagaggcgatcctcacttcccagactgggcggccgggcagaggggctcctcacatcccagacgatgggcggccaggcagagacgctcctcacttcccagacggggtggcggccgggcagaggctgcaatctcggcgctttgggaggccaaggcaggcggctgggaggtggaggttgtagctagccgagatcacgccactgcactccagcctgggcaacattgagcactgagtgagcgagactccgcctgcaatcccggcacctcaggaggccgaggcgggcagatcactcgcggtcaggagctggagaccagcccggccaacacggcaaaactcggtctccaccaaaaaatacaaaaaccagtcaggcgtggcggcacgcgcctgcaatcccaggcactgggcaggctgagg

SEQ ID NO: 28718 - DNA, 1090 bp, Artificial sequence
  DNA replication origin
cggggttgggggtaaggttatagattaacagcatcccaaagcagaacaatttttcttagtacagaacaaaatggagtctcctatgtctacttctttctacacagacacagtaacaatctgatctctctttcttttccccacatttcccccttttctattcgacaaaaccaccatcgtcatcatggccctttctcaatgagctgttgggtacacctcccagacggggtggccgccgggcagaggggctcctcacttcccagacagggcggcgggcagaggggccccccacctcccagatggggcggcggccgggcggaggcgccccccacctcccggacggggcggctggccgggcgggggctgccccccacctcctggatggggcggctggccaggcaggggctgccccccacccctcctggacggggcagctgccgggcggagatgctcctcacttcccggacggggcagctgccgggtggaggggctcctcacttctcagacggggcggccgggcagaggcgctcctcacctcccagatggggtggtggtcaggcagagacactcctcagttcccagacggggtcgtggccgggcagaggcgctcctcacatcccagacggggcggcgggggagaggcactccccacatctcagacgatgggaggctgggcagagacgctcctcacttcccagacggggtggcggcctggcagaggctgcagtctgggcactttgggaggccaaggcaagcggctgggaggtggaggttgtagctagccgagatcatgccactgcactccagcctgggcaacattgagcactgagtgagcgagactgcatctgcaatcctggcacctcgggaggccgaggcgggcagatcactcgcggtcaggagctggagaccagcccggccaacacagcgaaaccctgtctccaccaaaaaatacaaaaaccagtcaggcgtggtggcgcgcgcctgcaatcccaggaactcggcaggctgaggcaggagaatcaggcagggaggttgcagtgagccgagatggcggcagtacagtccagcctcggctcggcatcagagggagacc

SEQ ID NO: 28719 - DNA, 982 bp, Artificial sequence
  DNA replication origin
ggaggttgtagctagccgagatcatgccactgcactccagcctgggcaacattgagcactgagtgagcgagactgcatctgcaatcctggcacctcgggaggccgaggcgggcagatcactcgcggtcaggagctggagaccagcccggccaacacagcgaaaccctgtctccaccaaaaaatacaaaaaccagtcaggcgtggtggcgcgcgcctgcaatcccaggaactcggcaggctgaggcaggagaatcaggcagggaggttgcagtgagccgagatggcggcagtacagtccagcctcggctcggcatcagagggagaccgtggagagagagggagagggagagggagactgtggagagagagggagactgtggagggacggagagggggaaggggagagggggagggggggagggggagaggcggagggggagagggggagggggagagggggagggggagagcagggagcttttcttatatctgcttcttctcagttatcttgagctcaaaatcatctttatgatgaagtggcatattttggggtgacatattctgctacctttcagctcccatgatctatgtctgtgtctctcagtgaagggaaaaaatgaagttcactgtttagattatttagctcagagtcacatctttttcccataaactctgctatttggatgtttggggcacaaggaactgtgctcttgggtcagtgtgcatagtacccaaaaacctggggtctagagttcagattctgcatctaccacttatgactggctgagtaaccttgaccaacatacttacctttttgtgcctctgtttatctgcctctggggttattgtgaggaataaatgagataatgaatgtaaaacattttgcatagtacctctgccgcaaagtgctcatttcatgttaacgatgattatcattaggaatcaaatataggcttggaggggagtcagtcctgagctttat

SEQ ID NO: 28720 - DNA, 1093 bp, Artificial sequence
  DNA replication origin
ccctgtggagccaccatgggtgactctgagaccatcttccaaaggttgggagagggaatttggagaggacagagtggtgaggcaagggggtcccaggtggaaatctgtactcccaggagtcaaccccacctactatggggctggcttattcccaggaattgacagttttctaggggctaaggtgggagactcacctaggggggaccccaatttccagtcctgcagaagggaagtgaggagcagaggttgctgggagtttctcgatccacagcgggtaaagtggggcccaatttccccaccaacagctttacccaggggcagatgggtggggtgcagcgttcagagggaaccaggctgctctatggaaaagccacctggaaagccccagcccaggctttggggttgggggccatctggctgagacagctctcgagggaggcctgtcctgacccacaggatgtgctgttttcccggaagaaggcgcctaccaacccaaatagaccaaggggcggggtggggagcgaagcagtgcaggctggggttgggggtggtggggcaggaaaagatgtgtggagagaaggtgtatgggcctgcgttgaatcctgggcctggactgactccttggtgaggtggggactcagcaggacttacgtggatgtcaccttgttcaacaggcacatggcaggtggtggagccattgataagtgggaagcttttatttggccccaagacagagtctgagtttgttggcattgccctggaaacccagagcatgcccaggatccggtgagaagatgccctgactccaggcacagcactgaggggagaggatgactttcggctgagggtggagtggcagacacagacacgaaaaagtaaaaggacaatggagaggtcagaaggagagaggagtcttgggctccaaatgtagagggcactcaggggcaggccagagcccttcccactggtgaggcttggatggaagtctagagctgaattctagctcagggcccagagtgctaaagacaggctcaccagggactgggctgcctaggctcccagctctaggctgagcttcccccatcttgtgcaa

SEQ ID NO: 28721 - DNA, 781 bp, Artificial sequence
  DNA replication origin
cggcggggcgcgggcgggggcgaggcggccgggaagggccgacgccgcctgactggcttgggagcagcggcagcaagctgagggggcgtcgccgccgccggcccccggcgccgccgcgggaggccgcgcccgccatggcggcccgggcggtgctggacgagttcactgcgccagctgagaaggcggagctgctggagcagagccgcggccgtatcgagggcctgtttggcgtgagcctagccgtgctcggcgcgctaggggctgaggagccgctgcccgcgcgcatctggctgcagctctgcggggcgcaggaggcggtgcacagcgccaaggtgagtccggccgccgcccccgcgcgcccgcggcctcgatcggtccgggtctccgggctcccgctcctccccgcccccgccgtccgccgcgatgcgcctgggttgggaacgcagtctcgggagccagcgaacgtgccttttcggctcgcgagccatgtgaccttggatagcggcttgatccccggagcctcagtttccccatttgtaaagtggcgctgacgaaagtacctacctcagagggctgtcgcgaggatgaaagtgggggatgtgtatgaagcgcaggcacagcgtgtggcacggatcgggtgcgctgcgcatgtcgcctgttgttgtcagttccccggcccccaggatggtacgcaaggcctgttgctgggcccgcagcctcgtccaccacctaagcctttatcccccagtcccgggcctccactactgcagttctgagcctt

SEQ ID NO: 28722 - DNA, 940 bp, Artificial sequence
  DNA replication origin
ccgcagagctgcagccagatgcgcgcgggcagcggctcctcagcccctagcgcgccgagcacggctaggctcacgccaaacaggccctcgatacggccgcggctctgctccagcagctccgccttctcagctggcgcagtgaactcgtccagcaccgcccgggccgccatggcgggcgcggcctcccgcggcggcgccgggggccggcggcggcgacgccccctcagcttgctgccgctgctcccaagccagtcaggcggcgtcggcccttcccggccgcctcgcccccgcccgcgccccgccgcccgccctcaggcccggctataccatcccgccacgaccgcagcagcttggcaattgctggcagcgaacccctccgcccctttgccgccgccgcgggccgggccccgccgccgcgcatgcgccccggccgcagccgtcattgaggctcgccgccccctaggggaagggagtagggtgaaggcgacggaagttgacgtcaccctcagtcgccatgttggttgagaataaagggatggttttggaggcctgggcggacttctttgatgaggggaaaccgctttcgcgggatctggtggatgtagatatatgggtttatagttggggaaacttaattgccaggaggcgagactgagagtgtcacagggattggacttgacctcagacatcttgacgctcaaaccaggattctagcagttgagttattcagtttcacgttaatccacaggcagacgggacttttctttctctgtttcttcccttcctccctacccttttaccttcttagctgcccttctcacttttttctctttccctttttatttctttcagtaaaaatggtagcaagaagagaagaaaatgggcatacttacggagaattgaaaatcaaaaaaatgattaagataaattcaagaaggcc

SEQ ID NO: 28723 - DNA, 1300 bp, Artificial sequence
  DNA replication origin
gcaggcggccgattgatcgggaggcgggggcctcagtgcgggggccgccatcgatcgcggccgccccgccgcctctgattgatggcagaggcttttcctggcggcccgagccggccgcgcgctcccaactgggcgggcgaggccgggataaatgggagcaattgggccgggcagcgccgaggcacatctgccccgcgcgggtgcagcggcccgagctcgccgcaattagggctgagtgtctaaatctgccaagttcatccgagagcatgcccggcgcctcttttgccgccgagacgtgctctgccagcccagccaggccgcccccgacccgctgtgcccgccccggacccgcggggaagctggaggccgcctcgtgcccccgggcctgggtgggcgcagggcgtcgaggagggacgcgcacccgggcgtgccagggggactttagggcactcgaccctgtccgccgcccaggtgagcgcagaggagaggaggcagcgcagcccccaccccccagcccagcgtcagccctccctgggccggaggacagctagggttcagggattctcccacccgctctgtggccctgggtgggcgctgcgccctctataagcctgtttcctctctgtaattcagggacagggacactgctagcgcctcgattgttaaaggactgagggggccttgtttacagacctgtcctctccctgaaggcaggagccaggtctcagaagatcaccgtggtatgcacctcaccacgcagaattcccaacagtgaagaggcgcgtggcaaacaagtgttaaatacgggaaggaataggactcactaataataccaacaacattcttatttatagagcacgtcctacgtgccagcacatggttagtctcacgccccatttaatacccacttatgagacaggtagcgtcaggcttatttcaccgttgaggaaacaggttcaagaggttaaggacggtgctctgggaccagaactgtgagcaatacatgtttgttgtttatagattacccagtctaaggtattttgttataaaagccctaatggacaaagacagaaattcgtaccaagaagagggatgttgctataacaaatatctaaaaatgtggaagcagctttgaaattgggtaatgggtacaatctggaaaaattttgaggtgcatgttagaaaaaaagtctacatggccataaacagagcattaagagtgattttggtcagggctcaggaaaagaggagagatacacagaaagcctaaatcatcttagagactacttgtgatcataat

SEQ ID NO: 28724 - DNA, 1159 bp, Artificial sequence
  DNA replication origin
aaacagcctgaaggtactcagaatccaagagtaagagaggcagctttagtgaagtgttttaaggctttaaacggggacatattaggaaatggggatttgagcatcctgaattaatagctagtagaaaacctccattgtagcaggcgtcctttctctgatgagagcagacacagcactttggaaggggataatgcctagagctgggtttggcttctccagtgggccctgtgtgagtagctgttcttgcacccgtcttaaatttttgaagaagccatgcttttaatgagcttatgaagaaagagaattggggttggaagggagcagagtagacagccatgagggtgatttatcaaaggtttttgtgatgtaaacaaaaaagccctctcctcatctttgagttctttgaatttttctggctgccttgcagacacaatgttgctgattttctctaacaaagactcattcaatacgagctcaaatgaaaacattgatagtgaaccaaggggtaattagcttgagttaattctgctgacattatcctgatgctatttgaagggttgagagagtcttcccaccctctagtaagcaattactcggtgtctgggaccagcacctctgcctgggaggctggccacagtattaggatacaatatggcagcattagaacaaggcggcagggaggcggggcaagaaggatggggctgggtaaaactcagactatatctgcaggaggagagcctgcaagcccgaacctggggagcgaagggcgggagggtggtgctctaagagttgtggaagggagttcaagtaaacagaaaggagaaggaaggcaggaaggggcgggcaggccgggaagagggaatggagagacggggagagaaaaggaagaggagagtaaaggcggagtgaaggcggggagaaagagaggagattgtgaagacaggaagagggccaagaggggaactgagaggggaaggaaaggagagggagggcgcagtgggcagaagcgatgaggtcagatgcggatgagaagagaagagaaacctcgagggcagttctccttgaggtcggagctcttcccggccccagcactaccatcacctccatcacctcggcgtagagctgtcctctgggccgcaccccgccgtcccagggagtc

SEQ ID NO: 28725 - DNA, 2678 bp, Artificial sequence
  DNA replication origin
ttggtgatggaagccatgcatcaaagggtggtggacaggaagagtgaaggagcccagctccctgatggctgtgcagccactatgctggccctaggcaacacgcccagactttttcacacgagagagaaagcggctcctacattgtttaagaactgtcatttctggtctctgttacacaagtctcagtctctctgagaagggtcttagaaaactccacttcacaacctaagtgttcatgaatgggtgaatggataaagaaaatgtggcatacagcaggtcttcaaataacatcatttagttcaacgtcattttgctgtaagattgatgagagaaaaaacggattcttgaccagtgcccctgtctgtggagtctgcaccttctccccatatctgtgtgttttcttggggcactctggtgtcctccacatccccaagctgtgcatgtgaggttcactggcctctgcacacggccccagtgagagtgtgagtgtgagtgtatgagagcaagcatgtgtgagcgagtgtgggtgtgtgagcaagtgtgggtgtgtgtgagcgagtgtgggtgtgtgaatgtgggtgtgtgtgagtgtgggtgtgagcgagtgtgggtgtgtgtgaatgtggctgagtatgagtgagtgtgggtgtgtgtgaatgtggctatgagtgagtatgggtgtgtgtgagtgagcatgggtctgtgtgagtgtgggggtgtgagtgtaggtgggtgtgtaagtgtgtgtgtgttagtgcgggtgagtgtgagagagtacggatatgtgagtgagtgtgggggtgtgtgagtgtagatgtgtatgagcaagtgtgggttggtgtgctagtgtgcatgtgtgtgtatgagagcaagtatggctgggtgtgtgagcatgtgggtgggtttgaatgaatgtgggtgggcgtgagtgtgggtgtgtgcaagtgtgggtgtgtgtgactgtgggtatgagtgtgggtgagtgtgagtatgggtgtgtgagcatgtgtgtgagcgagtatgggtgtgtgtgagcgaatgtgggagcatgagtgtgggtgtgtatgagtgagtgtgggtgtgtgagagtatgggtgtgtgtgtgggtgtgtgttagtgagtgtgtgtgagcgggtatgggtgtgagtgtgggagcatgagtgtgggcatgtgtatgagcaagagtgggtatgtgttagtgtgggtgactgtgagagtatgggtgtgtgagtgtaggtgtgtgttagtatgtgtggaatgagtatgggtgtgagtgtgcaagcatgagtgtgggtgtgtaagtgtgggtgtgtgttagtgtgggtgaatgtgagagagtatgggtgtgtgactgtgggtgtgtgtgtgtgagagtgaatgtgtgtgtgtgggtatgtgaacaagtgtggctgggtgtgtgagtgtgggtgggagcaagtgtgggtgtgattgagtgtgggtgtgtgtgagtgtgggtgtgcatgagcgtgtatgggtgtgtgtgggagcatgtgattgtgtgtgaacatgggtgtgagagcaagtgtggctgggtgtgggagtgaatgtgtgagtgtgggcatgtgagcaagtgtggctgggtgtatgagtgggtgcgagtgtgggtgtgggtaggtgggagtgtatgtgagcaagtgtggttgtgacagtgtgtgtatgtgtgtttgtgggtgtgtgtgtgagggtgtgtgaacgagtttgggtgagtgttagcaagtgtgtgtgtgagtatgggtgtgtgtgagctatgcgggtgtgtaagtatgggtgtgtgagtgaatgtgtgtgagtgtgtgggtgtgtgagtgtgagtgagcatgggtgagtgtgtgtgtgagcgagtgggggtgtgtgtgtgggtgtgtgattgtgggtgggtgtgagcaagtgtaggtgtgtgagcaaatatgggtgagagtgtgggtgtgtgagagtgggtgtggtatgtgtggacgactgagggtgtgtgtgagtgtgggtgtgtgggtgaatgtgtgtggggggctgagcaagtgcaggtgtgtatgaaggagtgtgtaagcaagtgtggggggggtgtgagcgagtgtgggtgtgtgagcaagtagggatgagtgtgggggtgtaagtgtgggtgtgtgtgatggcatgtgtgagtgggtacggatgtgtgtcattgagtgtgggtggatctgagtgtgtgtgagtgagcatgtgtgagtgtgggtgtgtgagtgtgtgtgtgagcaagtgtgggtgtgaatatgggtgagtgtgggtggtgtgtgtgagcaagtgtgggtgtgagtatgggtgagtgtgggtgtgtgagtataggtgagtgtgagcaagtgttagtgggtgggtgggtgtgagtgtgtgtgtcaatgagtgtgggtgtaagtgtgggtgtgagtgtgtgtgagtgagtgtaggtgtatgaatgagtatgggtgtgagtatgggtgtgtgtgagcgagtatgcatgtgtgtatgggcatgtgtgtgagtatgcatgtgtgtaagtatgggtgtgtgagagcaagtatgggtgtgtgtgagtgtgtgagcgagtgtgggtgtgtgagtgtgagcaagtgtgggtgtatgaatgagtatgggtgtgagtatgggtgtgtgtgagagcaaatatggatgtgtgtgagtgtgtgagcgag

SEQ ID NO: 28726 - DNA, 994 bp, Artificial sequence
  DNA replication origin
cacacctcccagaaggggtggtggccgggcagaggggctcctcacttcccagtaggggcggccaggcagagacgcccctcacctcccggacggggcggctggccgggcggggggctgacccccccacctccctcccggacggggcggctggccgggcggggggctgaccccccaacctccctcccggacggggcggctggccgggcggggggctgacccccccacctccctcccggacggggcggctggcctggcgggggttgacccccctacctccctcccggatggggcggctggcctggcggggcctgacccccccccacctccctcccggacggggtggctgccaggcggagaggctcctcacttctcagacagggcggctgccgggcggaggggctcctcacttctcagacggggcggccgggcagagatgctcctcacgtcccagacggggtcggggccgggcagaggtgctcctcacatcccagacggggcggcagggcagaggcgctccccacatctcggacgatgggcggccgggcagagacgctcctcacttcctagatgtgatggcggccgggaagaggtgttcctcacttcctaggtgggatggcagccgggcggagacgctcctcactttccagactgggcagccaggcagaggggctcctcacatcccagatgatgggcggccaggcagagacgctcctcacttcccagacggggtggcggccgggcagaggctgcaatctcggcactttgggaggccaaggcaggcggctgggaggtggaggttgtagcgagccgagatcacgccactgcactccagcctgggcaccattgagcactgagtgaacgagactccgtctgcaatcccggcacctcgggaggccgaggctggcggatcacttgcggttaggggctggagaccggcctggccaacacagtgaaaccccgtctccaccaaaaccagtcaggcgtggcggcgcga

SEQ ID NO: 28727 - DNA, 960 bp, Artificial sequence
  DNA replication origin
ccgagatgtggggagcgcctctgccctgccgccccgtctgggatgtgaggagcacctctgcccggccccgaccccgtctgggacgtgaggagcatctctgcccggccgccccgtctgagaagtgaggagcccctccgcccggcagccgccctgtctgagaagtgaggagcctctccgcctggcagccaccccgtccgggagggaggtgggggggggtcaggccccgccaggccagccgccccatccgggagggaggtaggggggtcaacccccgccaggccagccgccccgtccgggagggaggtgggggggtcagccccccgcccggccagccgccccgtccgggagggaggttggggggtcagccccccgcccggccagccgccccgtccgggagggaggtgggggggtcagccccccgcccggccagccgccccgtccgggaggtgaggggcgtctctgcctggccgcccctactgggaagtgaggagcccctctgcccggccaccaccccttctgggaggtgtgcccagcagctcattgagagcgggccaggatgacagtggcggctttgtggaatggagaggcgggaggggtggggaagggattgagaaatcggatggttgccatgtctgtgtagaaagaagtagacatgggagacttttcattttgttctgtactaagaaaacttcttctgccttgggatcctgttgatctgtgaccttacccccagccctgtgctctctgaaacatgtgctgtgtccactcagggttaaatggattaagggcggtgcaagatgtgctttgttaacagatgcttgaaggcagcatgctcgttaagagtcatcaccactccctaatctcaagtacccagggacacaaacactgcggaaggccgcagggtcctctgcctaggaaaaccggagacctttgttcacttgtttatctgctgaccttccc

SEQ ID NO: 28728 - DNA, 866 bp, Artificial sequence
  DNA replication origin
tcccatctaggaagtgaggagcgtctctgcccggccgcccatcatctgagatgtggggagcgcctctgccccgccgccccgtctgggatgtgaggagtgcctctgcccggccacgaccccatctgggaggtgaggagcgtctctgcccagccgccccgtctgagaagtgaggagaccctccgcccggcagccaccccgtctgggaagtgaggagcgtctccgcccggcagccaccccgtccgggagggaggtggggggtcagcccctgccaggccagccgccccgtctgggagggaggtgggggggtcagccccccgcccggccagccgccccgtccgggagggaggtggggggtcagccccccacccggccagccgccccgtccgggaggtgaggggtgcctctgcccggccgcccctactgggaagtgaggagcccctctgcccggccaccaccctgtctgggaggaggtacccaacagctcattgagaacgggccatgatgacaatggcagttttgtggaatagaaagcgaggaaaggtggggaaaagattgagaaatcggatggttgccgtgtctgtgtggaaagaagtagacatgggagacttttcattttgttctgtaccaagaaaaattcttctgccttgggatcctgttgatctgtgaccttacccccaaccctgtgctctctgaaacatgtgctgtgtccactcagggttaaatggattaagggcagtgcaagatgtactttgttaaacagatgcttgaaggcagcatgctcgttaagagtcatcaccactccctaatctcaagtacccagggacacaaacactgccgaaggccgcagggtcctctgcctaggagaa

SEQ ID NO: 28729 - DNA, 1146 bp, Artificial sequence
  DNA replication origin
acagacacggcaaccatccgatttctcaatcttttccccacctttcctcgctttctattccacaaaactgccattgtcatcatggcccgttctcaatgagctgttgggtacctcctcccagacagggtggtggccgggcagaggggctcctcacttcccagtaggggcggccgggcagaggcacccctcacctcccggacggggcggctggccgggtggggggctgaccccccacctccctcccggacggggcggctggccgggcggggggctgacccccccacctccctcccagacggggcggctggcctggcaggggctgaccccccacctccctcccggacggggtggctgccgggcggagacgctcctcacttcccagacggggtggctgccgggcggagggtctcctcacttctcagacggggcggctgggcagagacgctcctcacctcccagatggggtcgtggccgggcagaggcactcctcacatcccagacggggcggcggggcagaggcgctccccacatctcagatgatgggcggccgggcagagacgctcctcacttcctagatgggatggcggctgggaagagatgctcctcacttcctagatgggatggcggccgggcagagacactcctcactttccagactgggcagccaggcagaggggctcctcacgtcccagatgataggcggccaggcagagacgctcctcagttcccagacggggtagcggccaggcagaggctgcactctcgtcactttgggaggccaaggcaggcggctgggaggtggaggttgtagcgagctgagatcacgccccttcactccagcctgggcaccattgagcactgagtgaaccagacaccgtctgcaatcccggcacctccagaggccgaggctggcggatcacttgcggttaggagctggagaccagcccggccaacacagcaaaaccctgtctccccccaaaaaatacgaaaaccagtcaggcgtggcggcgcgcgcctgcaatcacaggcactgggcaggctgaggcaggagaatcaggcagggaggttgcagtgagccaagatggcagcagtacagtccagcttcggctgggcatcagagggagaccgtggaaagagagggagagg

SEQ ID NO: 28730 - DNA, 843 bp, Artificial sequence
  DNA replication origin
ttctgccttccgggcctctccgaagggttccctggatttcagggacttccttgtaacggctgttgttagcgccccagacagctgccgcttgggaagccttcccggactccccaggaagcaccgcgacagtacaccctaccccttgccccggctcagaagcctgcgatgcggcttgcgtgcttgtcttcagcaccacggacggggcccccgttttctcccacttgtccccaatccccaccccgtgcggactgtgggtttttgagctagcagcatttagccccggagggtgaggggtagagagaggagggagggagggggcgtagtgctactctctcccggctccagccgtgtcccagcaatcactcgccggctctccgggtccccaaagatgtccaggtttcccttgggcgccgagagaggtgggacgcacagctggggagagggcgcgaggcccttggctgacggtgccaccacaggggcaaaaccaggcggtggcgggcgcggctggatgggggagggaattgagcccgtggtttggggaggaaatacattgtgccgctcggtgcgagacttctaatcacaaatcacagtggcttctccactgtgtcctggcagctgggtccaggagggatcaggggctttttgtttgttcgtttttgtttttccggtagcgccagaaggagcctgagttgctgggttttttttgtttgttgtttgttttttgaggctgaggggaaacgggagagaggtcaaaggtctcagggcgctagagccacctcatgggtttattaaattggatcacagagcacagtcgagattcgcttggcgcgctcatttgagaaa

SEQ ID NO: 28731 - DNA, 1400 bp, Artificial sequence
  DNA replication origin
gctggggggcgtggcctcggccggggcgggggcagggcctcggagggaggcgggccgggaggcggcgggggcggggccaggccgaggtccgcgcctttgtgcccggcgcgcgctctccgcccgctccggctgcagcgccggctgcatcaataattcagagcggcggcggcggcggcagcggcgggtgcgggcaggaggcggcggcagcagcgggaccgagcagcagcggctatgcatccaagtgcggctgggcagccgcggcacccctgaggcccgggaggggctccgggaacacagcgcggaggggacgctagtcgcggaggggacgctagtcccggagtgcgaggaagaggtgtagtgtccagagcggcggcggcggagctgcgcacggagctgaggagggggcttcggagcgggactgggacggggggggcggctggcgcgagcagccctgggggtggggggcggggtgggcgccggcggcgcgatgctgggcgtcctggagctgctgctgctgggggctgcgtggctggcgggcccggcccgcgggcagaatgagacggagcccatcgtgctggagggcaagtgcctggtggtgtgcgactccaaccccacgtccgaccccacgggcactgccctgggcatctctgtgcgctctggcagcgccaaggtggctttctctgccatcaggagcaccaaccacgagccgtccgagatgagtaatcgcaccatgatcatctacttcgaccaggtgagtgttccttcctcccgcggcgtgcagattgggctggtgaaggagggatggatggaagaccgatgcccggtcctctccaagggctctgcggaggcgcggggacgacagtccgggaccgattcctgcccactccccttcgttcccgtctcgttataggtactagtgaacattgggaacaactttgattcagaacgcagcactttcatcgccccgcgcaaagggatctacagttttaacttccacgtggtaaaagtctacaacagacaaaccatacaggtcagccgacgcctcgtgccgggccctggccccgtaggggggttactggcctcaggggtgctcgggctgtccggaggtggtaggcagaagtggcggctgcatgtacttcgggctgcttggagggacagatagcggggcctctcagttctgtggcttcaactgtcctctgctttccctgtctctggctcttgggatccagccccatcccccgagagacagaattttctgcttctgccttccgggcctctccgaagggttccctggatttcagggacttccttgtaacggctgttgttagcgccccagacagctgccgcttgggaagccttcccggactccccaggaagcaccgcgacagtacaccctaccc

SEQ ID NO: 28732 - DNA, 1085 bp, Artificial sequence
  DNA replication origin
tcgacgaagggagcgcgggcgcgcgcccgcgtccgcgcactgagagtcgcctcggccgctcgctttctcgactcccgcctcgcgcctcgatcctgttccgcctccctcggccctcctgcccgcccccactcgtcggccctcaggtaggaggcggcgcgccccggggtcgggagtggaatcgctggaggctgcgagtcgcctgcccgcctgtgggcgcgcccgttgggaggggagcgccccccagcgggcgcgggcgcgagggcagccggcgcgctgggcgagcctggctcagggtcccggcggccggggtgcagggcgcgtgcgcgcgcggcggggcggggcctgcgcggctctggcgggcgcacgtggtgcccgggagctgctgggcgggcactcaccgcggggactcggtgcggagccggggcgccgagtgtctccgtgtccctctgccccagccggcggccgcgatggtggagcttggcctctcgctctctcccgcctctccagcgactgctctgccggccgcggaggtcggatcgagcggtcattcattcatttgttaattcgttcacttattcaggggagatcattgaacccctacggagtaccgggtactgggccgggcgctgaggacgcggggctgagcaaaagcagccgaggcccaccttcgtgccccttaaaacccagcgtgcggggcggcaacgagtactgcttttctgttttgcacttaaaatttacattttgcatccgtactttttatttactgtgcacccttacggcatgctttacgcacccgtacctgcacctcctagccttgagtgtagacaccagatcctgagatgggcgatttttcgagaataatttttaccctaagtggattttcgtgccacgcatggacttggaactacacacacgtagtccaaaacgtgaaagtcaaaatgcagctttgccaagtggcagggagaaaggagagctgagaagatgaggagaggaagggcgcgctccaggctttccagcccgggtgcggtagacgtagccctgaaggatgaacccaggctggtagtagggcggcgggagggcggggg

SEQ ID NO: 28733 - DNA, 927 bp, Artificial sequence
  DNA replication origin
tccccagcctgggcagggaccaggcccttgccttgcctgctgtgtgggacgatgacatgagggtcacccggggctggtctgtcatgatgtgctgggcttgctaagcctgggaaggggccacaaacagtgcatgttctgagaactgggggagggggaaaggagagagacagaggtggacaaaaaattagaaacgggctgggcatggtggctcacacctgtaatcccagtactttgggaggccaaggtgggcagatcacttgaggccaggagttcgaggccagtcctggccaacatggtgaaaccctgcctctactaaaaacacaaaagttagctgggcgtggtgtcacacgtctgtaatcccagctacttgggaggctgaggcacgagaactgcctgaacgtgggaggtgtaggttgcagtgagccaagactgcgccactgcactgcagcctgggtgacagagtgagaccctgtctccaacaaaaaaaaaaaaaaagggaagaactgagaaagagagcaagaaccctggaaatacggaggcagagacacacagtcaacaagacaagacagagaatctaaacggagacaaagcaggagagacataaaggagatgcagttgtgggatatcaaagacggagcagagacagagagagagaggcagagctagacagagaatcaaagacgagaggaagacagagagagggcacaagatgtaaagagacaaagggaaaccaagacagaaagagacagggacagaggaacaagatggagaccacaacaacgaagagagaaagacaaagaggtaagagtgagagcaagtcccagaaacccagagagagagggaaggattcagacagaatgccaagccacctgcttcaccccacaatacacacactcacagggacaaaggtccagggagcaacaaaca

SEQ ID NO: 28734 - DNA, 1782 bp, Artificial sequence
  DNA replication origin
caggcccctcgaggggtaggcccagctggtgtcttcccctccccctcactgtgccagtgcagagcagagcatccagcaggtgcttaataatgtagtgctgagtgaattctggtgcctggtccccttggggcatcaagttttgacatttccatctgctgtgacatcctgggcttttgttcctgtcacaaaacttcagggaaggaagttttatccttctgtctcagaaccctctaggaggaagttctttcttgagtgtaacctcagagccccctgctactgctatttaagtgggcaggcacactgtggcttttcctggggaatggcataggcattctggagttttcctcaccagtggtcccaggtgtgggttccagccttcatcatgtctgcaccagcagtgccctggtgagccagtgtgggccatgtgtgtcacactgagcctgttcttggcatcctggcaacaggctgcttcattctccagagatcccagacaccccctgtgcccatgttggtagtgggtggtccttggggattttgtggagatcgaatatcatgtctggttttctgtggcctgtggaacaaagtccatgtttgttggtactcaaggcctccactgtccgtaggccatgtgcccaccagccttcctgtgacttctgtgctgggacctgtgcctgcatcgccacttggattctaggctccacacctccgtctctgctattctttcctcttggaatgccctctcccctttccacatatccacatcctatccatacattcattcgttttctttccattgactcattcacaaatactgcctgagtgtctactttgtgccaggccctaggaaccataatttgaggacaagaaagagctgtccatgtctcccttcctcatgtcccctctcttcctcctccctgtcctccccctaataaagaatgacccacccacaccaagatagcaggggtttttgactggcggttggcagggtgtgaaagtgcagacctccaagttgctcctgggcagctgtgcctgctggggattggaggcccaggcgtatggtcaggacagtgcatgcccagccctgggtcctgagaaaggaggtgccgccaccctgtgtgcagctcagcaaaggaggtcagtctagctcatgagaggtgcgtggctgtgtgggaggtgggctgcaggtgcctggagaggtctgcagggatgggaagtgatccatgtgcctagaggactcaaagagcagcttggttgggagggaggagaagggaggcgggaactgagtcagcagaggcttgaaggtagcaggaggatggctgtgtagagtgtggattcggctccccacaggactagctggctgtccctgcacaagtacagggagaggtgccacggctggagggtgcgggttcccatggaaaccgcctgcatcccatctgtggcctcagacaacctgcctggtgcctctgggtccctgacgcccccgaccgaggtgtcaggcccggccggcagaggtggcactgtgtctggtgcagaatgcgggtgatttgcagactgcggtgcccatggggtgcaggccctgggaagcctggctcccctgaaaatccccttgctctagtggattccagccatctggttcagtgcccggtgcttccaacctgggtgaccttgggcctgtaatttttgccttcctaggcctcggtgtcttcatcttaagaagtcccacctcgcaaggctgttgtgaggattgaaagagcggtgcctgccacggcacagagcacgcat

SEQ ID NO: 28735 - DNA, 726 bp, Artificial sequence
  DNA replication origin
actcattcatgagaacagcattggggaaaccacctccatgatccaatcaccttcctctctcgacacgtggggattacaggtctctccctccacacatggggattacaattcgagatgaaatttgggtggggacacagagctaaaccgtatcagtcagtaccatctaatgaagcttactcagcaccaggcccttctttccatatctgcaggtgttatcacacttcaccctcacaacaccctgtgagacgtgctgtcattacttccttttatccatggggagttgaggtgtcatgtccaatgttgctagtttcagggtagggacctgaactcagccagtgtgactcggggcctgcgcccttaacccctgcacctgaaggctcatcacgtttggtgggcttgagtgtttgtgataatgtggccttgcacaagatacccatggagatctgagggccagcagggccctgtctggggaagaggatccagcggcatcagcatagatggtgagaacatctgggaggagcctggagagtgaggagtgtagggtggttggtgctgaaggagcagtgtttccaggaatatcaattgggtgcagtgtgaaaagtgcactgggagggaggctgaagagggtctgtgtggctcagcaacaagtggccattgtgtcctgggtgtgagcagggtcagtggcatcagatggaaggggtcaggaggagatgggggtgggcagca

SEQ ID NO: 28736 - DNA, 1107 bp, Artificial sequence
  DNA replication origin
gcctatccagatcccactagctttctgtcacctagaccaggcctggcaggagatctgggacatggagctgagaatggcagctcagacagtgggcatcgaattccagttctcctactcaccagcaagaggctctgaccaagtgatgcagcctcttgaaactccacttaccccatccctagggtggagcttgcagagggtttgtgagtatttagcataaatgctgcccacacatggcaagtgctcagtgaacattggcagtgctcacgatcatggaaatataacagctctggctggcttttccttctctccttcctgtcttgaagggcctggccatttcttccctgccctccctctcctgtctttgccattctcaagtgtgttttcttcctgcccggggcccccctctgcagttgctcagggctgtgttgggggaggcagccctggccacaggccctggaactcagctctagttctcctgggctgggccccagggaaggggcttatggcaggggaggtgctttgagtgccaagttctgtctttctgtaattatatctcctagtgggggctgaagctgcaggaggagggggtctccaggggggttgagagtggggatagactaggaatagatgttggggtgaggactggagtccagccatgcttggagggtttgggggctggtgagcctgtgtgtgtatgtgcctatgtgtgagtgcacatgtgagcacttatgagtctacatgtgtgtacatgagggtgtgtggtacgtgtggggatgggtctgtgtgtatacttgtgtcagaagctgcatgcatgtctgtgggcgtatttgggagtaccggtgtgtgtactggggttgtggtgagtgagctgaaggcagggtctctggatgagtgtgaacatgcccatctgtgtggccttgttcacccatgtggatggccctgcttctctgggggttgcacatatgtatctgtgttacaggttgctgtgtgtaggggttgcgggtgtgtctgtgaaggtcttgtgtgttgctggtgagttggggtgaaagtgagcatgtgaatgcatacgtgtgcttgcacatctgtgtgtgtgtcttgtgtgtatgt

SEQ ID NO: 28737 - DNA, 741 bp, Artificial sequence
  DNA replication origin
ctcccaaggcctgcttgcctgtaagtgctgtaaaaagccaactaactgcgcaattttcttcccttggcttccctccgctcagccttggtcaggttatcagctgagctgggcctggggctggggactggcctggctaggcaggcctgaagtccccacacccgccatatttggaaattcaactctcaacggtgcattgaggcccaaggggtggcacttccaaattggtgggacaccagggttctgccatcaagagcttggtgggtagcggcattcagtaaatatagatgtcacccacacatcctttcattcattaattcacccatttagttattcacaggatgtctctgatgtgcctacaacccagcaggcacttaggtggtgagggtaggagggtgagccacactggcagctcttggcctgtggagctcgcagcctaggtggagggacaacatttgatcccctgtgtttgctaggagaagtgtgtggggcctggggggagaacaggggcgcagtaagggtgccagagccctcctggaaaaagcaggctctccgtggagaccagcaggatgaagaattcaccaagtgaaggaagcaaggggcagaaatgagctccaagcggcaggaccagcaagagcaaaggcctggaagtgagactgaggtctctgacaggtttcacggagcctcctccgctcctcactctcagccacagtgggtggcccagccctggtagcaccgcccccc

SEQ ID NO: 28738 - DNA, 1203 bp, Artificial sequence
  DNA replication origin
caggtgaggtaatgagttcagttgggctgagtctttgctactcagagcgtggtcctgggaccagcgtcgttctccttactgggagcttctagtaacgcacaatcttgggcttcttcccagacctgctgaagcagaatctgcatttgagcaggctcgctggggatctgtgtgtagggtgaaggccctgccgtggcatgggagcaggctggcacaggccaggtttgctttcctctgtagtatggcctcctcagtcgtagcaatggcagtcagaatggagctattggcagctatggtgcccagtgttgtgcaggaccctttcatggtttctcacatttaaccaccagcagtcctatgaggtagacattgtcattgtctccctttattgctggggagacccaggtcacagagagggcaagtaacctgggctgaacctctctcaggtcacactgtgtttgggaggcaaagggccttctcagagggtgtgtgtgtgcatgtgtgtgtgtgtgcatgtatgtgtgtgcatgtgtgtgtacgtgtgcatgtgtttatgtgtatatatgtgtgcgtgtgtgcgtatatgcatatgtgtgttcatgtgcatgcatgtatgcgtgtgtgtacgtgtgtgtgtgtgtgtgtgtgttggagggaggtggtggtgacggcatggcagggggaatttggggagatgactcttggaagcaatggatatagcagatggtcgggggagaagtcagtggggtggaggggaccccaaccaccgcctaggggtgctgtcctgagtctcagggggagactttctggcttttcaatcaagagtcaggtccaggtcccctcctctgggaagccctccctcattctctgctcagttcgagttctgtctgtgctcctatcttgtgctgcttgccctcatcacattgtctgatgtgtgtttctccattcctggctaaatggtgaggtccttggcggcaggaccatgtcttggtcatcttcgtatcctctatccctagcacagttggtttttcttcacccattcatttataaaaatatattggaggcctactgtgtgccgaaccctgactcaggtgctgatgggtccgtggcaagtaaggcaaatatgattcctaatcccctagaggatatgctggagaggaaagctcttgtgaaagggtgacaaatttattcattagttcatccatccat

SEQ ID NO: 28739 - DNA, 1272 bp, Artificial sequence
  DNA replication origin
gtttatatctggaagaggtccctctagttgtgtgtggggaagagatggtcggggctgaccaagtactcatccaggtgcaagcttatggggttgggagcaaggtcaggaggtaagcagaggtcagattctgagtttcttttttcttttcttgccttttctttctttctttttcttttctttttttctttttttttttgagacagagtctcattctgttgcccaggctggagtgcattggcgcgatctcggctcactgcaacctccacctcccgggttcaagtgattctcctgcctcagcctcccgagtagctgggattacaggtgcccaccaccacgcccggctaattttttatttttagtagagatggggttttgccatgtgggccaggcaggtctcgaactcctgacctcaggtgatccacccgcctcggcctcccaaagtgctgggattacaggcatgtgcccaagtttctttttggaggtaggttgaaaagagtttgtctctggattggatgttgggcatgagaaaaggagaggagctgaggaagcctgcaaggtttttggcctgggcagctggtggctggggctgtgctcactgagatgcagggtgctaggagaagttgtcagggcgtagggcagctcggtgtggatggtgtggctcaaaagttcggcttgtccatgataagcttgagatgcccgtgagatgttgagggggtacttgaacgtgtgttctggcaatcgggggaggatgggaccaagatgtgttttgggtgccatgagtgtgtggctgggacagatgcacccactggggggtgagcatagactgaatacagaggagctgaggtctagggccacgttgacattgcaggttgggacatcggcattgaaggttgggacatcgacgttgaaggatgggatgatgaggagagactgaggagatggagaaaggtgtcagggaggaaggaggaaaactgggagcgggcaggtccccagaaccctatgaagaaaatcttccaggaaggacagggtcaccaggcaggtccactgctttccaaagcaggcgatggcgtgggagtacatgtgccgtgaccttgatgacaccggctcttcgtttagatgtggccaggttgcaggagacgtgtggaagggaagcccagcctagcggctctcatgctttgcgggagccggatctgctaaaacagcctttgcttgaaaccattctgggccgagaagagttggggctcacgggttaatgaaatgaactctcgtctg

SEQ ID NO: 28740 - DNA, 857 bp, Artificial sequence
  DNA replication origin
cctgcaccactggcaggatccatgagggcccattcattcattcattcattcgttcattcttttattcattctttcagtcacagatattattgagcacctaccatgtgctggtgaacatccaggaacagaactgacaaagtctctgctgtgctcagagctcacagtcttgtggggagatggcactagaaaagtaaaaaatgaatcaatgaataaaaatgcaccacatgctttcactaggggtggccagcagggtgaccagatagatagagtggtgggaggtgaggaggagagggccggctgtgttggggtggtcagagaggcctctgtaccaaggagggggcgttagagccatgcacagcagcggaagcagtgtcccaggcgttccccactgtgggacagaagggacttcactgtgcctggaggagagcaagtgccaggcagaggagggagaggtgggcttggagatgagggagggagacgggggtgtgaaatgaggtggtggggggagcgtgaggtcagggagatgagagggggagagaggggaaagacggagcagaaaggaaggaggtgaggttgggagattgtcgaggggagcaggcagaagtgtctcatttcaggcctggagccttagtgggtgccttggcttttcttctgagttgatggggaaccagggagggctttgcacagggcagtggcgtgatcaggtttatatctggaagaggtccctctagttgtgtgtggggaagagatggtcggggctgaccaagtactcatccaggtgcaagcttatggggttgggagcaaggtcaggaggtaagcagaggtcagattctgagtttcttttttcttttcttgcc

SEQ ID NO: 28741 - DNA, 1009 bp, Artificial sequence
  DNA replication origin
cagaacccagcctggagaggtgggagattccaatgagactctgactagacaattacataaaaatgacccccttacccacttcacgctaagcatggtggtacatgcctgtaattccagctgcttgggaggctgagacaggaggattgtttgagcccaggagttcgagaccaacctgggcaacatagcaaggccctgtctcaattaaaaaaaaaaaaaaaaaaaagatgagcagcttcagctcccagatcaaactcagtcacagggaaagaggaggtaaatttccacatggtcgtgttggttccctgaaaccccacatcatagacctcaggatcacgcatgatgtttctggtgtctgccacttagagacctcattccaaagggcttgtgggaagagggaggaaatgctgaaggtaagatgtgtctccctgccaggctgggatgggcgggagagacaggggttaggggtagggttagggttagtaccaggctgggatgggtgggagagggggtgattagggttagggttagagttaggattagtgccaggctgggatgggcaggaaagagggggattagggttagcattacagttagggttagggttagtagcaggctgggatgggcgggaaagaggggcgttagggttagggttagagtagggttagggttagtagcaggctgggatgggcgggaaagaggggggttagggttagggttagagtagggttagggttagtagcaggctgggatgggcgggaaagaggggggttagagctagcgttaggtttagtagcaggctgaaatgggtgggaaagagggggggttaggtgtaggggtaggtttcgtacaaggctgggattggcgggagagagggggggttagggttagggctagtgccaggctgtgatgcgcagaataaaggggatttggagacgttggtaggagggaggtcaaaggcactgggagcctttggaaggctgacgcttgcagatcacaaggtcaggagatc

SEQ ID NO: 28742 - DNA, 968 bp, Artificial sequence
  DNA replication origin
aggctgggatgggcgggaaagaggggggttagagctagcgttaggtttagtagcaggctgaaatgggtgggaaagagggggggttaggtgtaggggtaggtttcgtacaaggctgggattggcgggagagagggggggttagggttagggctagtgccaggctgtgatgcgcagaataaaggggatttggagacgttggtaggagggaggtcaaaggcactgggagcctttggaaggctgacgcttgcagatcacaaggtcaggagatcgagatcatcctggccaacatggtgaaaccccgtctctactaaaaatataaaaattagctgggcgtgatggcacgtgcctgtagtcccagctactcgggaggctgaggcaggagaatcgtttgaacctgggaggtggaggttgcagtgagccaagatggtgccactacactccagcctggcaacagagcaagactccaactcaaaaaaaaaaaaaaagaaaagaaaaagaaatccatgagttgtccagaatgagataccttcatgcctactaggaagtttagaatttacaaaaaggaaaataacaagtgttgacaaggacctggaaaaagtggaatcctcatgagcagtgggaatgtaaaacgcctgggaaggtctggtggctcctccaaaggttaaacataaagttgccctataacccagcaattccacgcctacaaacacacccaaaagaaataaaaacaagcgttcaagcaaaaacttgtacattgccaggtgcggtgacacacacctgtagtccccactacaaggggaggctgaggcaggaggatcccttgaggtaggagttcaaatccagcctgggcagcatagctagactccacctctaaaaacaaaacaaaacttctacatggatattcacagcagctctattcacaatagccagagatgaaaacaaccaaaatgtcaatcaacaatacccaa

SEQ ID NO: 28743 - DNA, 1234 bp, Artificial sequence
  DNA replication origin
agtctcaggagcaggcttcagatgcctcagggcttggtggaggcactttggaggccatcagaagtgggagcaggaatgcttttaccagctgtgctaacccacccgggggtccccacctctcccctctgggagccagcatgtggtctgctatgggaggatgaggcagccacatctgttctcgcaggtgcagagcggagcctctgggacctttctctcggattctccttttccccaaagtccccctctcgccttcttgggggttccaggaccagcaggacctgggtgtgagttccactacacacaggctgcactggcttgtgtgtagtggaacacaaggcttctctgagacctctctgcctgggtggggagattgaacctgctgccgcccgctggagcatagcagtgtgggtgacacacagagcatgggaccactgcagcctatgccgctttgcacgaggcagcttttccaagggcccccagggccgggccggcccctgccagccgtggaccagatgtgctttttctgatggtgtgggagagcttctctgtgtgggtgtcctcgcattatgtgtgggccgctatgttttgatcgaagggagccaaactgattttcctggcccatctctccgccattcgaagcagaaagttaaataaacacaaccaagtattatcgcaggacacgcggaaaatgaacttggtccctacgggtggccacatctggcaagtgtggggccgtgcagggctatgggatgagacagatgtggttggggcaggaagggctcagtgtgccccctgctcggggacgtgcctcctgccaggggctctggccctcagtggtatcctttcccattgctgaacctttctgaggccgtgtcttctggcttggcttcccctgagccttgccgcagcctggtgggtctctctggccctgtctggtgtgcgtagggaatgcacagctggagtccctgggccatgggggcaggtggtcaggtgcacttgggaaatagtcacacttgtcgtgatttccacccctctccacccctctgctaacggccctggggggtggatgagccacaggttttgggagtacttcactgcttgccagagtgtgtagccagcatgtcccccgcccctcccactgtcctctgcccagcactgcccttggcatgcaacactcagcccttgctgaactccagtgggctgagtgggttcccggagatccatttaggacaac

SEQ ID NO: 28744 - DNA, 1160 bp, Artificial sequence
  DNA replication origin
ggggacggcggcgtcgagcccacagctggtgccgcccttgggtgggctgcgggcccgccagccagatgtgcgcctcgggagccctggggcaccggaaccccgatcgggcctccgctttggggtggggctgggggaaggcgagtgacagccgcagggccattccctggtacatcctcatacacgtaatgccgctgagcgcacttcccaggtactgaggactgttctgagcacttaacactcgttgattcattcaaggttcacagcacccctgtgaaataggtacgtgatgtgtatccccattttacagaggaggaaaccgaggcacggggaagtaaaataaatggcccagtgccccacagctagggcaagatttgaacggaggcactccagccccagaactgtgctcagcccctgcaaggtgcccaggcctgcgtggtgggctggaggcctggccccgggggtgcagcttccagtgcatcagcacgtatccagtaaattacagatgaagattggcacacagatttgagtcatgattctgggtttgccgcttaaaattccttctctggatggatccttcttgacttcattcattcactggatggatagttctgagtttgtgatgggccaaatgctagtgctgggtccttgccttcagggagcttacggcttagtagcaagacagacaataaagagtgagcagctccccggattgtaattgttcattgagagaccgctctggcttatctgacttcgacaaggtcctcccgggagggcactgcagaggaagtgacgtgaccgctggtgtaggaagatgagagggaactgcagaggacagtggctagtctcctctggctctgaactcattcactagggctgcctctgcctgccttgggcccgccccatgtggggaaggagggagaagaagaggccatagtctctgtccacgaggacatgatgggacaaaatctgggggagttttgagtgtgactgtctggaggggcaggggcaagtgctggcaggctctcctggaagggctggagcagggatgaaggaagaggcagggtcgggtactgggagagatggctgggttggggtggcattgcaggtggcctgttgatgcgtgcacacagcatggtgcatggttctttctggggagtccc

SEQ ID NO: 28745 - DNA, 1056 bp, Artificial sequence
  DNA replication origin
cccgcctcttcccagccatcccccctcttccccgcctcctccccaactgccaccccaccctggatttcttcctcctctccgacccttgaccccttcccctcccccgcggtttctccgtcccctcccctcatcccaggacccagatcctacaaggcaactgcgcaatcggactccagggggaccgtggagggttcagatcccacctcccgtcctggaaatctcggcccccacacccagacacttcctcccaccccacaagcctcaggccacagccctggcttggagaagggctagatgccttggagaggggccggcctctgaggtaacgggctgtgggagcctcctggccccatgtgcccatctgtcagatgggggtgggaacgtggtccagtgccaggcacagggagcagtgcagtggcccgcacaggcaggagttctgccgggtggcgctcacagcaggcaggcccagggaggcccatcctctgagccctcccagttacctgtgcattgagaggcctgcatgtctgcagcggaggagcgggacatgacactgaggtccccagggcaagactgggaccctgaagcggcttctgcccagaaacagccccaaggaactgactcgcggccccaggaaagcctccagagagaacagagccgggccccacccagcctgctggctgaagctgcagcctgcaccttcccagccggctcgccgccctcccagggtgaagagacagaggctcagagaaggacccccacctgccacaacctcccagcctcccaaagcatcaaccacaaagacctccaggcccccagctcccctcatgaagcagcccccttcaccatctgggatccagcatcacctccaggatggccttctctgcacagcctccctgcctgccccagaacctaatttgcttaacagaaatatgcttgcagatggctcctcactcaactagaataaacctgtccacgtggtggccacagcaccttgaatactgcctggtacatagtaggttctcagtaaacatgtgcgaggaatgaatgaacaaatga

SEQ ID NO: 28746 - DNA, 824 bp, Artificial sequence
  DNA replication origin
cagcaagatcctccagctcccccttctcctatccccaggcacaattctgccacaaggtcactgtatgaccttggacacctagcttgccctctctgggcaagtttaatcatctttatgaaaaggaacctcagctgagggttctccaagctccaggactgctggtaaaaaagaaagcctaaggtccccacctcagcagtcaaaagcaagtgtcaggattccatgaggtactgcccgtaacgtgcatagcccagtgcctgtatacaaggggtgcccattagaggctagctactcttggtgttgtgattccatccctcagggaccaaataaaaaatgctacccgctcttccaggctttacctgattcccctaccaaagggaatcccccgaaactctctcacccctcccacagccctcagcccacacttctgtcctaggctgccttgtctggtccagtggttagggtctactcccctctctggcctccaggcttcctgaggacgtggcctcctctgcgttctctctgcatcttccttggagcctaggctaagcctcacctgagtcagatgctcaggatttacatggaaggatggatgtgaaagggaaagaaggagggcagacaaccaaaggactcaccaagggaaagaaatgcccatatctccaagctctatagtgcagtgacccttcagaagaagaaagaaaaatggccaggtgctgtggctcacgcctgcaatcccagcactttgggaggcccatgcgggcggatcacctgaggtcagtagctcgagaccagcctggccaacatagcgaaaccctgtctctactaaa

SEQ ID NO: 28747 - DNA, 1188 bp, Artificial sequence
  DNA replication origin
ctcctgagttgctgggactataggtgcgagtcaccatgtccgcctctttttttttttttttttaacagatggagttcttcatgtgttgtttagcctggtctcaaacgattctcccacctcgggctttcagaatgttgagattacaggcatacgcctctgtgcctggacttaattttaaataaaacagaatgttcaactcaataaccttgccatcctgcctgtgacgctcatcctgctacatcattgccatggctcagaataaacacatttgaccagctcgatcctggccagggatcagccaccattaagtggccttgggaccctcttcatctttggagggggggtggtctgccctaggaacagcactaggagtgaggggtggggccagctaagtgggcgggagggggaaatgggatgtgttggtagggaacctgccaatcactcagaatagaaaagaaagaccccattctccctgaaggtctgagtcaagattccttcatttctctccttggggaggggagggggttggaggaaacatactctgactttgggcaagacagttccttctatgggcctcagtttcctagttttctatgttttcctagtttctcagttttctatgaaataggatagaactagtagggttagctacatgagttaagtttccaatcttggttagttgcacatcagtatcatcctaggcacttaaaaaataacattacctgggctccaccatagatgaaataatccagaatctctgaggatgggggtaattggaatgtgcagccagggttaggaaccattagtctaggagatagcacctagagtatataaatctgttccatgttaatagccataaggaggtctacagaatcgttgcaccagactttatttacagtcttccattggtgaacatttagttgcttccagttttttgctgttttaaatgatgatgcagggagtatcctcatttataacctttgtgttcttgtttgagtgtttctttggctggattcctagaagtgaaattgttgggtcaaagggtattcactcgaaaaatctgataaatatttccaaattgccttccacaaagtctgtaccaatttacccttcaataatagggcatgaatgcacatttctcctaatccttgcccgtatgtgatgatgttttgttttttctttttcctt

SEQ ID NO: 28748 - DNA, 1889 bp, Artificial sequence
  DNA replication origin
ctccctccgtgcggggcccgggcccgtgtggccaatcaaggggtgctggcccgacttggcggggattgcgaatctcggcggcggcgggcgggcgacaggaggaaggaagaggcggcgaggacgggcgcccggcaggccgaccgctcctcgctggccccgggcctcgctggctctctctggcccctgcctggtcgcccgaggacgcggggagcggcgggcgctgtcggcgagcgccccgggcgccgcgccctcgccccggccgcctggcgccccctcccgcccctgcccaggccttctcccggcccgggcccctgcacttcctgcctcctccaccgaggcccaccgggcagggagcctccgccaggagttcattgtctgcacggcgccggcgggacgcaggtcctcaggggagctcagcggccgcggtgcgcgcccctccgcggagggcgccccggatctgaccccgggcaccggcaccctggatctgaccccgggcaccggcaccctcgacacccaggccggctttctgtgctggctccccggggtgcgcgcgtttgtggggagctgcagatatatagatacacacacccatcccttcgtctccacgctttgctttctatttccagcgagggcccccagctcgaggggacccctggagagtagaggccccggggaaaggccgcgcgccggcagcagagcccctcccctggcctcctctccccgcggctggcctttccaggccttgcctgctgctttgtcccgattctagcccctcggttgggtgcccgggcgctcggctgtgagatgggagatgatcgaggaaggggggaacgatgagagcggctaagtctacggagccaaaagcccccaggcccttgtcttctcccatctcccctgatgacctctggcctgagcccagttctgctctgaaaagttcatttcctggaggcctgcgcgggaaggcgctggggccccgctcccttcctgccagccttgcgcctggctggaatggctggaactgaatctggcaaggaggatcttgagacactcgtcagttctgtcctcctgaagtccccggagggactgcccccggcccagcagagatcctccccgtcatattagaaggagaccaactgagtccaaacggagcgcccggcccgttcctactcctccttttccctgagagaagttggtcttgttcgcctcaccctggctggtctcccaatccgggacagcctggcctgctccacagaactgggggttcagagggtgttctgattgggggacagggaaaccagaagagagactccaagaagaggacgggaaagaagggtggatgtttctcttttgctgatggaagggctgtacggcttgaaataatactggatttcttttctctttccctggctcactgctcactccttcaggagccacttaagaggcgacccagaagaaaatgtggaattggaatttctggttggaaaaacagttttatttaactcaggcagttgattttgagtttgcaaagcttgcttacctagacttccaatccacttctccaaacctccttacgttagacggcgagacccagaaagcaaaaggagagcagtttgcagtgaacagatgggtgggtgtttcaaagttgcttgaaccgagttctaaaaccactctgtggatctctgagaaggactcaagaattggtcttcagcctttcatgaaatgagccttgaaatgatttttagtgagtgcctctctcaaatgtgtatgtgtgtatgtgtagcagacagttcaagcaggttggtaggagaaaggcagcaaggtgaacaggagaccagtggaggcatttcgagactcggtgttgtaaatatcagccacacagagcctttctg

SEQ ID NO: 28749 - DNA, 942 bp, Artificial sequence
  DNA replication origin
ccgcggagagagctgagcggggccgggcccggctggccggcaggctggggagcggcggggcgcgggcaccctgcgtggggcgggcgccgcggcccggccggccccggcgctgttctcggcgggcagcgggtttttccgtgaaaggttgccctgggtaactcgtctccgaggggacgtagccctcccctctccaagtggcaacttatcgatccgagagattgataacccccagcgccgcgccgtgcacccgctccgttctcctggctccggggcgcgccggcccaaggtggcgccactcacccgggaggggggcgaggtcggggccgctccccacccgagacctggccgcctgcagctagttggggagggagaggctccgaggaacggtttaggggagccgtctggggaagacttttcccaagtcagaacccttcccgggcctgcccggagaccagagtctcagccggttcaggagctgcgggggacgcgcggcgccccctggcggctgggtaaaacctcgcagaaagtagcagctggtttatttcttctgacaactgcgcggggagggggtgctcctgcaaggtctcaggggtaaggtgttccttttacagtcggacagaggaagtgcacaccaggcgcgagaattctacaaataagggtgtagggggcgcacggggttagcccagtggtggaagaatttgttggatgtggggcaggggtggtctttgaacaccgaccggtgggcaaaagccaacctggcagagccaggtccctggatagttcatgtgcgtgaggcatacatcgcgaggtggcaatactagggcagcccaactccgtttgctcccccattctttcactttttacagtttgtgaggctcatgcgtcttggcgagcttgacagccgcgtgggccctaagtgtgttccctcctcctgcccccggt

SEQ ID NO: 28750 - DNA, 1408 bp, Artificial sequence
  DNA replication origin
gtgacgggctaaacgcgacgcctagctggacaccctgacagcggcagcgggcgagcgaggctccccagaggggcggaggccaggaccgagacgtcccctaactagacctaagccttgagggccgcccctccccaggttagcgctaccatccccaggccacagtcctccccagcttgtgcgtccaagagtgtccaacatctcggccttcccggagggaataggagcccccccccccacgcccccgcggcccagggatggacggagttgggctgaaccgggggtgccaagggccgaggcgagggcaggggccgcgaggcgcctgggaaggagccaggaaggaggggcagaatcagccgctcccccacccccgccggcgcctgggatcgaggcccgcggagagtggctgacaggcggcagatggcacacgctgggggagggggacgattggcctcggctctggggtgcccccgccgcgggctgcctctgctagaggtagggggcggggaacggcccccagctcgcccgcccaggctttctggggggctggagattgcggatcctgcccagccgggagtctggagagtgagggggcggacaaaaggagcgcggtggggaatgcgtgtgcgggacgaaagaggggccgtcgggggagaggggtggttggagtcccacggggctgcccttttccacccctaggggcctgctgaagactgaggacggaggtgggggcaacaggatggggagcccgcaatagcccatcctgacctaatccgaaaggacgagatcctggagccgctcacaaagttttccgggccccctcccacgcgtcgcctgcacgtatgtccgtttcccgacgctccgccctcccccgccaagttcggcgtctcccagctcagcggcagtcagggtgcagagggagcccgaccttgtccccgcctcggcccgtcccgcttcttctgaagcttgtttcatttttaactccttccagaaaaatgttgttttaaggaaaatctcaaaggaacaaaaagccaatagtgccttccttatttgcaatccccacccacctctgagctcggactgcaagggcctcaagggacaccaggtgacacctgggccttgcttctcacgggtgaccttggaccagaaagggtcattttcaggtgtgttttataccccccacctgcctacttctggcagggaatagggggtccagtcccctcccctatgagaaggggcccctctgggctctccttcttcgccggaaagtgaacagctgctcctgccctgcttggaggagtggctgtggaaacccactgtaagctgtaaggagcaggagccaccatcataaatgcaagagaaattccaagttgaggtttttgagaacaagtaagactttgcccacaaaaag

SEQ ID NO: 28751 - DNA, 1250 bp, Artificial sequence
  DNA replication origin
cgcaggcgcactcgcggacctcggcgctcgggtgctggagctgcggatgagagcgaaaagggtcagaaggcgcgcaatgcgcacgcgcgcggggcaacctcgtctcgcctcccggcccgacggagccctcgcctcaccttttccagcagctccgccgccggcccgtcgtcctcctcgcctccggtcccattcgccgccgcagccgcctcggcctgacagtcgcccgtaggggagaactgaggtcgcttgaagcgcttcgtccggctcttgcccatggtgacgtgcgctgggcggacagaccaccgagagaggagggcaacagcaggcggtggaggctgccgcgccgttaacaaggtccgttgctgctgctcagctgggccggctgacggctgcagcacacatgggcaagccgtgcgcaggcgcacggcgcgtcgtctgccgggtcggggttggggcggggcggggtggggggaactggcgcacggagcgcgcaggcgtggaagagggcataggcggggccagcttcggcaaaggggcggagccttgtgggtttaccgggtaagtaggaggttggactagaatagtaacgccgacccgggcgagaggatcacttgaggccagaagttcgagaccatcttgggcaacataggaaaacactccactccctgtcctccccaccaaaaaaattaaaaattatctgggcatagtggcgtgtgtgtgtagtcccagctacttgggacgttgaagccggaggatcacttgaccccaggagtttgaggctgaggtgagccgtgatcctgctactgcactccatcctgggcgacagagcgagaccctgtctcaatcaatcaatcaagcaaccaataagttagtaacaccggctacaaataatcaaatgtgattaagaatacctaacttgcaaggttattgtaagttctgtaaagttcataaagttctgtaaagtgcctaacaccaagcctgatatatagcaggtactcaaaaagcattaaccacgattttattttgtgtccccagcacctcccatagctcctgtcgtagacagagactagttaatgttttggaacgaatgtgtgtctatatttgataaaacagaatcgcttaagaacctaatctccctgccttagtttcctcatcagtgaagtggggacatcgatagtatatacctcatggagttgttacgaagactaaatgtgttcatatgtttaaggtgctaagaacagagactggca

SEQ ID NO: 28752 - DNA, 984 bp, Artificial sequence
  DNA replication origin
gcgactgtcaggccgaggcggctgcggcggcgaatgggaccggaggcgaggaggacgacgggccggcggcggagctgctggaaaaggtgaggcgagggctccgtcgggccgggaggcgagacgaggttgccccgcgcgcgtgcgcattgcgcgccttctgacccttttcgctctcatccgcagctccagcacccgagcgccgaggtccgcgagtgcgcctgcgcagggctggcccggctggtgcagcagcggccggcactcccgggcctggcgcgacgagacgccgtgcgccgcctcgggccgctgctgctagaccccagcctggccgtcagggagactgcagccggcgcgctgaggtgagccaggaagggtgcggggcggtgcccaccgctggcctcccccgcgtctgggctgcgggcggtcgcagcggtcacccagcgccttctgtgtgccatcaggcactggcccggtctcccgtttgcagagatttgaagccagtctccaggctccggagaagcccagtatccccgcatctcatctgtccacctggctgcttcacctgcagcgtccacctgctcaggcgtcctgccctcacgccttgcgcacgttttacactctccaaaagccctccttagggtcccttgcttggatgaactcttcagttcatgtgtcaggaatcgttctagatgcaggggactttgagcagccaagacttttgagcgagatctgttgacagccaagatccctgtcttggcacaagtcatgttgatggggagacagacaggaagctagtaaaaaggtaaaacataatattaaatagtgagaattgctgtgggaaaacgagatgatgatgagttgggggtgggaagtttgaattgggtgctcttgggccgggcgcggtggcacacacctgtaatcccattgctttgggaggccaaggaaggaggatcactggaggccaggagtccaaggccaacctgggca

SEQ ID NO: 28753 - DNA, 1104 bp, Artificial sequence
  DNA replication origin
ggttctccatactcaagctacacacacacacacacacacacacacacacacacacacacccacgagacccaaaagctttgttttacaaaacaaataagattcagtgacctattccagcacagggactcttctgaagggagatctagttggaaacattccctgcttatgtacataattcactaggggtcaggtaagattccattttctaagagctgaactttaaacagaaagtcactagtggtgcaatattcactcattagcataaatctctaccccctagaatgaaaagcattggctgcctctgccaggatgacaactttacagtgagaagctggagccgcggaccatgaactcctggaaagttctatcagggcctcagaagggctcaccaccttcaccagcctaaacttagtggtcacccatcccacgccaccctctgcatagacagggcatctgtgacatgggaattttttaaaaataaaaagatgggccaaagggtcaagagcaggcaatgccttacagggctgacataattgctgtctgggattgggggatggggaggagcattctggatgtttctattcttggcaaggaaagcacctccgggtcctgcaccatcaaaaaacactcacacaccaatgttctcagggaatgaatgataggcccgtgctaagcggtctcatcttgagttgtgatgatggggaaaaaggtgtggagggctggaggcggggtggtggtcaagggtagatgtgtttaactaagggggatgggaggagagtgaatggataaaggggggggcctggggaaggtgtggacggttaagagggaggggaggaaggtgtggacgactaagggaggacaggagacggagggtgtggacggctaaggaggcttggggaaaggtgtgaacgactggggggttggggatggccagcagcacccccgtgcaacagcagcgaaggcaggccgtgggggtggccgctcctagaccctcacaacccccctctgtgggcgtgtgcccggctgcgcattcgcaccggccaggccatcgggccgcagagccagcactcaccccacgactccctggttgtagttcctccgttt

SEQ ID NO: 28754 - DNA, 1288 bp, Artificial sequence
  DNA replication origin
gctgctggccatccccaaccccccagtcgttcacacctttccccaagcctccttagccgtccacaccctccgtctcctgtcctcccttagtcgtccacaccttcctcccctccctcttaaccgtccacaccttccccaggcccccccctttatccattcactctcctcccatcccccttagttaaacacatctacccttgaccaccaccccgcctccagccctccacacctttttccccatcatcacaactcaagatgagaccgcttagcacgggcctatcattcattccctgagaacattggtgtgtgagtgttttttgatggtgcaggacccggaggtgctttccttgccaagaatagaaacatccagaatgctcctccccatcccccaatcccagacagcaattatgtcagccctgtaaggcattgcctgctcttgaccctttggcccatctttttatttttaaaaaattcccatgtcacagatgccctgtctatgcagagggtggcgtgggatgggtgaccactaagtttaggctggtgaaggtggtgagcccttctgaggccctgatagaactttccaggagttcatggtccgcggctccagcttctcactgtaaagttgtcatcctggcagaggcagccaatgcttttcattctagggggtagagatttatgctaatgagtgaatattgcaccactagtgactttctgtttaaagttcagctcttagaaaatggaatcttacctgacccctagtgaattatgtacataagcagggaatgtttccaactagatctcccttcagaagagtccctgtgctggaataggtcactgaatcttatttgttttgtaaaacaaagcttttgggtctcgtgggtgtgtgtgtgtgtgtgtgtgtgtgtgtgtgtgtgtgtgtagcttgagtatggagaaccggctttcaaattgcttttcatttttcaggttgtgttttacattgagggctttagcatgcaaatgaaattaccaattagtaatcccatgtgaaccttttcctggatttattcattcagatctgccctgctttggctgagagagagagttctgtgtacctttttgaaggtctggataaaatgagttggtgggttccatctgcttccagtgggctggtgtctgctctatgctactattacaactcctaccttttgtggaaaatgcagtcaagcgttctaggactggtgctgtggtacatgtcaaacctgccctcacattccagaaagggaacccttttagggttgagtcctct

SEQ ID NO: 28755 - DNA, 2318 bp, Artificial sequence
  DNA replication origin
acgattctcctgccttggcctcccaataggtaggactacaagctcatgccactgctggtgtaaaattttttttaaataaaaattaaacgaatttttattaaaaaaaatttttaggccaggtgcaggtgactcatgcctctaatcccacccagcactttggaggctgaggcaagaggatcacttgtgcccaggagtttgagaccagcctggataacatagtgagaccctgtctctacaaacaaacaaaataaccagatgtggttctgtgtgcccatgtctcgctatgttgcccaggctagggtgcagtggtgcgatcaccactcactgcagcctccacctcctgggctcaagcgatcctcctgcctcagcctcccaagtagctgggaccacagccacgtgccaccagtttatccagctgtggctttaaaaaaaaaaaaggcgccattccttttcctttctgatttgaagtgccatccttgtcacaaattaaactcacctggattttaaaaatactgcatattcccagacccacccaaggaccagaatctctgggaatgggactccagccttatttggaatccagtgccttagagccttgctacccagtctgccaaggaccagcagcatcagcgtaacctgggagtgagacagaagttaagtctcagtacggacccagttctgctgaattcgaaactgagtggagcccagccatgtgtgccttcaccagacctctgggtgagtccgttgctggttaccatttgagaatcccctattgaggactgagtatccaacggggtgatcccgctgacaggtccacagtggcgatgaggaccatggggatgatggatatgtcccgaaggttctgatgggagcagttatgcaggcacggtgtataactcactttctccagctctgttttcctgtctgctgtcaggagacttgctcatagatttgcgtgaagatgacacacagatgacgggctgggaagtcatagcactgttccacacaccggaaagggctgagggctcctggcttggagagcactgagtgtgggtcccagcaggaccctccctccatagctggctccgctcccctctctctttccagggctgaccttggcagaggtcaccgtgaccctgaggcactggctgttctgaaggccttggggaaacaggtgggtttcttcgttttcaaggttctgctaaaggggtggggctgccgggggtgggcggtgctttcggaagctggctctgctgatgatcctattacctttcttcactgctgccgggattcccattaccggcgcagggaggccccagctgctcagatcttcccgggtgagccctcaggatgctgcagtgacccggccagggccctccacggggaggccgatgagtagtggagtcgcaccggcccagagagccaaatgccaccatgcttgatgcccgggggctgcacgagcccagaggagctgcctgaccagcgcgggaagccgagagggcttgctgctgctgggatgtaagtctcaggtgggacctctctgtggccatctggagtggaaatcagaggctccaccttccagcctcggccatctgatttctcagcatggtttcaacgtgggtggcctgaggctgggttccaggcccaccgcggggggcaacgccctcccacaccaagatctctcccctctagggtgagccggggtagcaggctccaggattccaccataggttcccagtagatcagcgtttctgctacctgtttgtcatagatttcctccgtgcttgttaaactacagactctctggccctttctatgaagacctgctagggccttgggggtcggacctgagaaatcggcataacaggtgcttctgtaacccctctcagtgaagtgggaacccccaattcctgggtaccagggagctttagaccagtgggaaagggcgggattcatgggggtctgcgagtgagaaatgccctcgtagacttgattactcctgcggacgacctcctctgcccctcccagggtgactcacaggaggctttcttgctcaccctgtctgagtttcttggaaacagagcagattttttttctgccaacactggggccccaccctgggttgcagggatcacaacgaggttacaacacctactttctgaggacacctacaggggtggtcgctgtcatctcccgcccctgagccctgccataggaggttaaggcctgagtgagacgtaaggcgggaccaaagctcccccggcttgggaggagggcactggcccgccgtctgtggatccttccagaaacacgggcgc

SEQ ID NO: 28756 - DNA, 1622 bp, Artificial sequence
  DNA replication origin
gcggggcggggacagctgcgcttgcagggtggacgcggcctcctgggcgccccccagcccccagccccccgccccggctcccgcccccgcgccccaggcctgggacacgcggccagcggggggcgcctgcggccgctcctccttccccgcccgcggtgagtgccgggccagcccgctgccactggggcggccactcgggcggcggtggagcgggagcgcgcagcaggtgagcgcggggcgcgggggagcgcggcgggcgggccggggatgcgcccggggtcgggggtgcccgtggccgctgcccctctccgcgcggtccccacacaggcgggcgggtggcccctctcccggcccgcccttccccggcctcgcgggtgcccggcggtggcggctcctgcccgggtgggtcggaaatgctccgagacccctccctcgggccacgacctcctcccttaggcacggccaggagacgcttcccagacgctgccccagctggcgcccgctttccgataacaagactgagactcgagggaggccgcccggccccagacccctgtggtggagcccgactggcttagggcacagaagggggctggctcggggcggcggggcctgttggaagcaaacactgcacagggtagcagcctctgtgggcgcaggaccgggctgtgggtctgcagcgctcccgccggagccagcagcgagcaggacccctcggtggccaaaggggaccagggtccaggggagagtgagccaggcccggcccctgcctcggaccccaaccgggaaacccagatgccttgcacatgaggaagtgacaatgggagccgaccccgggtaggggagagaggctggagcctctccatggattggagttgttccctttactggtttatgtctcaggtcccctccctcaaaggccaggaactcctttctgagtcccagagctgaagctggaaatgaccacgtgggcgccgtggacagaagtagagcccttaaaatgaggaacaggataccctgtgtggtcggctgaagccccctcgggcctggtccagagtgatgctccagagattgaatgaatgaatgaatgaatgaatgaatgcatgaccaacaggactgtagtgaactccgggtgaggctacagctgtggggacttaggcaggggctttgggccctgagaggagggggttctcaggttcagtgaatgccttcaaacgtgggcaggtgcccttgtagaagggagtttgtgggctgtggagctggggacaggctgtggggaggggtcagactccaggtctatggggggaccccacaggagtggctgactgggcctggggagcagaggtgagaaccctgcatggtgagttgggtccatatgcggaggcaggattttttttttcttgaaacagggccttgctctgtcctccaggctgaagtgcagtggcacaatcatggcttacggcaacctccacctcccaggctcaggtgatcctcccacctcagcctcccgagtagcagctgggattacaggtgtgcgccaccacgcctggctaatttagtaattttttttttttttttttttggtggacgcatggtctcactatgttgtccaggctagtctt

SEQ ID NO: 28757 - DNA, 1228 bp, Artificial sequence
  DNA replication origin
cccaaccccccgagcctcagtttccccatctgtgacatgagaatgacacatcccctaccatgcccaggagggtccgccacagggcaggacccagggcctgggcccgcccaggacctacttgatggcctggcacatgtccagccccatcttcacgcagttccgggcgtgggtaggcagcgacacgggcaggcccgatacacagtagtagcagtcgccgaggatcttgattcgcatgcactcgttggcctgcagggtgagggaagggcctggtcactggaagatgtggggctgggacctctcacgacagccgcctccccccaccctccagggtgcacccggctctctcctggctgggggcttgcctcctggggtccagtcaccaggagccacttctgggcctggcaaaaggcttagcgacatgggggcctccccaggaggaacccccaggcaagcaccagaggtgaacacgagtgttcctaagggcctcggggaggggtctgccttggtttcatttgcccaggtaatgtttgagtgcctactgagtacccggccccaggccaggcaaggggacacagcagtgaacaaaatagatgcaaatctctgcagccacggagcttgcacgtaggcaggaggggtgggcactaaactagaaagacaaaaacaaaacagtgtgcccagctgtgatgggggctaaggagaaaaccaaggcacaggagggaagtgatgttcccaggaggccagcgaagacctctcagagttggaatcagaaacatttgagctaagaccccgaggaaccgagagagccggccatgccagtctctgcaggaagagtactcaaggactcacaggagccctggggccacaaagctggggaagagactgcgaggtagccaggaggctgcaggagtggggggtgaggacagaggtcacaggtgtacacaccaagggatcagcaggtttcaaggtcacccaagcagtggctgtgctgacagggcttaggggtggggaggaaagatatcaatgcagagaggaaagagggaatggggagggcagagtaggagagcggcgagggtggggactcataggaaaaggcccagggagagaaggggacccccgagagccctctgaggttcatctgaggcactgctgcgtcaccagaccctccttaagccctcagcaagggtggccacatgcaccgaggcctcatgggtggggctttaggggagct

SEQ ID NO: 28758 - DNA, 1221 bp, Artificial sequence
  DNA replication origin
acacatgcctactcggaatgggcatggcattggtatgagccccacgggggcagctgcagccaccatccagtccacaggagcccaccttgccccagccaggccacacagcaatggcgtaaggcagagcccatagaagccagtgcagaaaatccacctccatgtcaaaaacaggagctacagacgagcaccctgcacacaggagggatgtccccaaggtaggaaaaatgcagggtgcgcgaccatggggcccgccactgccaccttagcaagaagggtggggggactcgcagttcactcggtgtccgtgaaaatccctgtggagggaatacaagaaactcactgcacaggtcccctctgagatgtgccggctggggacaaggagtctttctacaacacgcccttcacaccttttgaactttcaactgcgtggataaatgaagttaaacaaaaaagagggtggggtagggtggggtggggggaaggtggggccgccaaataaatacaactgtccagttgagtactgcgtgcaacacttatgcgaaacatgatttacagttatctgaaattcaagtcggcccaggcagcctgcagttttccctgctcaacctggcagcctgcgggggtggattttggagcctcctgggtgaggagctctgcttcactcattcaagggctatctgagcactagcttcgagccgggcatccatctcagcacggggtggggggctgcagcctggagaggaggagccccccggcatggcactcatgctgacaacagacaaggaaaatggataaacaagcaagggcattagggacggagggaggagtgttttgagtgcagggacctgcgggtgccaccaccctggtagtggaagggcaggaggagaccaggtggggtgagggggacaggagagcaggggaaggggcttggaggggcggggccagggccggggtacagggcgaggatcagggccctattctaggagggtggtggaatgggacacaggtaccggcaggggttttcccagatgctggctcagtatggatggtgcagcactgggggtgctgggggcagagtgaggccagcagatgtgtagggaggctcacaggccagcccttggtcccccagggtctggcagtcgggccagccccaaggcatagcgaggaccagagtgaaaggagccactcgctggctgggccgacattcttgagcaagcctca

SEQ ID NO: 28759 - DNA, 1119 bp, Artificial sequence
  DNA replication origin
tgaaaatgttggtcccggcccctccccctggctgctgccgctctgggggtgtctgcaccctcatctcctagcccctctgccctctgaacctgacggctgctgtggggagtcggcacggcggcttgagccgtgctcagagctgatcccaacgtgaaacctcaggctgctgtgatactcatggttgcctggggcccaccttgcatggcttgggcaggttccagcgttcttgtccctggactgatggggacctgtctcctctacagcccctgatgcctttccaagttccagagctgcctgttggcaatgagacaggcctactggccgcgagcagcaagacaagagccctgtgtgagcccctcccggtgagtgcgccgggcccggctccgtggcctcattcagagtggggctgctgctgccagaggtgtagtttggaccctcaaagcatgggtgctgacccctgagagcacagcatgtggaggctgagaacagcctctcctgcagagctgggaaagcagggtcccatgggcccagctggcctctggcccaagggagtgaggagtcctggccttggcaggcttggtctaggctgtgtgggtaggcagggagtgaggggagcatctggccttgtgcgggtctctggtcagggcacttcctctctgacaggcctgtcactattttatacacgagtatgcacagctcagggaggggcttcattaggtgatggcgccagggcaggcccagacaggctgatggcagaggtcaaggtctctgcctggagggccttgcagacagcagactctgcagcttcagaggctggcagtgcagtgagctgggctctaaaaggcagaaaggttctgggacaagggacagcatgggaaaaagccgaggcgtgtgttgggagcagtggggttttgggtgggttgtctcctggagagggagtggggagaactgggagatggagccgggggcaggcttgatccagactgggaggtgcaggaatgccggggtgtgaagagcgtggtctttattctgggggctggggagccacagcacaatcttgagcagggcagaggtcctttgggagggtaagctcacaaaaactcagggaggcagcttgga

SEQ ID NO: 28760 - DNA, 910 bp, Artificial sequence
  DNA replication origin
gcccccttcgccggcctgggcctgccgtgggaaggaagggccccgggccgccccggagccactgggaaagagcggaagcccggcagagccgccgagggcccgccgcccgcaccccggccccctcctcaccctcgtagaggtgtttgtccgacttgtgcttcttgtgcttcttgcccatgtccgaccgggccccggtgcccgccccccgcgccaggcccaggccgtgcggcgccgcttccggtccgggccaggcgagcggagggcgggagcggggcccgcgagaccccgcgccgcgaggcaggggggcggcgcgcgccgggcggcgcgatgcccctctcgagaagacggcgcgcgagacccggccggagcccgagagcggcggcggggggggcgcgcggccggcgcagaggcgggaaagaaggcccgccgcgcgcacagggtgccggcggctgcgggtggcggcccctggcgaccggaggtggtgctgcagctcgcgggccgggggcggggccgagggcggggccggggcgggatccaccgctcagactctcgtctttcttccttcctccctttcccctcaatttgtctgtcttgtctctgtctctgtgtgtctctccctccgtctccacttccctcccttctttttactccctccctctctttctttctctttcccttcttcccttccttcctccttccttcctttctttcttccctccttactgcctcccttcaagccttccttctctcttttcttcctccctcatcacccttccttctcctcttcccgtctccttccctctttttttcttttctttttttccccttcctccttcccccactcttcctttctttccactttcccttgcttctgtttcttcccttttacgatattgactgaaccccatac

SEQ ID NO: 28761 - DNA, 999 bp, Artificial sequence
  DNA replication origin
gcaagctgctgtccagatagtgctctgacccaggctgagggctcatccaggcctaacctggaggataagtcttggttaggtgccctacaagtggaacctgaggcgtggatctgttggggtggcaattggggagaagctgggagagaagcaggacggggtgggtagaagcagagaaagaggtggtcccagcctcagccccgtgccacagtggtggcggggcgaggggggattgggaacatcaactgtccagggaacagtcccaccctgtgggaggtggctggccttttgtagcccatggtgggcagcgaggtctgcctgattgtcgcctattacagaggtgactctagtttgtcccagggcaattctctgagggaggtgtgcggctgccttccgtgagtggccaacactcccagctgctggtgatgcccctccagcaggatgtgccttcaggagaggtgagccaagggggcatcagctgcatctactaaacaggcagagaggtcagcatgtgcaaaggcgagggaaagttgggtgcagtcagggaggagaggagagcaggtttggagcaagagagatgatggggactgtgtctggaagaaaggctgggctgggcagagcttttcaaggcatggcagagatgcttgattttatttgggatgcccatgaaggcagtggacgtgggtgcatggccatattggcaatttaacaagagcgctttggcttctgaatgaaggaagaattggagtgggttaggagaccgggcagagagaccagcttagaagtgatgtggtcttcaaaggggagatgggggtggcttggtctagcgtggatgatgtggggatggtgcaatgggataattcaagagttatgtaggaggaagaacttaggaggggttagggatgcctatgcagaacccaagaggagaatccaagtaggaaggtgaatgcatgtgtctggggcttggaagggaggtgagacctgaaaatagatttttggcat

SEQ ID NO: 28762 - DNA, 1953 bp, Artificial sequence
  DNA replication origin
agcttcattccccgaggttaccctctttagagctcctggggcttccaaaaagacttcagtggctctcaaagctgaagcctgatgatacttagctcttgggcatgagacagccagtaggttggtatggcaggtgacttgcactcccaccatcctgcctgtgtgtaaaacccctgcccctaggcacctccttgcacctctaggggacatagcccagtacctaagcagcctacctagccccagctccccgctgggcagagcaagggcctgagagggacccttggctgctggatccagggtgttcaatgtaccaggcattgcagggggagaaaagagagagacatggggccagctccctgccctttggagcctcgggcccaggacacaggctcagcaagccccaagcatgcaggagcagctggatgccagcagccagtgggctgactaagactggcaggatctcagcagagggagaggaagcctagtttcagatcaggagggcttcctggaggagagagcatgaactcagctttcattcctggagccagagggctgtggaaacaatcaagcaaccatggctaccttctaccaggtattttgcctgggcctggctttgtgtctaacccaccttgttttccacaaccctgcaaggccttttcaaatcccacaggagaaaatagagccacagaaaggttataagaaccacacagttgcccactgacagggtctagattggggctgccagtttgtggggggcacacaggccctgaaaaggaataaatccctctcattcaaggctgtgtatcctttagtgggagagaagcacccagtgggtgcggaatggggactggaaaaggtagagaaggattcacaaaggaggaagtttttaacctgggctcttcaaggatgagtaggaagtttgtccagggcagaggagggcattccaggaaggaagaacaagtgctggatcttggagtaggcaaggaggagctggtgaatgggttgggtgtgactgcgagtggggagggaggaagatgaacctggggggcagtaactgcatgcagtcaacactaaaaaattacttatttaaaatcaagatgttgctgtttttttcttttctttttttttaaaatggtttattggcctggaacagtggctcatacctgtaatcccagcactttgggaggctgaggcaggaggttcactttaagtcaggagtctgagaccaggctgggcaacatggcaaaaccctgtctctacagaaaataaaaaagctgggcgtggtggcacacctgtaggcccagctactcaggaggctgaggtaggaggaggatcactcgagcccagcagttggagatggcagtgagcggatatcgcatcactgcactccaacctaggtggcacaacaagaccccatctctatattttttaaaggtttattgaatgaaggaaggaatgactgaattgtgcctcccagggtctgttagtacaaaacaggagttcaacaaacgtttgtttaatgaatgaacaaaatggatttcccttgcctagcacataccaggcactcaataaagatttgctgcactaaccaatgcattaatgaagtagtgatgcaccgcactaaccagtgaatggatgaagcagtgatgcaccacattaattagtgcctccgtgaagcagtgatgcaccacactaacccatgcatccatgaagcagtgatacacagcactaactagtgcatccgtgaagcagtgatgtatcatactaactagtgcatccgtgaagcagtgatacaccgcactgactagtgcattggtgaagtattgatacaccacactaactagtgtatccattaagcagtgatgcaccgcgctaactagtgcatccgtgaagcagtgatgtactccactaaccgtgcactgatgaagcagtgatggcgtggaattagctggggca

SEQ ID NO: 28763 - DNA, 2099 bp, Artificial sequence
  DNA replication origin
acacgagcacagtcacacatgcacacagtactcatgcacgtgcacatacatccacacataggcgtgtactcccaccctcccaaactctaccagtcagcacagacaactctcaggctggacttcccagaccagataactgagtgtctcggtccctttcaagtggtatcagagcacaggcctgcaagtatccaggagacggctgatggagaaagggaagaagagagagaggccccctcccccatccgcccactggctttaaagggagaacaaagtgagcgggatcagagtgtgcaaggtgatggcagcaacgctgaagccatttatcactgccagatgtgtgaagggtcaggctgcggggcacgctgggagtgccagcaggggcgcctggaccccagacacggcaagaaataacctatccagtcagcaagggaccgcaaaagggctgccaggaccctgttcttaacaaaatgacaatgagctttcttttttgtccgggccagaaggggctggggccagggtggaggcagcgacagcttaataaagggccgtcagtgtcagtcaaagctctaaaaatactctcccgctgccagcaggctcactcttgcacccgcccgcgggctttctgctgcctgaatggtccctcagtgacgcacaaggacaaatgtgtgcccagagaggcctggtgtcaggtggcacacatggtccagcttgtggcatctgccctctccctcaccctcacccctccaggtccctctaacaggcacacctggggccaagaagggggtcaagaagggggtcaagaaggtgccagggtggtgtgtgctgggtgcacactccccactgtgctgctccatccacacacaggagagcaaagacactagccacctctccttgcaggtggcttcctaccccaaaggcagccagacttcataggagatcccaggtttgaggaaggatactcattactggctgtggaggctcccattcagacggaggaggcaccatgggctttaggtaagcccctggtccaggccctagaaccatctctgcttttgctacaggccaagtgtggagaaggaggttcaaaccctgtccttagggagatcccagcctgctggggcaagtgcagccacagccttagaagccctcctgatctgatggagaaggctcagctcttgccttggggagttcccagtctgatgaaggaggcacagcgtcccaaagacaggttgccacacaggggcaatgaagggatttcagccaaagtgtcctgacagccctgtgctcctcagactttaactttgcaactgaatcaccagggatcattacaagagcagattttcgttccgcagccctggggtggggcctgagattctgcatttttgcttcatggacacattggttagtgcagtaatgagatcctgggtgatgggggtgctgcaggcgcctgagtagcaggatgagacgtggggagggtgcagacctggtgagggtgcagaccagagttctcttggttcttctgctgatggaaacagccctgagctggggccctaaggagggctccgtggaagaagcgtagcagaatcagatgcgcagagagaggactagggagccggcaggccctatttaaaactgtggctctggcatttattagctgtgtggccttgggcatgtttcttgacctctctgaagtgaggacagcaacgggtgtgcccacctcgcagggtggtgtgaccagatccatcacatccggcatgcggcaggggctcaagacatgccagccactacgtttatactaaactaactgctgtgccctcggattggagagcccaaaggcaccagagggagatgccagcgtcaagagacagagccacaacgaagcgaaaggcggggctgcagagaggccccgggtgtcaagaggccctgaggcctcgggcgagtccctggcctttctgagccgggatcctcacctgcagtatggggatcacagcaccgcctgcctctgtagctgtgtgagaggtcagatcgcacggcgcctggcacccggtaggcgctccataaagcgctccacgggatgggggtggggttaacgtggaagg

SEQ ID NO: 28764 - DNA, 852 bp, Artificial sequence
  DNA replication origin
ccgagctccagggctggcgacccggcggggcggcttgtccaggaggcgtattgggacagaacagcccggccatcgctaactgtactgtcacttccctccgctccacgttctctctaaacgggcagggcgggactcggcggctccaatttacaggtggggaaactgaggtcgggagcggagaccttagctgctcaggtgcaagcttcggcagcgctgccttttcccagtcttcccacgacctaccttctgcagaaagtgttcattacccgccccgtgacccgccccccaccaccgcactcctctagtttcttatttggggagtccaggaggagcccccagcgcaccccgggccagtgtgagcccagccctctccaggcagcgacaaatgtccaaagcgccccgttatcagccagtctctgggatctcctcgtccgggggcccgtgggtgcccgcccgggtcggggcgcgctgccaaactgcgcggcccggaagggggtaaccgctgagtctttgatcttccttggtttccgctccccgctgcagttcgccagacccaagggtttgtttgttttgtctggggaggtctctgcggggaggtcgcgcggggggagggggatggtggcggtcgacatcaagggattccaccccacctttgtggctctcagaacgcctgcccccttctggggacactgtgggtccgtgttacgctcgtcctggcaccaggcagctctggcgtgggaaaagaaaacccgcagctcagagtgagaccagccccgacctttggagtgaattacctgtgctcagttttgtgatctgtataatggaggctccattctgccctttttgccgact

SEQ ID NO: 28765 - DNA, 903 bp, Artificial sequence
  DNA replication origin
agccgcggcggcgggagaaggaaagaaaggaagggagagagttagcgaccgcggcggcgacggcggcggggcccggggcgagcgcgcgggcgggggcactgacccggcttggagtgaagtttccccatgctggggctgcggcggccgggagcgtccctaagccatgcgcccggcccgcgggcctggcgcctcccttggctctcctcctcccgaagcagcccccgagccgagcggagcccgaggcggcgccgggacgcgctcctgccgccgtcgccgcggcccgactgacgcccgggagcgccgagcccccagcccgccgccgcggcccgcgcctccccgcgcgcccattggccggtgcggcgcatcaaaggcaaggctggttgcggcgggggcggggccggaggcggggcagggcggggacgagggcggggcgctgacgggaggggcgggacacagtccgcgctccctgccgcggtctggggccgggggccgagctccagggctggcgacccggcggggcggcttgtccaggaggcgtattgggacagaacagcccggccatcgctaactgtactgtcacttccctccgctccacgttctctctaaacgggcagggcgggactcggcggctccaatttacaggtggggaaactgaggtcgggagcggagaccttagctgctcaggtgcaagcttcggcagcgctgccttttcccagtcttcccacgacctaccttctgcagaaagtgttcattacccgccccgtgacccgccccccaccaccgcactcctctagtttcttatttggggagtccaggaggagcccccagcgcaccccgggccagtgtgagcccagccctctccaggcagcgacaaatgtccaaagcgccccgttatcagccagt

SEQ ID NO: 28766 - DNA, 1842 bp, Artificial sequence
  DNA replication origin
gccaacagaagacagagaagcccccagctaagcagtggcggtggaggaggacaggggagcttctcctaggcccagaggttatttcatccacacacaggaactgactttatccacaggtccacctcccgacaccagcactgcaagcgagctgccaggtcccaccacccaaatacaaacacatctgaagtctccactggcctctccccagcccatggataagaccaaagaactaaccagacctgagactcagtctattccccctctaagttaaaaaaaaaaaaaaaaattaaatgtcacatcaaaaagttgattcatcctttgatcctaggcttgcgcgagttccacgcagactgcctgaaagccccgtgcagagttccggagctcacaggacatctgtgaacgccaagtcccaggccaggagctggggctggactcactcattcccatcacacttagtgctcctccaggaactccagcctcagagacacacggggtgaaggctcagggctctgcccaggctacagtggaatgaggccctctatctcatatgccaagtaaggggtcttccaggtctcagtccccctagatctgctacccagagggccgcctgctctactggggttcctgtacaggtggtactgatgaatgccacagacaatcagaacatattcagatcctggggccagcacagctctgccttccacccagacacccctaatacccccttctctctagcccctactccacctccacctttgaatgctggtggcagaaacaaggtagaagtcagagcaggcccccaaatcccgccggtacagacacgattccccatcaactggaccttcaccacctccccacctaggacctttcccccaggcagccctctgcctccagctgggcacttcgaggttctccaaggcatgcgggcagagggtcgcgttggtggggcagggggcagctgagaagagattttcagacccagaagctgtgcaggaaagtgctcaaagttggggtgcatgggtttggggacccatctctgaggctgaaaggaggccaggaggtggggcaggggtggggaatcatacccgggtgcttcggcctatggtgcccgccaaccgcagctgtcggggtcccgagacaccgcccgggcagcgctgtctcccgatccactcctcgatgcccttccgagcccaggcagcgctcacggcgaagctgtcacctgggacggggacgacatgaagcccctgagtctggctccaggtgccaaaagttacccccgcggagggaagaaggaggcgcggtgggaggcgaaggaccacggcacgggggccaggagggggttcgcgggctggggcaggagccaagagagggacgcgggtaagtaaaggggggttcagcgaagccctaggagcgaggagccagaagggggcaagaggggtgagcagtaccccaggaggacgggtttaggatcagaccagggagcactggcagccaggactgcggaggagagggctgggggtcaggagaggggccgcagtaggtgcaggagccaggatatcggaagaagggccggggggcaggaagagggggcagggtcttgcggggaggcgcttgggggtctgaagagagggtgccgtgagagccgagggcagggacgcgggagggggaggggttgagggtcagcggtgggagcgcaggaccgcggggagcgggtaggagggacagaggagggggcgcgaaggctgctcagggagcgggcttggggggccggtggccggaactggggcttcggggtggccctggtcataagacctggcgggctgggccgttctgccgcggccg

SEQ ID NO: 28767 - DNA, 1533 bp, Artificial sequence
  DNA replication origin
tcccaagcttctctggccagggaaccctttgacaagggtttgagtacccttattctcttgagtgctttctcttgcattcactgagcgtgtgtactgcattccctgcgtgtacctgctattatgccagttgcattgagggcctcccaaagacgcagactttgcctttgctaaggcaccgctctaagcactgggccctcgcctctccttgggcaggccctggcatgtgtgggaaggggtgagcacacagtgtgaggccagaatggccagtccatcaaggggatccatcatggtgtcatgacaacactccctaaggtccttttcagaaatagaattcattctcaaatcaaaactaaaaacagaaagcccacctggagaggccagcaaaggaagacatagtccacgggactgagagagtgcatgtgtagcgggttggggtgcatgcttagtgggttagagtgcatgtgtagcgactagccggtgggaccaagacagtgcgtgtgtagctggtagcctgtgggactgagagagtgcatgtgtgtagcaggttagggtgcgtgtgcagcaggtacccatgggaccaagagagtgcatgtgtagcaggtagtccgtgggaccaaaacagtgcatgtgtggcgagttagagtgcgtgtgtagcaggtagcccaggagactaagagagtgcatgcatggcaggttagagtgcatgtgtagcaggcagcccacaggagtaagacagtgcatgtgtggcgggttagagtgcgtgtgtagcgggtagcccgcaggagtaagacagtgcatgcgtggcgggttagagtgcgtgtgtagcgggtagcccgcaggagtaagacagtgcatgcgtggcgggttagagtgcgtgtgtagcgggtaccccgcaggagtaagacagtgcatgcgtggcgggttagagtgcgtgtgtagcgggtagcccgcaggactaagacagtgcatgcgtggcgggttagagtgcgtgtgtagtgggtaccccgcaggagtaagacagtgcatgcgtggcgggttagagtgcgtgtgtagcgggtagcccgcaggactaagacagtgcatgcgtggcgggttagagtgcgtgtgtagcgggtagcccgcaggactaagacagtgcatgtgtggctggttagagtgcgtgtgtagcgggtagcccgcaggagtaagacagtgcatgcgtggtgggttagagtgcgtgtgtagcgggtagcccgcaggagtaagacagggcatgcgtggcgggttagagtgcgtgtgtagcgggtagcccgcaggagtaagacagtgcatgcgtggcgggttagagtgcgtgtgtagcgggtagcctgcaggagtaagacagtgcatgtgtggctggttagagtgcgtgtgttgcgggtagcccgcaggagtaagacagtgcatgtgtggcgggttagagtggtagcgggtagcccgtgggactgagagaatgcatgtgtagcaggttagagtgcgtgtatagtgggcagcctgtgggactgagagagtgca

SEQ ID NO: 28768 - DNA, 1044 bp, Artificial sequence
  DNA replication origin
tgcccatttttgtatgttttagcattttttttttccttcaaaacactttgctgtaatttctgattgtagaagtaatcatgtgtgttcatggaagaccattgggtgacctggaatccagcaccgggcaccatttctgggagcattttggtgcccgtctctgcagacgtgtgcctcctactacagcgcgtggaaacacgtgcagataatgttaggaaatgtaatcacattttctctgctgtttggcaactacttttttctttcaagaaaatgcagggcgtgtttttctgagtcagtaaatacagagctgcatttggtggttcaacacacgctggtcgagtgcctccgccgtcaggcgttgatacataatgtgtcagatggtgggaatgccccagagataaataagggattgtgggagagggggctgcagttttaaataaagagatttgggaagacctcacctaggtgacaaggtgataatgaacccaaacctgaaggaggggcaggagggaggggttatccagaggaagagtcttccgggtagagggaacagcgtgtgtgaagaccctgaatggggaatgagctgaacctgttggagaaacagcaaggacgcctgtgtggctgtgggcgagcgggtgaatggggaggaacagaaggggtgagggaggtgatagggcagacaaattgggtggggctttgatgggctttggtgggactttggggaattgggtaggggttggggtggcgacgagggcagagaatagaaaatggttgtcattattcaagaggactgtggcctggaatgcgtggcagaagtggaggaggtggcaatgattggtttcagggtgtgttttgagggagagccaacaggatgtgcggaagcctctggggtgtctggccagagtgaaggaagcagggagctgccctgtgtacacagggaaggcactggggaggacaggtttgggggccgccaggcgtccggtttggacacatgaagtttgaggtgcctgttgagcaacttggtgacatcaaacaggagggagagcc

SEQ ID NO: 28769 - DNA, 949 bp, Artificial sequence
  DNA replication origin
ttaatggaaaaaccgctttggaaaaagttattattatttttttcagtataaaagggttgaatgttcttggtttaaaaagagagaatataaatataaaattcaaatcacccagaaaatcagacagctgaaggagacagcgccccagttcccatttctgaagtggagcgtggccttccagaaacattctggaaaacgcacctttttgtttatcaacagcacaggagcggactaggctgctcctcagcagcttcctatctgacagcactgtggaccctgggccctcattcccaaatggcccctctcaccttctcggcttttccacacccacctttggtgtgatcatcgtgcactgctgcgtggcaggcgggtgggattggtgccctcattttatagatgtggccactgaggctttcgatcacagccctggcagcatgcgaactgctgagtttcagaatgaaccgagtcctctggaagccgccagtgtgaccctcttgattatgtcctcatctggtggttggggatggtgggaagtcgaaatccacagtggctccggaggaggcaaaagacttcactggcagtagagggaggagggcgctccgggtgaaggggacaggatggtccagggctgggaggctccaagtgggcggtctggcctgtgagagggatggtgacaagtttcttagagctattttggggacaaggggacagaaggggccaggagatgagagtgggaggcccagggctgatgggatcagagtgggtaggagcatggcttctgcaagatggtttctccagggcactgcagggccgcatgggtggactctgtgtgtgtgtgtgtgtgtgtgtgtgtgtgtgtgcgcgcacacctgtgctcatggacactcttgtcctgtccgtaaaatgaggcctcagggtataggaatcaagaggctcttacttcatctgtttc

SEQ ID NO: 28770 - DNA, 1197 bp, Artificial sequence
  DNA replication origin
gtgtgtgtgtgtgtgtgtgtgtgtgcgcgcacacctgtgctcatggacactcttgtcctgtccgtaaaatgaggcctcagggtataggaatcaagaggctcttacttcatctgtttcgtttaggttcagaaaagcaagaagctcaagcccttcattcctgaggctgagcaagaaattccaggcttcttgggtccccaagccccttccctgggcaggagcacacatcctttccccacagtgaggtggcctatggctatggggcacccttccttggggccagatgacagtgctgcctgtcataagcagcctggctcagggccaccctgtcggcaggtcacacgtgctagaccctggcagcagaccgggggcctgtcccagggccaggaactgctggcagatgccgccccagctgcttggtgatcagaggcacgccacaggccctcgggcctctcctcttatcagcactcggctgtgtggcgtggcgggccagtggctgggctagtcagcagtgtggcaggtggtggcatggtggggccagtggtgtggtgggcagtggtgtggcaggatcagtggtgcgatgtgcagtggcatggtagagtcagtggtgcaatgttcagtggtgtggcgggcagtggtggggcaggatcagtggtgtggtggggtcagtggtgtggtgggcagtggtggggcaggatcagtggtgtggtggggtcagtggtgtggtgggcagtggcttagagaggtcagtggtgggtgggaaggccgtgtgtgtgtggtcagcagtgggtgggagggcagagactccgacaagcgctgagtgcactctctctgctctctgcagccggccagaagtggggtcgcctgaggccttctggggtgatgaggcagtgctgggctgggctttgatccgctgtggcatccctgacaaaaaccagggcagaagagagcatgtgagggaagagaatgaaagaccagggcccggagggagaaggaggtgacagctgtgacttgggacacgctatttgagccaggccactcaccaagcactgtacacatactctccattcctctcacaactgccctgccaggtgggggctgtcatttccactttcagctggggaaactgaggcatagtcaggtagactcatttgtacaaagtcacacagtataaaagcagaagaaccaaggctcaaaccc

SEQ ID NO: 28771 - DNA, 722 bp, Artificial sequence
  DNA replication origin
tcctcaccattcagtatgtgctgggcatttgctgcagctaggggctctgctgggccctgggttcacaggcacgagcaaggtaggcaggcccagcagtcacgacattcacaggagggaggcagggatgaatacataaatctgcgaaggagcatggaagtttctagtagtggttctctgctaagacgtaaaacccagggagaggtagagtgaggaggcttttctgagaaggtgatgtttcagctgagatgcagatgccaggaaggagccagccatggaagaatgtagggggagagcagctatgagtgagcagaaccccagagtggagggaacttggtgtttggggaagaacaaaaaggaggccgatgtggcatcaggaatgagagtggggtggtcggcaagtgtgggaccacgcccttaggttgcgtggttctgcccagatggttgggtgggtgactgctggattctgacctctgttttaagaagttaattctggcttctgggagggactgcccatgggcagggaggaagagggcaatgaaaccaggaggtgactgcagggtcgcaggcgagaggagatggtgctggcctagcctgggagcttggggctggggagaggtccatggggctggaggttggagctggtgagaagggggttgagggaacgagagagatcagggatgcatcttagacttttggtttcaggaactaaggatttggcggtg

SEQ ID NO: 28772 - DNA, 714 bp, Artificial sequence
  DNA replication origin
gcagggtggggccctggggaggggctctatgtctggtagaagtggtggtaatggtggtgatgttcatggtggtggtggtgctcatgtctctggaccggctgcccggcctggctctcatacaccaccaaggcgggcagctcccgcaggtgctcccgccccaggacagggccacctgaggccagtggtgcctgcaggccccggcagccctgctggctctccttggctcggtgcttgtgcttcttgtgcccgaggggggctagggaggggaggagggccgggctggcagccaggtgggcggagggggacaccgcagggatggcgggtcccagagggggcttgtttcttgcccctctggccacgtggcccacacccacactcttgccctgggccttgggggacctcacaaagtgcttgctcccgtcctgggtgccccggagccgttgctggagctctgagaccttggcgattggggtgtcaaggaagtggaaggaggccgggtccacgccttggggctttcggtgtgggatgtggatggcttccggctcatgggagcgagatcgagtgggattggaggtgcgggggggcagttctgacttctgggccacggaaggggagcctaggaaccaattcaacagacatttaatgagcacctactgtgtgctggggcttgcgctataccccagacatcacccccgcccccagttctccaaaacc

SEQ ID NO: 28773 - DNA, 1377 bp, Artificial sequence
  DNA replication origin
cctgtggtgtcctttccagacagcagacctcagttaagggcatcccagtccatcagagaagttccaggatcacagaccctcaaaaggggcagtgttgaggattcagtctgttttctgcccagaggccccattaagtatgttgtatcacctcctccccaggctgtttctacataacccagggaagccattcagggaacagctgccttatgaatgaaaatccacccctagacaatgtgctatgccatcccagccagaaaaattgttggcaacttcccttgccaaaaatgcctggtatcacagaatcttatgccattattgctttctggtccagggtcctcccacccttcaaaaggatggcatacaactcccaccgtgtgtgtgtgtgtgtgtgtgtgtgtgtgtgtgtgtgtgtgtgtagaggctgttcttgagggcaataggtgagcttttgttttgctttgtcaggtctacatggtaagggggaagggctagaatactaagatagtattaggataatggatggaaatattttaaagcaattccaaggtggaaggaacagagagaaaagccttggagcagctggagagaactgtcttcaaggaaatggactaagttttgtctagaatgtgtgaggtaaacttcttctccagcttcccacaaagacactggtggggtggacactgctctggacggttttggcagttggttttgtgttttggagatgaagtggccctggcatcaagaggacgtgggacacaagcagaggcttccaaggggtcccaggagcacctctgtccaatacagatggagaaattgaggaccagaggaggggcttgtccaaagtcacccagcgagttagagcccccagtggcttttcccattaaaaatgaaccccaggccaggggtggtggctcacacttgtaaccccagtgttttgggaagctgaggcaggaagatcatttaaggtcagaagttagagaccagcctgggcaacagagagaccctgtctctactaaaaaattaaaaattagcctggtgtggtggtgtgcacctgtaatcccagctacttgggaggctgaggtgggaggattgcttgtgcccaggagtttgaggctgcagtgagacataattgagccactgcacttcagtctgggtgacagagcaagactgtctcaaataacaaaaaagaaaaggaaaaataaaaaaaaagaaccccaaacagcccactgtgagccatggtgaccccaaatctccagcgtccctgcggggtcccaggccggctcagtgcaggtattctcgcacagtgagctccttcagggtgatgcctcggggcgtgggcctccggagctggctctcctccagcctctcctgcagagt

SEQ ID NO: 28774 - DNA, 1202 bp, Artificial sequence
  DNA replication origin
catggtaaacactttctagatgccagttattttcgttatttttaaaaattgacttcacattttttaaaacaaccaaatatgagtttcaaaaggaacatttacattaacatgttaaatggaaaaccggtgtcatttgctccggagaacagaagaatgtaaaataaaatatatttaatggaaacaaaaacaatgctattaaagctaattagatagtttcagagccaagtaatctaggcagtgctagaaaggtactcaaaccctattagtactaaactgagaaataaactccattcaacataaacggaaaaactgaaaggaaaatgaaaaaaaagaaccttaaatgaccagtccactcttacctaacatgtaacctgtcacactctggaaaagttttcctagttttggctgtgtgtgcgtgtgtgtgtgtgtgtgtgttgggaagtgaggcgtgtgttgggaagcgatgtgtgtgttgggaagcgatgtgtgtgtgttgggaagtggggtgtgtgtatattgggaagcatgtttgtgtgtgttgggaagcggtgtgtgtgttgggaagtggtgtgtgtggggtgtggtgtgtgtgtgttgggaagtggtgtgtgtgtggggtgtgtgtatgtgcacgtgtgtgttgggaagcagtgtgtgtggggtgtgtgtgtgttgggaaagcagggagtgtagtgtgtgtttgtgttggaaagtggtgtgtgtgtggggtgtgtgtgtgtgtgcacgtgtgtgttgggaagcggtgtgtgtggggtgtatgtgttgggaaagcagggtgtgtgtgtgttgggaagtggtgtgtgtgtgagtgttgggaagcagggtgtgtgtgttggaagtagggggtgtatgtgtatcgggaagcatgtttgtggtggggggaagcagggcgtgtgtgtgtgtgtatgtgagtgttgggaagcaaggtatgtgtgttgggggaagcgagggctgtgtgtgtattgggaagcatgtttgtgtgtggggggaagcgagggctgtgtgtgtgtattgggaaacatgtttgcgtgtgggggggaagcagggcgtgtgtgtgtgttgcgaagcggtgtgtgtgtggtgtgtgtgtgtgcgcgtgtgtgctgggaagcggtgtgtgtggtgtgtggtgtgtgtgtgtgtgtatgtgtatgtgttgggaagcgggttgttccgaggac

SEQ ID NO: 28775 - DNA, 1258 bp, Artificial sequence
  DNA replication origin
gtgtgtgctgggaagcggtgtgtgtggtgtgtggtgtgtgtgtgtgtgtatgtgtatgtgttgggaagcgggttgttccgaggactccccgattccctcctggttgaaacgtggcccagaaagagaggcacactggctagggcacacagccagggccgtccagccccgcaggaagccccggtcctgccctgtcccaggtaagcctggccagccctggagccggcgctgcggggctgcggggctgcggggctgcggggccacgggacaggagcgggtgctgcggtcccggcagagcaggggcggggtccgggcgggggcggagccgagcgcccgcgcacccggagccgcagcccgagccggagccggagccgggagtcgtggcccggagtgggccttggagtcggcgcgcaggcggctcgcggtgagtgctgtgcccagcgcctgggggtgggctggggggagactgtgggcgccgagggtcccacccccgggacttgaacacttggcttctgagccgtcctggccgcagggcttgggcaagggttgcctcggtttctcctgggggagtcccagaatgtagatgggaagtgagacggaaagggggcatctcgaggttggggaggcccctgggccactcttttgatttccttcctctctgtgggactcagtttccccagcttcaccatgccagtgagtgggtgggtataagtgagagagtctgcctggaggatcctgctgctgctctctgtacctcttatgggaatctcctgcctcctccttctcccttgttgggtgtgagatctaagttcaaatccatcccttcccagacagcccacaccaggacctgcgaggccacatcccccagctgtttgctctcctatgcttctcaggttgatggagcagccatctggtcctgctttcattccaacaaactgaaaagccctccaccccaatccccctggggaggacctcctgaagctgcatgagggctgggggctggacccctgcttctgagtttgctctttctgagcctctcctgccatggccttggtttccccatgggctgtgacctagcctcctccagggtccttgttctacagaggggaaacacctgccctgtcaccctcccctgaccccttagtgaaaaagaccagagtgacatccccaccacctgtacttgcctgtcccgatcactcagccatggggctgctggggcccctgagtttgttggctgctcaaggcccctttgcctcgctgc

SEQ ID NO: 28776 - DNA, 1265 bp, Artificial sequence
  DNA replication origin
ctagaaaggaatggacagcaatgaaataagtaaatacatggcgtagcaggtggcgggaagtactacgagtaaaacaaagctgggaagcaggatggggtgctggggctgggtattgcattgtatatagcacaaccagggaaggcttccccaagaccacgatagctgggcaaagtcataaggaattgaggggtgagccacatgagtatctggggggctgggaggctttggttttcactctgagcatgatgggagcacgggtttggaacagaggagtcacctgctttgacttggggtctggcaggcccatctagctgtggggtggagaatggatcatggggggggtggggtaagggcagaaggagagcccgttgagcggatcattgctgtcattctcgggagagaccatggtgtcttgcccatggcccagaggtggttaaaaaaaagaaaaccagacattcagatttgggatatatttcaaaggccgtgtcgatagggtttggggtgcaagagaaaggtagagtcaaagatgattctgagtgtttggctcgagcttctggaggtttgaagctgccatgaactgaaatgggagttgcttagcggagagatcaagagtttggttttgtgcttgtggagtttgagctgcccattaggcatcaatgatgagtaagcagttgggaaaagttaagggcggaggttggagttgaaaataaaactttgggcatcatcaccatataactggtatttaaagccacaagagcaggtgggctcatctagggatggagtgatatggagaagagaaggggtctaaccattgagtgctggggcccccagtgttaggaaccagccaagaagacagaaagagtgaaaatcagagagttggggtgtcctggaggaaatgaagaaaatgccccaaagaggaaggagggaacaaatatgaccaatgcccctggcagagcaagcaggctgagggctgaggattgagcaatgggaggtcactggtgacagtttcactggagctggatggggaactagagggaatgggaggggatgggaggacttggggacagcagtacaggcaacagacaagggggcctgctgtaaagggagcagataaatgggattggagccaaatgaagaaggggagtgtcaagagagtgctttacttttacaatggagaattagagtgcattgtgcactggtggggggatttgatctcttagggagagaacagtgttagggagggagaatgcaggatagctggggga

SEQ ID NO: 28777 - DNA, 1235 bp, Artificial sequence
  DNA replication origin
gcacgctccccggactcgcagccctcccgggaagcctcgggggatggggaagccccggtgggggggggaaacccgggctgacgtcagcgggctcggcaacccgcgggcccggccggctcgggcccgggcaactaacgggccggcgccgagggcccgatggtcgccgcggcggctccggacgccctgaggccaggcggctgcgccgaggggatccggccgcccgccggccgccagccgcccgctcattcactaacctcgggcggcggggcgtcgcccctcgccccggctccccagcccgcgtcccgggccggccccggctccccacacccaccgccctagtatttacctccgacgcgcggcccccgcgcagccaaacctgctacctgggcccgcccccacctgccccgcctccgaaccgcacagggaagagggagggagcgggggcggagggggcagccgccgcgctagccaatcgtaggccgagctgcgctcctgagcgggccgtgattgggcctccctgtgacagaccttcctccaatggctgccagcccggcgccggccgaagggactttccgctctgtcaagctcggtggaaccaaagggaaagcgaaggggcggggcagagaagagcggcggatggaggcgggaagctcaagctgattgggcgaaaggctgtgggtgccgcgtcaccattggctgatgctggagccggggcggggcgctgcgctgccaccagctccgcctcccgtgctcccgcctcagctgtcaaaactgtagacgcttaggtttgggctgggttaagagtccagatgaaggttgaaataggattccaggatgccgtgagagagcaaagctttagaatcagacctcagtttgaatctttggcgctttcattcagtggctgcgtgacctgaggaagtcacaaccacgctgagcctcaatgtcctcatctgtaaaatggagatcatagtatcggttgtcttacaggattgtggcaaaataccgagctaaagttcctggcacgcagtaccagctcaggaaaggttcatctcttcctcctccgcagattcagcctgggacgcttgctgtttccgaacctctgttgccacctatcccagtttggagggaattttcccaaggatggtgaagaagggatttccacacgccgcctcactcagccccgcacccctggccaccagccaggacttagggtgtagttaaggatctttcaatta

SEQ ID NO: 28778 - DNA, 1105 bp, Artificial sequence
  DNA replication origin
cctgccttgaatgctgacctggcagccacatggacctggcagctatctcaggaaactgggtgaaaaagagccctttcccacccagcctggacttagcatgggcagggacaggcagggaggagggaggcaggaaggagagaaggaaggaaagaagaaaggaaggaaagaggaaggaaggaaggaaggagggaggcagaaagggaagaaaagaagaaggaagggaaggaggaagggaagaaggagcaaaggcagaaaagaaggaaggagtgaaggagggaaggaaggagggaaggaaggagggaaggaaggagagaaggaggggaggaaggagggaaggagggagggatgggggaggaaggagggaataagaaggataggagggagaggagggaaagagggagggaagaagagaagaagggaaggagggagggaggagggaaggagggagggaggaaggagggagaaagggaggggaggaggggagggaggagggaagaagcaaaggaaggagagaaggaatgaagacaaggaagaaggaaggaaaggaaggaagaaagaaacaaaataaaggaacaaagtttccttctccgccccaggatctctgggtatggcagattggattggcctaaatggccacacactttgttccatcctgcggactcttcttacagtgaggccttaccactcctccatcaagtgaaatctctgtgccttccccttgtgcctgagtgggtctttgtgattgcctcaatcaatagagcaaggcagtggtgactttaagtgacttcctaggtctcaggagatgatacagctcccacctggctctctggggaaacttattcttggaacccactggccatgctgtgaggaagcccaggacacatggagagcctcatgggttctagccaacagccaacttaaatcaccagatgtgagaattaagaggtcttcaaggtgactccagccactgcctgtcaaaaattaaatgaggggccccagacaagaaccacctaattgcaccagtcaacctcagagccatgaaagataatgataataaatggtcatttttgttttactccactaaactgaaggtagagtgttatgc

SEQ ID NO: 28779 - DNA, 937 bp, Artificial sequence
  DNA replication origin
ccctgtcaatcaccaaactgctcttccaagtatattttccaggaagaaggaagcccgtggcgggggggtgggtggaaaagggagggtagtggagatgacgggagaaggaagaaagaaaaagcacgacggaatataaggaaggaaagatagagagaatgagagaatgacagctacccaggcagagaggaagaacaggaaacgcagttcctggggaggggtggggggaacaaaaacaacaaaaaacctcgaataaactacaaattcctaacgtttgtaaattttgagtgatagacacaaagcgtttcttaaattcttctctgggctgttctgtatttttacaattcccccctttttaaaaaaaaaagctggggaaactgtcaccaaagtgaatatttttagctaaacaattctgtgaacttagttgcagcaacaatccttccttaattcagtgaattcggttctcggtgatttcaataccaccacgaggcacctctagtgaggcgtagcggggcaagggtcggggagtaggtgaggagggggtgcgcgcccgtcagctgccttcacctcaaccctgttgctttgtaaatgtaaatccagttctgttctgcgggccgagcccaaaggctgagtgtatttttcacactgggaggagaagcagggcagagggcgatttcttattttggaaatggatggaaaggggaatgaatgggcaggtaataatcaatagattagaaagatagtcaatcaataaatggataggcagggacaaaaggagacacagagagagaaaaagagagagagagagagagaggagggggttggagagaaagagacggagagacagagagaccctctgaccttttcctaaactcttctgatggctccggaaagagaagtgacttttgctccccttaactcactttcagaaaccgctgga

SEQ ID NO: 28780 - DNA, 1026 bp, Artificial sequence
  DNA replication origin
cccccgcgccccctacctcaccgccgccgcggccccgattgcttcttccactcggcgtaattttttttttctttttaattttcaatgtgcctttgctgggctttcccccgctgccccggggaaagcgagcacatctcccggcaggatctttccggagttgttgggtcctcccgggggaaggagggcgggcatgccggcctggcttctccgtccctgcttttccggggatcccagccgcggccaagacccgggagccccatgaggcgtgggtgcgggtggaggtcgccccggcctgaccgcacggggcccctagcgctcccggcgccggccccagggcacccggcccggcctccgccgcccggccttgctgccagcggtaaggaagtttacttcgggcgctgggctgaactccgagcgtgggggagttcgctgcgcccccctgcccccacgcacactccccctcggcctgcgaggcagaaccgggtgtctttggaggttcagagctgcaagaagatggggactggtgtcggggcgccagcgcctgacccgctggggttgcggccggggtggagagtgctgctggccgccagttgttccggagacggtgcaaacggacggggaaagtgtcggggtctggctcgcaaaatttatctccgcatctcttcccacaacacttgcaccctctgccccccaaaatctttctggtcggtatgcgccctctgcggatcgtggtgctccctacttccaggggggtcagggaagaagtcatagaatagttttccaggtttgcgggtggccagccagagtggaatcccccctgaaacaggggcacttgttttctccgatggaggcgacaactgtgggtcccgaaggggctgaacaagtccagaacaaagtttgtgtgtgggggctatggcagagagtggaagagatccgggcagggagttggggtacaaagggaggacacctggaatccctccttgctcctaaaggtgtttcacggtaccggcctcaaagctcccaggc

SEQ ID NO: 28781 - DNA, 882 bp, Artificial sequence
  DNA replication origin
tttgcgagccagaccccgacactttccccgtccgtttgcaccgtctccggaacaactggcggccagcagcactctccaccccggccgcaaccccagcgggtcaggcgctggcgccccgacaccagtccccatcttcttgcagctctgaacctccaaagacacccggttctgcctcgcaggccgagggggagtgtgcgtgggggcaggggggcgcagcgaactcccccacgctcggagttcagcccagcgcccgaagtaaacttccttaccgctggcagcaaggccgggcggcggaggccgggccgggtgccctggggccggcgccgggagcgctaggggccccgtgcggtcaggccggggcgacctccacccgcacccacgcctcatggggctcccgggtcttggccgcggctgggatccccggaaaagcagggacggagaagccaggccggcatgcccgccctccttcccccgggaggacccaacaactccggaaagatcctgccgggagatgtgctcgctttccccggggcagcgggggaaagcccagcaaaggcacattgaaaattaaaaagaaaaaaaaaattacgccgagtggaagaagcaatcggggccgcggcggcggtgaggtagggggcgcgggggccagccgcgtgtgagtgggtccgagtgtgcgtgagtgtgagtgcgtgtgtgtgtgtccacggcgcgggccggagcactcaccatctcgccgggggagcgaggccacttcggggtcggattggaaatgttgaggcttcgcttgcttcctccgcgacatgctggctcaaacatcagctggggcagaataaaaaattactaaaaaaaaatcttctcaaaattacggaaatcgagcggcgg

SEQ ID NO: 28782 - DNA, 1095 bp, Artificial sequence
  DNA replication origin
cgtttcgatctgcgcttggcgtcccccgctaatttcttgtttgttttctttccctcggtggccccgggaaaggagatgggaggtggaggagggggggatgggaggagggggatggtcggaatggcggggagaggagaattggtctttattgttgatggcaatacatcaattacgggccattgtctcggtcccaagttccgtggttcgctggtgcgggcgctgcagtgtcagggcgctggcgaggctccgcgtgccgcgatgcaaagaaatacatcaataaaaacagaagcagagtgggggttattctttatttttgtgcgggtcgaaagtaggcggcgagcgggagtgaggtgccactcctggagtccctccacgcgccctgctcaccccagagacctgcgcgctctacgtgcggtagcaccctcctaactctgggtggaggtggggtgggggggggactactggggaatccgggtagcgaagtttggacttgcaggttccgccagagggcctggtacttaggggctgatccgcaatagcgaatggggatagcccgaagtgaggcggcagctgcgccggggtcgcgacctcactggcggagaggaaccgcacccgggggaggcgcttggcgagttttgcaaactcccatcttgggggattgatgctcgttcctactaatacgtccccttagttttcccaagtcctagagtatccttggtgggttggcggggccgaaggtctgtgccccaaggccgcaggccacaactggggtcccagccatgaggtttccaggcttctttgctcaacctctggtcctacgaagggcaacgtggggggcgtcaaggctcgcgcattctgaggcctggttcttctaccctcaaaagtatcttattctggcccgatctgacctcgggtctgggatggggcctgggatgaggccttgcctgggccccagaccctcttttccgttccgttgacggtgcttggccaccctaccccagaaatggaggacgtctccaagtgctctccctgcacccctgtttcctcagtccccagctcaaggccccgctggcccccggccgaggctagaagggc

SEQ ID NO: 28783 - DNA, 799 bp, Artificial sequence
  DNA replication origin
aatacgtccccttagttttcccaagtcctagagtatccttggtgggttggcggggccgaaggtctgtgccccaaggccgcaggccacaactggggtcccagccatgaggtttccaggcttctttgctcaacctctggtcctacgaagggcaacgtggggggcgtcaaggctcgcgcattctgaggcctggttcttctaccctcaaaagtatcttattctggcccgatctgacctcgggtctgggatggggcctgggatgaggccttgcctgggccccagaccctcttttccgttccgttgacggtgcttggccaccctaccccagaaatggaggacgtctccaagtgctctccctgcacccctgtttcctcagtccccagctcaaggccccgctggcccccggccgaggctagaagggcagtagtggaggtttcgttttcttaagcaaggcaaaaagcggcgaaaaggcggcagcggcgccccgggggcgggggacgaggcacatcgatggtatcaacattattgatggggaaaagttcggggcaggagcccggagatcaggttcccagtccctcccctgcccggaggtgggtgggacagagcgggtggccagctgtgtgtgtgtgtgcatgtgtgtgtgttggtgggggggtgttcctgaatgcacccgcattaaccacctggggtttatttgtattttccttgtctgaaagtttgcgggggcagagggaaaaggaagggttgaggtggcttgtaccctctagcccttagggctcttaactagggttggggttggggt

SEQ ID NO: 28784 - DNA, 1178 bp, Artificial sequence
  DNA replication origin
cgtggtagtggtgaagatggagttggtggtgatggagatggtgatggtggtggaggtgatggtgatggtgatggtggtggtggtgatggtggtgatggtggtgctggtggtagaggtggtgatgatggtggagatggtggtggtggtaaagatggtgatagagatagttggtagtgatggtggcagtagtggtagtggtattggaggtggtggtgatggtgatgatagtggtgggtgaggtgaagatgatggtggagatggtggtagagatggtgatgatagtggtggatgtggtggtgatggtggtggtgatgtggtggagatggtaatgaagatggtggtggtggtagtggtggtggaggtgaagatggtggtagagatggtgatgaagatgatggtggtggtgaatgttgtgaggtgaagattgtggtggagatggtggtgatggtggaggtggtgggatggtggtggaggtgatggtgatggtggtggaaatggtggtgatggtggaggtggtgggatggtggtggaggtggaggtggtggtgatggcagtgctggtgttggaggtggtaatgattgtggtggaggtggtggtgatggtggtggagatgataatggagatggtggtggcagcggtggtggtggtgttggaagtgaaaatggttgtggagatgaggtggtggtgatggtggtgaaggtggtaatggagatgctggcagtagtggtggtggaggcaaagacggtggtaaagatggtggtggtgatgcgggtagtggtggaagtggtagaggtgaagacagtcatggaaatggtggtggtggttgaggtggtggtggtggcagtggaaatggtgatggaggtggtggaggtaaagatggtggtggagatgttgatgaaaattgtggtggtggaggtggagttggtagaagtagagatggtggtggaggtgatgggggtgatggtggtgatggtgatgaacaaggaggaggtggtgatttgctggcagcttaacagagaagatcctctctttgaacctttcagtctgagacaaagttccccaggtggacttgagctaaaggagaacattcagggcagaataataatattggtagtgggatcatgggtaatttttcttttttttccttttggctgggtggcaatagagcagagacagag

SEQ ID NO: 28785 - DNA, 1168 bp, Artificial sequence
  DNA replication origin
catctgccccattagaatgtgagcacctttaaaacaggaatctcgttgaacatcctatcagttaggacagtgcttggtcttagaaaatgctcaactgatatttgagtaaggaaggaaggaagggagggaggaaggaaggaaggaaggaaggaaggaaggaaggaaggaaggaaggaaggaaggaaaggaaaggaaggaagggagggaaggaggcaaagaaggaaggaaggagggagagagggaaagaaggaaggaaggaagggagggaggaagggaaggagggaaggaaggaagggaggaaggaaggaaaggaaggaaagaaggaaggaaggaagggagggaggaagggaggaaggaaggaaaagaaaggaaggaaggaagagaggaaaggaggaaggaaaggaaagaaagaaagaagaaaggaaggaaggaaggaaagaaagaagaagggagggagggagggaaggaaggaaggaaggaagggagggaggaaggaagggagggaggaaaaaaagcaaggctggagaaaaaataaggagagcagaaagtaattcattatcattccctgaaccagccttagaggcttagttagaggctcctgaaatctgggttctagaggttggaggggttaagtagcaagttagctttggatcccacatctagggttttctaccctcggttactgtgtcaaaatattttcatggggccacaacgtggccagaatcactgaatgctaactaagcactagctcaggactaaatgtttgtttgtttgtttgtttgttttggaaacagggtcttgctctgtcacccgggctgtagtgacagtagtgtggtcattcatatctccttgcagcctcaaactcctgggctccagtgatcctctcacctcagcctcctgagtagctgggaccacagacataggccactgcacccagctagtcaatggatttcacagtgcattgtggatgttgttgtggtcattttgcttttcatcctggaggtcagagataaattggtgacactgattctgaatgggaaatgaaggagggttcccagaaaaagggaagtagaggagtagttttaccagccacagttctgcaccggtgatttttgggcgaactgtttcctctctgtgcctggaatcctatcttcaaaattaaggggat

SEQ ID NO: 28786 - DNA, 1207 bp, Artificial sequence
  DNA replication origin
acttcagcactagagttgggaacgcagtataaacaaatagaaaggaacacgagcctccatcagccacggggcacagcaaactgttcctcactctagatgcaattcctcctcttcctgttatttattcattagttttgtttagcacctttctttcagcaggctccttatttcctcctgttatccaagcaatcacaaacaaactacgatttgaaagaaaaagagagggaggagggaggagcaggaggaaggggaaagaaaaccacattcaaaaggcacaggccattcagagcccggctgtttctctgaatctcgccctcagggtgatgttttcgacaaattcggcgctgggggcttcagggaggacagaggacaccggatggtgggggggaattccgcgcggcccgggtaccagggctgcgactctcgcccgcctcgctgctccgagcgacgcccgctgcccttctgaggtccacctcgccacctggaacgctcggtcctcgaagttggcgcagggggaggtggagaaggtggagtgaccccagggtgtggtgtggaggtctccaatcccgatctccccgaaatgcaaaacttagcccccccaaaaaaatgagaggaaagaagccacttactctaagcggggaggggcgggcaccccggttccgaggtccaaagtgccctaacgaaagggcagcaaaggccacctgcggggtcccaccacttccccccactcccctgtccaggcatactcaaaagtttgttcctttccgtccgtaagcggccccgaggccggctctggagtaggtgggggaggtaagaaggactgggggtgggggagggcaagatcatcggaccaggagatcagggacccctgcgtagcccccactcagtccaggggggctgcgatcgtgtttactaataacagcaacaaacaatcacacgccagcccttctttcagtcctcgggctctcttcgctttttgggggcagcaaaggagagtctggcggggaggtgggagggagcggaggggctgaggagagcgccggctgggggacaaaaagcggcgtgggatggggcagaaagagaagcggggagagctggacagagacgaaggctcaaaggtagaagagacatgggaggaaagaggccaaagaaaagtgcagcaggcggtgagcccgagcgcggggcgcgcccaggatggggaggtggc

SEQ ID NO: 28787 - DNA, 1431 bp, Artificial sequence
  DNA replication origin
tgcgagacaacaggtggccactgcaacctccagctctgattggtggaaaggccacaggcgcccagtggcccagagaaagggcctccacttctgcgtttcaagaacttgctcaatggggtgttgtcctgataatatctcagctcactgtcaatttgtgcaacctgctgggccattagggagcaccgctgggttgtcaacgttaaatggagactagggaggggaaaccaaagctttttcgggagggtggggatcagagtcaacccagggacaacgtgggcagttgtttcttttctcaacacacactgctctctcatgcagtagtctcctgacccaagtttttgctaagagaagagcaaatacacaaactttcacctaattgaagtttatttttttctgctccgttccagaaagataatattgagtgaaggtacacacacaggtgtcacaagcccgatctactctggagaacagaagaaatgaaaagaaaacccatgtcatgcttgtctgaaaaagctcaggccctgggccagcaaggtgtgaccaggggatgaaactgttagcgagtgtcataggaaatatttcagaatgtcgccactctggttaaagtagctggcagataactaaactggggagggcgcagatctcacggcctctccacaacgttcccatttagtataaagccccttcccttcgccaaggctgaaggccaaactctcagattaactcaaagcaataaagccgatgagaaaaaaaattaaataaaaagatggagcttaagaaagataaagaaataaagaggggtgggtgagtgtagagtggggaagttaatcagctaggaccttttaggaaaatagggacattttctctcccagagcagtgaatgatctgcctagatccagttactcaaatgcctttcgaatacaaacaagagcaaagagaatacgaagagaaccgacacgaggcttcacctgggaagcttcaagtctgcctacctgtgaaaggtcaggccccaacaccccttctgggaaatcctacaggtgaacttggggtcccggctcccggctaccgggagacactcgtgcaggttggcgtctgggttaggtgtgtccacgcaggggacattcgaaaggcaaggcggggtcgaggagaggggcccggggacaggcacccatgaagaaggaagggggtcatggggaggaaagcgacaggaagggagcagacggcttggggatgctggggcccggggaagctgtggtcgcgcaggaggagggtgggacacacgggacgcagggctggcgtccgcttcggccgaggaaaggaggggagagaggagcgctccgaggcagtggggacaaagaggaccggagcgggaaggggggcgaggtagggagaagaggggccccggagagggggcggccgcggcgggggtga

SEQ ID NO: 28788 - DNA, 1059 bp, Artificial sequence
  DNA replication origin
gatggctcacgcctgtactcccagcactttggaaggccatggttggtagatcacttgaggtcaggagttcaagactagcctggccaacaatagtgaaatcctgtctctactaaaaatacagtaattagccaggagtggtggcgggcactgcgctacagcctgggcaacagagtgagactctttctcgaaaaggagaggagaggagaggagaggagaggagaggagaggagaagagaggtgaggggaggagaggagagaggagggaaagggagaggaagggagaggaggggaagggagaggaggggagaggaggggaagggagaggaggggagaggaggggataggaggggagaggaggggagaggaggggaaaggagaggaggggagaggaggggaagggagaggaggggagaggaggggaagggagaggaggggaagggagaggaggggaagggagaggaggggaagggagaggaggggaggggaggggaaggaaggggagaggtggggagaggagggcagtggaggagaagaggagaggagagaagagagaaaaggaaaaggaaaagtaaagaatgagtgagtggataagaatggatgagtgaaccacagagcttccactgcacaacactatctccactagacacctgggccatatgagctgcattgatttcagttccatctcaccttggaataagcaaatcaggagaactggtggtttcagagtcactctcaattcctccctgcccctcaccctccctataaatgcaatgacctagatacatcagtaattttatttattaggttttggagacccaaacctttctgtggtctgctaatagtaaaaatcagcttggaacatagacagcaaatagcagggaaacaatgccaacagtgcccagctcctgttgatgcctcccctccatgtctcacaagatgtataggagtggtcgcagaggagttccacatccattgtctagttgggccctctgtcatccctcacctaaactgtgtcaatagcttcctaactggcttgctccaatatgatcctcctcaact

SEQ ID NO: 28789 - DNA, 1400 bp, Artificial sequence
  DNA replication origin
atttcaaccctctagcatctgagctatctgcatccagctttcaaaaatatttcgctgtttactaacatgtctgtcagcctctcttttctcccccgcatgtgttttgtttttaaatccactcaaaagcgttttcatttgaaatcaaatagacatgtttgcaaataaatgttgacacaacacatttgaaagacagaattggggatctgagattaagagtatcagcagagaagagtgggtgtaattctgtggaacaggagtgagaacagaggcgagggagccgttgctttgtgccaggcgccatgctgaggactttccatagacggtttaatgccacccaactactcccattttatagatgaggaaatggaggaaataaagtcacttgcctgagtttgggcagccaggaaggagcagaacccacagttgagccccagcagtttggcttgggaaacgcatgtagagtgcttcttaaagcagagagcctttctcatgattaaactgaaatactagtccctttatagcctgtgcatagtgaggaccatttttctttattcactgagacctacctgcctattgagaagtatgtaaccggtcagcttggagttgccccactgcaggttgggtgatgcattgagggactttttatttttactctggtggtgggggacggggagggaggaagagacggagagggaagtgggagaagggagggagggaagggaggaaagatgaagaaagggaggagggagaggaggggggaagggagagaaagaggaaagaggtagggagagggagaagaggagggaggagagagggcaagaagaaaaaggaggaggggaaacagaggaagagagggaggagggaaagaaggagagggagagaaagggaagaggtagggagatgaaagagcggggagaggcagaatgggagagggagagaaggagaggggagacggagggaggaagggagagaaaggagaggggtgagggaaaaggggtagggaggagggaggaagagaaaaatggggagagggtgggcgagaaggaaaggaagaaatcgaggaagttggaggaatgagggatgaggcagggagggagaaagggagggcgaagcagtaaggtgctgcaaaggacccttctttttggccataaaaacctgagaaactgattgagattcttttgagcaataaggcaactgcggtgaggaaaaaataaggaaggaggcacaaaaagcaaagcagttcagcctgaaattgactacagagcttccctttgcttcagcagagcctggaggagcaggagggatgggggccctgtcagctggcccaaagccctgccctgtcccaggggtgctaagcttgctgcaggccaggaaacaggcctgggcttgcagctggggat

SEQ ID NO: 28790 - DNA, 1257 bp, Artificial sequence
  DNA replication origin
aacacacccaacgatctaatgcaaagcgattgagctcgttgtgagataagtagaggatttattaaaaatatctatatttagggccaggcaccgtagctcacgcctgtaatcccagcactttggaaggctgaggcaagaggatcgcttgaggtcaggagtttgagaccagcctagccaacatggcaaaacccagtctctacaaaaaatacaaaaattagccgggcgtggtggcaggagcctgtaatcccaactactccaaggctgaggtgggagaatcccttgaacccggaaggaggaggttgcagtgagctgagatcgcaccactgcactccagcctgggtgacagagtgagactctgcctcaaaatcaatcaatcaatcaatcaatcaatctatgtttagggcgccaagggcagacattcctggtgatggatataagcattacagagttctatgggaacgtcttcacgttttcttgtaatcctggcagtttatctctgtggcaacatttggagataatgccttcagtggaaatttcaggtgatttgtgaaagttaggcctgcaatcctcctttccccctccccccggcccccactctgctcccccaggacgctctgtcattgttctagcccagtgtgagtttgtgtgtgagtgtgtgcctatttaacctttggactctctgtactggtgtaatctggtcaaagtgaatatcaagggcagaggaggacaaggaggagcaggaggagaaggaggatgaggagcaggaggaggagcaggaggaggaggagcaggagaaaggaggagaagcaggagcaggaggaagaggagcaggagaagaaggagcagaaggaggaggagcaggaggaggagaaggaggaggagcaggtggaggaggaggagcaggaggaggagaagcaggaggagcagaaggagaggaggagcaggaagaggaggagaaagagcaggaggaagaagaggaggagaagcaggaggaggaggaggaagagcaggaggaggaggaagagcaggaggaggagcaggaggaggaggagaaggagcaggaggaagaggaggagaagcaggagcagggggaggaggaggaggcagagcaggaggaggagcaggaggaggaggaggaggtgtcatctgtggacaatacctggaagggcaaggggtggtgggtgtcactaaaaggaaccagccccagctacttcactgcaggctggtgccctggtgaaggtgaatcagtcagaggag

SEQ ID NO: 28791 - DNA, 2028 bp, Artificial sequence
  DNA replication origin
gcgcgctatttgcatatttgtgcccgcgccgctgattggcccgggcgcggaggggcggtcgtgaccgccgccgctcctgccgcggctccagccgcgtcgggctgcctaagagggagcgtccccttcgccgctccccttccctcctggcgcggcccgacccagggcggagggcggtgcgaggcggggtcgttgctccgctccaacatggccccgccgcgccgccgacccaatcgctggcgcggttactcccggagccctgggcggcctcggggcggggaaggcttggggccgggcgccctctggccggagcgcggggcagtgcagtggtccgggctcccccggcagccccgccgcggccgccacgtcaggccgcgccctcacggcggcctctcccctcgcgccgcccgccccgcggccccgccgccacgtcaggccccggcagggcacgccccagccgcgagctgaccagtggcggggtcggcgcagaggtcactcacatgcagggcatctctcgggcagctcgggtccgccgaggaagggcgagagtttccaaagacgtccttcttaaggagccgtggatttagtcccacgttctcctttcgcgcggagacccgggtgtcacgcgcccgtgctgtagaatcgggagcacggagcgtgtcgcgatgatgctgcgattgagcccaggtgccagcacctgcagtagccggcgcccgccgcggagacccagctccacgccgcgagctaggggagagcgcgcacctagcctgcggttgcaaccctgtcttcccgaggctcaggctcccgttctccattgcacagttacgaagggagagaaaaataaacgcaagaatttaagaagagagagagacagccgtgggggagggtgatactggtttaggagcagggggcgtactggaaaacctgggttccctctcgatccttcacgaattaactgagtgacctacatcaaatcctagcgtgtcctagggccttggttttgccttctgtaaaaggaagaggctgcacaagttgtccaaaagtcctccagctctaaaattctaagggtctcctcctttcaggtccttagctggctttctaccgaattaaaaatttaaaacccatatgaaaacgtgagctagacaaaagaattaaatgtttgaacttcggtcggcctactttatgtttgttcaaaactgttgaccatttccgatccagtgcaggtgatatttcacgttcacagttgacagaaatctcttgaatttcagcctccgctaaggagcgacactgcgcttgtttatgcctagccagaatggaatggctgcggtatacacagtggtatttgccaagtaatttcattctttatattccccatgaaggccctccagagtggatcagcataactctatttagctgagatactgacagggctgggaagaaaccctgctgaaagggcggttacagttccaactttgattccctgaaggatacttataacaaccacatattagaccaagaatgcacagaaagagtttatctctggggccccccacaccacttatttggatagtgctttagtttgcaaattcaacttgttgagtcaaatttaaggccagtaacatctcatctatctgacatcacagcagaatgacatcccacttaaatgaaaaacttgagcggcctccccatcatctgatagagaacgttcgtgttttcttgaatgcagccctctgaaaattacttaggcttggtcattaaagagcagtgctataattatcaacattattgtatgccattttaatcagtgaatgttctctaaaatatgcaaaatttgtccctataataaatggcctctaggatgctggtttttgtgtttttgttttgttttgaacttctgtttttgctatctccttcctcactactgggctgacacttctctattcttctacctaacaaccttctttcctacttttttgatgcgtctatgccattatgaacttggacatcgataaacttttattagcttagact

SEQ ID NO: 28792 - DNA, 1506 bp, Artificial sequence
  DNA replication origin
cctcccgcctgtcattataccttccataagcccctacttttgtcccagcacttttccctctgtcagtttacatatcccaccaagcaaaacaaaaatagcaaaacagtaatgccttctgaatcctcaaattgctcaatcctcagattgctcctcaatctggaaaatgttttatatcaagcccatttataaatcaaggattggcaatttaaaaaattaaaataaagaaaggagaattggaaataaaatgaattggctgggcacggtggctcacgcctgtaatcccagaactttgggaggccgaggtgggtggatcacttgaggtcaggagttcgagaccagcctggccaacatggtgaaaccctgcctgtactgaaaatacaaaaattagctgggtgcggtggcgcacacctgtaatcccagatactcaggaggctgaggcaggagaatcgcttgaacccaggaggcggaggttgcagtgagccgagatcgtgccactacactccagcctgggcaacagagccagactctgtctcaaaaaaaaaaaaaaagtttaattcacgcagagccagctgaacggcagacaggagtttggttattcaaatcagcctaccagaaaattcggagactggggtttttaaagaatgacttggcgggtagggggccagggattggcgaatgctaatttgtcaggtgggaggtgaaatcacagggggttgaagtgggctcttgctgtcttctgttactgagtggaattgcagaacttgttgagccagattatggtctgagtggcgccagctagtgcatcggaatgcgcggtctgaaaagtatctccagcaccaatcttaggttttacaatagtgatgttatccctgagagcaattggggaggtcaggaatcttatagcctctggctgcaagcctcctaaatcataatttctaatcttgtggctaatttgttagttctacaaaggcagactgatccccaggcaagaatggggtttgtttttggaaaggactgttacaatctttgtttcaaagtgaaattagaaattaaattcctcctgtagttagttaggtcttcgcccaggaatgaacaagggcagctcggaagtgagaagcgtggagtcatttaggtcagatcccttgcactgtcataactttctcactgttaggatttttgcaaaggcagtttcgtgaacgtacagagacaggcccttgctattatccctattttttagataaggatatccaggcgatgaggaagttttacttctgggaacagcctggatacgaaaccttcacacgtcagtgtcttttggacattttctcgtcagtacagccctgttgaatgttctcacggtggggaggtacgtgtttaaaatgcggggaaggtgcttttatttcacccctggtgaaactaggggagctaatttttttaaacatgatttttggcccccttgaaccgccggcctggactacgtttcccagcagcccgtgctcaagacta

SEQ ID NO: 28793 - DNA, 1282 bp, Artificial sequence
  DNA replication origin
tctcccatgtccacctctttctacacagacacggcaaccatccgatttctcaatcttttccccacctttcctccctttctattccacaaaactgccattgtcatcatggcccgctctgaatgagctgttgggtacacctcccagacggggtggtggccgggcagaggggctcctcacttcccagtaggggcggctggccgggaggggggctgacccccccacctccctcccggacggggcggctggctgggcggggggctgacccccccacctccctcccggacggggtggctggccgggcggggggctgaccccctcacctccctcccggacggggcggctggccgggcggggggctgacccccccacctccctcccggacggggtggctgctgggcagagatgctcctcacttcccagacggggtggctgccgggcggagaggctcctcacttctcagacggggcggctgccgggcagaggggctcctcacttctcagacggggcggctgctgggcagaggggctcctcacttctcagacggggcggttgccaggcggagggtctcctcacttctcagacggggcggccgggcagagacgctcctcacctcccagacggggtcgcggccgggtagaggcgctcctcacatcccagacggggcggtggggcagaggcgctccccacatctcagacgatgggcagccgggcagagacgttcctcacttcctagatgggatggcggccgggaagaggcgctcctcacttcctagatgggatggcggccaggcagagatgctcctcactttccagactgggcagccaggcagaggggctcctcacgtcccagacgatgggcggccaggcagagacgctcctcacttcccagacggggtggcggccgggcagaggctgcaatctcggcactttgggaggccaaggcaggcggctgggaggtggaggttgtagcgagccgagatcacgcctctgcactccagcctgggcaccattgagcactgagtaaaccagactccgtctgcaatcccggcacctcgggaggccgaggctggcagatcactcgcggttaggagctggagaccagctcggccaacacagcgaaaccccgtctccaccaaaaaaatacgaaaaccagtcaggtgtggcggcacgcgcctgcaatcacaggcactcggcaggctgaggcaggagaatcaggcagggaggttgcagtgagccgagatggcagcagtacagtgcagcttctgctcggcatcagagggag

SEQ ID NO: 28794 - DNA, 835 bp, Artificial sequence
  DNA replication origin
cctggcaaccgccccgtctgagaagtgaggagcccctctgcccagcagccgccccgtctgagaagtgaggagcccctctgcccggcagccgccccgtctgagaagtgaggagcctctccgcccggcagccaccccgtctgggaagtgaggagcatctctgcccagcagccaccccgtccgggagggaggtgggggggtcagccccccgcccggccagccgccccgtccgggagggaggtgagggggtcagccccccgcccggccagccaccccgtccgggagggaggtgggggggtcagccccccgcccagccagccgccccgtccgggagggaggtgggggggtcagcccccctcccggccagccgcccctactgggaagtgaggagcccctctgcccggccaccaccccgtctgggaggtgtacccaacagctcattcagagcgggccatgatgacaatggcagttttgtggaatagaaagggaggaaaggtggggaaaagattgagaaatcggatggttgccgtgtctgtgtagaaagaggtggacatgggagacttttcgttttgttctgtagtaggaaaaattcttatcctgttgatctgtgaccttgcccccaaccctgtgctctctgaaacatgtgctctgtccactcagggttaaatggattaagggtggtgcaagatgtgctttgttaaacagatgcttgaaggcagcatgctcgttaagagtcatcaccactccctaatctcgagtacccagggacacaaacactgcggaaggccgcagggtcctctgcctaggaaaaccagagacctttgttcacttgtttatc

SEQ ID NO: 28795 - DNA, 1317 bp, Artificial sequence
  DNA replication origin
cagcctctgcccggccgccaccccgtctaggaagtgaggagcgtctctgcctggccacccattgtctgggaagtgaggagcccctctgcccggcagcccagtctgggaagtgaggagcgtctctgccagccgcccatcgtctgggatgtggggagcgcctccgcggctgccccatctgggtggtggggagcgcctccgcccggccgccaccccgtctgggaactggggggggcgcctcagcctggcggccgccccgtctggggggtggggtggggggtgcctccacccggcagccgccccatctgggggctggggggggcgcgcctccgcccagcggccgccccgtctagggggtgaggggggggcgcctccgcccggcagccaccccgtcttgggggtgggggggcccctctgcccagccgccatgtctgggaagtgaggagcccctctgcccagccgccaccccgtctgggacgtgtacccaacggctcattgagaacgggccatgatgaggatggcggttttgtcgaatagaaaagggggaaatgtggggaaaagaaagagagatcagattgttactgtgtctgtgcagaaagaagaagacataggagactccattttgttctgtactaagaaaaattcttctgccttgggatgctgttaatctataacctcacccccaaccccgtgctctctgaaacatgtgctgtgtcaactcagggttaaatggattaagggcggtgcaagatgtgctttgttaaacagatgcttgaaggcagcatgctcgttaagagtcatcaccactccctaatctcaagtacccagggacacaaacactgcggaaggctgcagggtcctctgcctaggaaaaccagagacctttgttcacgggtttatctgctgaccttctctccactattgtcctatgaccctgtcaaatccccctctccgagaaacaaccaagaatgatcaataaatactaaaaaaaaaaaaaaaaaaaaaaagaaaatgggaaaaagtctcaatcaggtgaattggaagatgtcctaaataatatactgattcaaatgacagtaattgaagcaaaggcttttaaagagatgaataataattgttcagaattactagagcaacatgaccggtcattcctctgcaggctaccagcatcctttgatacaggaaattggccagacagcacaggctttagacttttcctgttttgtttcccctctacgtgtatgaatttttgttaccaggtaagatgcttcttctcagttctttttttcttgttcaccaattaccctattagcatcctca

SEQ ID NO: 28796 - DNA, 1330 bp, Artificial sequence
  DNA replication origin
ccccacctccctcccgacggggcggctggccgggcagaggggctcctcacttcccagtaggggcggccgggcagaggcgcccctcacctcctggacgaggcggctggccgggcggggggctgacccctccacctccctcccagacggggcggctggccgggcgggaggctgaccccccaacctccctcctggacggggcggctggccgggcagagaggcccctcacttcccagtaggagtggccgggcagaggcgcccctcatctcccagacaggacggctggccgggcggggggctgaccccccacctccctcccggacggggtggctggccgggcggggggctgacccccccacctccctcccggacggggcggctggcctggcgggggctgaccccccacctccctcccggacgggtcggctgccgggcggagaggctcctcacttcccagacggggtggctgccgggcggaggggctcctcacttctcagacggggcggctgccgggcggaggggctcctcacttctcagacggggcggttgccgggcggagggtctcctcccttctcagatggggtggctgggcagagatgctcctcacctcccagacagggttgcggccgggcagaggcactcctcacatcccagacggggcggcagggcaaaggcgctccccacatctcagacgatgggcggccgggcagagacgctcctcacttcctagatgggatggcggccgggaagaggcgctcctcacttcctagatgggatggcggccgggcagagacgctcctcactttccagactgggcagccaggcagaggggctcttcacatcccagacgatgggcggccaggcagagacgctcctcacttcctagacggggtggcggccgggcagaggctgcactctgggcactttgggaggccaaggcaggcggctgggaggtggaggttgtagcgagccgagatcacgccactgcactccagcctgggcaccattgagcactgagtgaaccagacaccgtctgcaatcccggcacctccagaggccgaggctggtggatcactcgcggtcaggagctggagaccagcccggccaacacagcgaaaccccgtctccaccaaaaaaatacgaaaaccagccaggcgtggcggcgtgcgcctgcaatcgcaggcactcggcaggctgaggcaggagaatcaggcagggaggttgcagtgagccgagatggcagcagcacagtccagcttcggcttggcatcagagggagaccgtggaaagagagggagagggagagggagaccgtggggagagggagaccgtg

SEQ ID NO: 28797 - DNA, 921 bp, Artificial sequence
  DNA replication origin
gtcctgtctgggagatgaggggcgcctctgcccggccactcctactgggaagtgaggggcctctctgcccggccagccgccccgtccaggagggaggttggggggtcagcctcccgcccggccagccgccccgtctgggagggaggtggaggggtcagccccccgcccggccagccgcctcgtccaggaggtgaggggcgcctctgcccggccgcccctactgggaagtgaggagcccctctgcccggccagccgccccgtcgggagggaggtgggggggtcagccccccgcccggccagccgcaccgcccgggagggaggtgggggggtcagcaccccgcccggccagccgccccgtctgggagggaggtgggggggtcagccccccacccggccagccgcctcgtccgggaggtgaggggcgcctctgcccggccgcccctactgggaagtgaggacccctctgcccagccaccaccccgtctgggaggtgtgcccaacagctcattgagaatgggccatgatgacaatggtggttttgtggaatagaaagcggggaaaggtggggaaaagattgagaaatcggatggttgccgtgtctgtgtggaaagaagtagacatgggagacttttcattttgttctgtactaagaaaaattcttctgccttgggatcctgttgatctgtgaccttaccccgcaaccctgtgctctctgaaacatgtgctgtgtccactcagggttaaatggattaagggcagtgcaagatgtgctttgttaaacagatgcttgaaggcagcatgctcgttaagagtcatcaccactccctaatctcaagtacccagggacacaaacactgaggaaggcctcagggtcctctgcctaggaaaaccagagacctttgttcacttgtttatctgctg

SEQ ID NO: 28798 - DNA, 958 bp, Artificial sequence
  DNA replication origin
gatttcttgagcccaggagttcgagaccagcctgggcaacatagtgaaaccccagctctaccaaaaatacaaaaaacaaaaaaaattagcggggcatagtggcacacacctacagtcccagctactcaggaggctgaggtaggagggtcacctgagcctggggagattgaggctgcagtgacctgtgattgagccacagcactccagcctgggtgacagagcaagactctgtcaaaaaaaaaaaaaaaagaaaaaaaagaaaagaaaagaaagcaaatagaccaccaaacaagataattataaatggtgataagtgcctctaatgcactaaaatagagagttggaggagggggggttggcaggggtggcctcctggaggaggtggtgtttatattgatcctagaaaaatggccagatctgaggaagaacattctaggcagagacttgggggtggcaaaagaatcggcgtgttaggggaagagaaaggaggcctgggtggtagagactagtgagcgtggcggggagaagtgcaagctgcagagacgagttgtgcagaagagcttggtcaatggaggccgtgcacagggcgaggggctatttttctcttaacaactatggggagtcttgggggcttaagctggggagtagcatcatcagattttccctgtttgaaacccagtccagctgctgagtagagaaaagatcggagagcagcaggaaggtaaactcagagcagagtacgggagtggttcaggagctggtggggacagcagggatgggaaagtggatggattcagatggagtttggtggtaggatggaaggatggtctagattggtgtggaagctgaaggaaagaaggtgtgagggatgagcccccactgtggggcccaaattcttgatttgattaggttctgctgcagtaacaaacaccctgagtagcttgtaacacaaagcttc

SEQ ID NO: 28799 - DNA, 1042 bp, Artificial sequence
  DNA replication origin
ctttggcccagcgatctggccttcccagtcttctgggtgctgctgggcactgctggaggaataggaagaggacttgggcaggcgccagccccatgcagtatgcgcgaatgtgactctaaggcacacagcatgtgcccccgacagcccagacgggtgtgggcagccccgggccacacgggccatggcggagagttgctgcccctccctacccagcaattaagccgaggctgtgacagcgacgtgggccgggtgctgtctggggtttccttcccgggccggttgtgtgtccaggcccccggggaatctgggataagacactgggggcgctgccgtgggaaaggccaagggacaccgtctggacgggttccccgagaccacgtgctctaagccccgagtctgatcccaggcagggtgccccgcctctcccagctccgtctctgctccccacgggacctgctgtctccagcagacctggaggtgagcccagcccctggccgcggaactgggagagaaaggccttcctggggcctgggaggagctttgcgagtcaaagcctctgcacaggcgctggcctccttccgctgtctttgtgtggcccccatgggaatggtgtcctgggagagctgcgagtgccagtgtgttttcagacagaatgacaaggaggagaaggaagaatgggagaaggaggagggagaagaagagggaccggaaacaaaagggaggaaggggcagctttgggcagcgtgggcgtaggcataggaaatgcagccccatgcaagatgaccttctggaaaccatactacacagtgtaaaaacgcctcagcgcaatggcaatgggaaggaaagagcgatccctggggcaggccacagggaggcctgctggggtctcagtggccagagctcagctggagacaccctgcctgagaagccaggcctctccgtctggcaagggaagaagaaaagactctccatcggccgggcgcggtggctcaagcctgtaatcccagcactttgggaggccgaggcgggcagatcacaaggt

SEQ ID NO: 28800 - DNA, 1224 bp, Artificial sequence
  DNA replication origin
gagaagccaggcctctccgtctggcaagggaagaagaaaagactctccatcggccgggcgcggtggctcaagcctgtaatcccagcactttgggaggccgaggcgggcagatcacaaggtcaggagatcgagaccatcctggctaacacggtgaaaccccgtctctactaaaaatataaaaattagctggacgtggctgcgtacacctgtagtcccagctgctggggaggctgaggcaggagaatggcgtgaacctgggaggcggagcttgcagtgagccgaaatcgcgccactgcgctccagactgggcgacagagcgagactccgtctcaaaaaaaaaaaaaaaaaaaaaaaaaaaaaaaaaaaaaaaaaaaaaagaaaagactctccatgatggtcgtgcgggcagaaacatttgcagcacgtgcaatccctaacccgcactgatctgccctgtctacactaggctccccatccacccttacagctcacccagagatgtgggacaggcgagagggcagccagagggagcggtccttctgtgtttttcagctggaaaggtctctcgcgctgcttggagtgcactcagagaagaggatttgttcccttaattgataatgaatatcagaaaggtcatctttacattatgagcggggtgggaattgtgtgtgtgcaaagggtggggaaaaaaatcacaaaaataaatgacatccagcactctgtgtttgcatctccagaaggggcagggagatgatgaatccagggggactgagaagctcgaagcggcagaaataaaggggagataatagagggggagcaagagaggcagagcaagaggggaaagtgagaagagagggaaggaggaaagacaggcctaggagaggaggtccagagagggagggaggcaggatggaggggagaggtggccaggtgggctgttcccatcacagaagcccatcccgcctcctggggcatgagggatcatttctcaaatactgcaagtggccaaagtgaagtgcacataggatcatgcccctctgccttgttcaatagttccgtgggtccccattgacctcaggagtccaacaacacagttcctcaacatggttcactggaccctggatggtccagcccacctggacctacccctgcatttccttgactaggctcctcctccaaaaagtcttaccagattcctaagagcttcctctatgtgctggcctc

SEQ ID NO: 28801 - DNA, 1013 bp, Artificial sequence
  DNA replication origin
gtggggacagaaggtggctcatgcaaggaccattatccctgggatgtggcctgagaagctgaccttacttcacggtctccaccagagaaagacctagagacccacactcaggcatcttcaagccccgcctgcttctccataccatctggctgtgagcagatcccctgcctcctcttgggtgatgttcagtgtagtgaggccacctaacctctgctgtcacctccctctctgctgtgcccctgcctgggaagttcccctctcttgcttagctgagctggagttgcaaaggatcctgggatgcctgaatgcagacacctcacttttatgactaatgaaaggggtggagtggaatactgctgggagtttaagaagcgaaatgggagattctgacatgtaattttaatagtaaaatgaccaggttctgaggatcaagcctgtaatcccagtgctttgggaggctgaggtgggaggattgcttgaggccaggagttcaagatcagcctgagcaacatagagagaccctgtctctaaaaaataaaaaaaatagctgggcgtggtggtgtgtgcctgtagttccggtgaatagaaggctgacacgggaggatcatttgagcccagaagtttgaagttgcagtgagctatgattgtaccagctggggcaacaggctgggcaatactccagcctgggcagcagagtgagatcctgtctctaaattaaagaaaaaaagagtaagattgcttctgcctacctacctcgtgtcagccctggacatgcttcctctcagcctaaaaactgcccccttcgccctcattatttccattttgcagatgaggagataagggctcagagaagtgaattgtctgcctcgggtttcacagggggtaagtgggagtagagtcggtgccacagctaagcttgtgaggcgtgagctgttgaggtgtcggagtgctctccttgtaaagtcattcaatgttccggcctcaggtccaagtccgcgaggatgggcgggctc

SEQ ID NO: 28802 - DNA, 1296 bp, Artificial sequence
  DNA replication origin
gcctcgtgcccaccctacagttaaaccccaacacacacatctacaactggacataattttacattgcgacaccttcctgacgatcggccccaatccaagtaggatctccccgccctaggcagcctctgcgctcctgaatctcacctcttttgctactactgtctctctcttccaggccccagaaccatctggacgccgccctggtcttatcggctctctcctcatcctagttctttaaaaaaaacaaaaaaacaaaaaaaactttttttaatcgttgtaataattgtataaaaaaaatcgctctgtatagttacaacttgtaagcatgtccgtgtataaatacctaaaagcaaaactaaacaaagaaagtaagaaaaagaaataaaaccagtcctcctcagccctccccaagtcgcttctgtggcaccccgcattcgctgtgaggtttgtttgtccggttgattttggggggtggagtttcagtgagaataaacgtgtctgcctttgtgtgtgtgtatatatacagagaaatgtacatatgtgtgaaccaaattgtacgagaaagtatctatttttggctaaataaatgagctgctgccactttgactataacccgcctgtctgccccctcgacggatctgtttggtggttttttgttttttgggttttttctcccctcggttgtttgaagaattcgcgggaaaggacgagagacgaatcgggaccgagtagtcaaaggacagcaatagctgaggaggcgcagaagtggcggggctgggggcgccgcagcaggagaggtggctggaaaagtacctggggcggccgagaaaacgggagcaggagacaggtgggagaccccggcaagcttctttgctgagagccgggaatctgggcccgacccgcttgtctacgggagcaaccgcgggggcttggatccttctctggtgaccttgccaagagatttagagaagggtctggacacaacggggttagcctgcgcgggtggcggggtcgtgttctcatcactcccttcgtccccattctttgatcgacacagttgaggctttctcactgttacctataagaggctgtgcaagcccagattccatcctccttccaacccggttgccccccttccctctttatagatgccagggtgtggggtgacggtggaggcggatatggagaagagggtcgcctaggggtacataatcctctagatgatgtgtgactgcccagctctagttgagagttggggagcccgggtcctgggagcatctgtgcgtcttggcaccc

SEQ ID NO: 28803 - DNA, 1152 bp, Artificial sequence
  DNA replication origin
taagggattcgcacacggacccgggggcggcgttaagtggctaatctctgggtttggtcctgctgggttgggggctgcctcgcccccgcaaggcagcgaggtggcctctggagactctgttaggacgcactccctcgctccccacccccacgccggctgctagctccctccctaagctgctgaaagtggccgggagtcgagaggtgcgagctgtaaaaggggcccgggcacaggggagctcccggagccagcctcggcccaggtcccgcgcctcagcctggggacaggctcggaggggcgggaggcgggaggggcgagctgaccctgcactcacccagtccccgcgcctctcgctcccccgcccggcgcgagcaggagggggcgggcagggactcgcggcgctccggctcccgcccctgccccgccccgccccgcgcgcgggatccgcgggggtgggcggcctcgcccgtaaggcgcccaggcgattggcgactcggggaagagacgcggggaaaagtcgaataagagggcgcgacgtcagacccgagatttggggaaaggcgagggagggggtggaagggcggggatggacagacagacaccgacacacaccccccgcgcggcaccctaagtgtccacaacttttggctgccttacttagcccagggcgcagaggctggaaaggtcgcggggagtatcgtgtgagtaaagagagagatttacaaaatagaagtagtgagaaaggaagaagtgaagggaacggaccggagagcaaaagccctcgtgagaaagggaaagagaaggggagaggagaaaggagagtttcatagcgtccagggcagtgcaggagcccgaagcagcggaagcgatcctggggggaagaggagtgcggagaggggaggggagaggaagggcgaggagggggagtgaaaactagaggagggcgaaggaagcgaggcgcgacactgctggggagaggagggcagtgaggagcgaggagcgggcagaggcagctccggcggccgagaggagggagcgcggcgcagagaggaggggcttgcgccccgtagaaatgtcaatcagagcccggagccccgggaatctccgccaatctgttcggacctgacctggctcctcgccgccgccctcgcc

SEQ ID NO: 28804 - DNA, 1079 bp, Artificial sequence
  DNA replication origin
tcacacgatactccccgcgacctttccagcctctgcgccctgggctaagtaaggcagccaaaagttgtggacacttagggtgccgcgcggggggtgtgtgtcggtgtctgtctgtccatccccgcccttccaccccctccctcgcctttccccaaatctcgggtctgacgtcgcgccctcttattcgacttttccccgcgtctcttccccgagtcgccaatcgcctgggcgccttacgggcgaggccgcccacccccgcggatcccgcgcgcggggcggggcggggcaggggcgggagccggagcgccgcgagtccctgcccgccccctcctgctcgcgccgggcgggggagcgagaggcgcggggactgggtgagtgcagggtcagctcgcccctcccgcctcccgcccctccgagcctgtccccaggctgaggcgcgggacctgggccgaggctggctccgggagctcccctgtgcccgggccccttttacagctcgcacctctcgactcccggccactttcagcagcttagggagggagctagcagccggcgtgggggtggggagcgagggagtgcgtcctaacagagtctccagaggccacctcgctgccttgcgggggcgaggcagcccccaacccagcaggaccaaacccagagattagccacttaacgccgcccccgggtccgtgtgcgaatcccttactaaaaatggcgggctggctccgggggctgaagggtggcagcccgggggcactggaagggtagggagccgccacaaatcggtgaagcaggcccgcgccccaggcggctgggaatgggggaggagcagggcgccgggggacggaggccctaggaacttttggagagctcttcgagaagtttctgtattggcgtttttgtctgtggagaaccttccttgcgcgacccctaccccttctcccggtcccggcgctaacctcttttctctctgcaaggatcctcccaccgcctccggtggggatggaaagcaagagttttggtttaatgatgggatatttcctaaatcaaacttgaaatctcaggatcgggcgcccacc

SEQ ID NO: 28805 - DNA, 1368 bp, Artificial sequence
  DNA replication origin
aagggtggcagcccgggggcactggaagggtagggagccgccacaaatcggtgaagcaggcccgcgccccaggcggctgggaatgggggaggagcagggcgccgggggacggaggccctaggaacttttggagagctcttcgagaagtttctgtattggcgtttttgtctgtggagaaccttccttgcgcgacccctaccccttctcccggtcccggcgctaacctcttttctctctgcaaggatcctcccaccgcctccggtggggatggaaagcaagagttttggtttaatgatgggatatttcctaaatcaaacttgaaatctcaggatcgggcgcccaccttcacggattagggcgtgcagtcgatagcggcattgaaattcccagcattgccgcggctgggggctcagagctttaggccgcggcggcgacccacaagccggccaggcctgcagtgggcacgccccggagacaaaacgggggtggtgactctgccgtggagtggccagccccagctcggaggcggaaaccgtcaccttgcatggatggatccaggaatcgaattcgaattccaccagagtggcgggatcagaggagatcagagggtcttggccccggctgtctctgatcacagctctggggagcccagctctggaatgaaaaattcttccacctccacggcagacacccagttttgatcccacccccaccgcccacctcccacttcccacctcccacctctttccgtgggtcttggcacaagcccacggccctagtaggtgtgaacgccaaaaaccttgcgcgggcgggatgggggcggggaggaaacaagggaaagtttggggaggaccaggttttgggggcaatgagggaaagcggggtattcccagactgcatctgagtagtttccctatcaccttctcttccgcctctgcctggtgctggggagcctggtgccttctcaggagcctcgccggaggaggcgtcatcaggggccgccctggctttgaaatatctcttcgacgcctgatttcgtttcccgttaaacctcacagagagtggcatagggaatgttgggctcactttcacgcgaagaaacttggggttacaaaattgagagtaacgttattttccgggatgtttcctaggtgtcagacctcgagcctcgacggccctgaagtcatagtgtttgtacaaagtggtggcaccagaccaggaggagctgagagcgagattccgaggtggggggaatggggctgcgctgtaagtgaccgagtgagactcccgatatttaatttagcttttttcagaaggaaaagaaaaaacaataatgagcctcggagatgctccttctgcattaaccag

SEQ ID NO: 28806 - DNA, 1381 bp, Artificial sequence
  DNA replication origin
ccagcaaggctcacgtcgattccccacaagcttaactcagagtttgcccctcgaagctcctgactttaataaaccttcagcttattgaaaggcgttcctgggtcacgcctcctgagcgccttggaccttatcagggaggggcagtcagtccctcctgaatgactgaagtgggctcagccagggcagaggcaggatccgagtcctgacagccgaaaggcctgcctacaacctcccctggccaagcgatgccaaggcgccctccaagattaacgaggagcgagcggagcagggtacacaacaatgtggctgtgtttgatcccgcgacgtgtcacttggaatctcaatttattgccaatagacgacgttgtcaggcactaattttctggtggcgctccatcacaggcctctcaaatcaggggaggggctcagaggccggtgggcaggggggctcggaggagccgtcgcgagccagccgggggttcctgtaacgaggctttaatgaggggagcgcgacggcctttgtggacaaaccggaggaggaggcggcggccgggtcaggagctcggcaaggtcgcttcctcccccggcccccagagcccgggaatccggagagggtcagcggcggccgccaggccgggtgcctactgaggggctgtcctgggcccacaccaccctcgcccactccgaactgcgaactgcggcaggaaacacaacatttccaagcaacaatgcaaacgcgctcattaccatctcctcaatatgcatgaagaaaatgcacagcgctggccgagccccctcacacggctctggcctcggcgtccaataaggcgacaaattcatctcccaggatgaatgaggagggggcgccggggaggcagatccacgtgggggaggggacggatcccggagagggagaggagagaatatttacggagaggagaacctgagagacagaacctgagagacagaaatccaaggaggaaataggagaggatccggatggaagtggggaggaaagaaagaaaatcaaaaacggcaactgcagatgggggaaagggacacagtcacagactcagggcgaggaaaaaagagacattaagaagggggtgagggagggagcagaagggagaaaagtgaactgaaaagtggtccagggcaaaggcataaaaacagcacaatgaggaagcggaggaaagagaagaaaagcgaatgatctagaaatcgaagatagaggaaattgtgaggacagacggagggaacgagaaaaaaaaggcatgggggagggggctgctcaagtcaggtggaaaacggctgatccagaagaggtaaagcaaaagaaaatcgttcccgccgagggccaggttcttccatcaaggccact

SEQ ID NO: 28807 - DNA, 1459 bp, Artificial sequence
  DNA replication origin
cacctctcctccgccgcgcgggcgcgcgggccgcggacgctccctcgtggctggcgcgagcccccggcgggcggcgcgcgcgggccgttaccgaccgttagcgccaggggctgcggctgcggcgggcggagccgggggcgggcgctgaggggccgtggggccgcaagaggcgggagcgaggggagcagggcggggacgctgctcccaggagctcccggcgacgactcgggcctactgcgagcccgggaagaggccgccggcgaggccgccactggccggctgcgcgctcccccaggctcgggccgcctgggccgctccgcctcgcttagacattggccggctggcagccacctcggccccacggtccccgccgccgctgcagccagcttcccgtctccatgacaatagcgcgatcgagaccccgcccctccccgcccctctggcgccgagactcggaggaaagcggggttacgtcaccagggggcggagcccagggaggccagcgcccaatcataggtgaaggaggtgtcaggcactgggctgggcggacccaggggctctcggagaatgtagtctgaaccgctcaggcctcttggtgggcggtgtctgggggaggggagcagacggaggggaggagccaacgcgcgtgcacgagagcgcagcaccgagcgggtgccggtgcggcgctgggttagtgtgagatcgcgaaataaagtacatctcgcccgtcaaagtcaatgcgagaaactttgtatatagttatgcttcggcttgcgtgtggccccattatgcgaagttcccgatatcccgagcttccgcggcgtgcccaaacctgtgccatcttctgtcctggttcaccagcgcccctgtctgtcccagagttcgagtgcgtccgtggcttgtggtggcgggaggtggagagaagaggagagggtctgttttgtattctaactgtgtggccgtcgtgggcaagggctctgcctctgactcagttgtgtgtgtttgcttcgccagcgcctcgctgaacaaacagtggttgggttgggcactgctctgcccagtgtttgcagtggagcgtgggcggatgcgagagtgcgtgcgaaggggaaggcgacttagttaaacaaaagggaaggggacccgcaccctccaccaccaccgacttggcggtgcgagctgcgtgcggtgggaaaaccgggagaaagaggctgcgaggcgtgggagtggagctggggacggtcccgagatctcctcgggtgtagctgattctctgtctggcagttcttgcccaccacccctactctagaaaaaggctaccccggtagttccaggaaccagtgtcttctccctcgccgtccggcggggggtcggtagaaggaaggcgaggcggagacgtgcagacgtctgaggcctgtctctcgcccacctgctgctgccggcgcagaggggcagtcatccc

SEQ ID NO: 28808 - DNA, 1098 bp, Artificial sequence
  DNA replication origin
cagaggagcgggcgcggcggtcgcagccggaggcgcgcgggaagccagcgaggaggcgccgcgggccggagccccggagccggggccagaggagcggcggcccagggcagccagaggccaggtgcccgcccgctcgccctcgcagggcgccgcccggctcgttggcggccgcggcgcggcgcgccccatgcccgtgtgtggccatgtcctatccgcagggctacttgtaccagccgtccgcctcgctggcgctctactcgtgcccggcgtacagcaccagcgtcatttcggggccccgcacggatgagctcggccgctcttcttcgggctccgcgttctcgccctacgctggctcgactgccttcacggcgccctcgccgggctacaactcgcacctccagtacggcgccgaccccgcggccgccgccgccgccgccttctcctcgtacgtggtaagtgagcgggatccgcggcgggcgaggggcagcaggggccgggcgggaggacgggggcggagggggacacgggcctaggcgccaacaccgacctcccccgccaagcttcgcggccccttcaaacttgggcgattgtctccgccagcttcgcccaggccttggactcaagagttgctcgcaaaagagagccgcgtcttgctcggatcgctgagctggcgggaaggggttctgtggggagaggtagctgcaattaaagagcagcatttggtgtaaacgtaagctccgggctgccctgcaaattttatatttttggttttgccattttggaaaagtagttcaaaagaaatagactcgaaatttgagcagaagcgtgctaagtctatgtaaatgtgtttggcctagcctttaattagtcctccaaaatgttgcaaatccgtaatcctatcttcgcaatccgatttgggagtattaaatttctgaaaagtcggtcgagctgcggtgcatccgggatttttcggccgggttgtaacttcggtctggggtagtatttttggagggtgggagtgcgtgggcatggctcagctttttgtttgcatttcttagctgttgaaaaaagaaaaaaagagccttgacttcccttgtt

SEQ ID NO: 28809 - DNA, 1260 bp, Artificial sequence
  DNA replication origin
tatgggcccgggacacggtgggcatggagagccctcgttcccgccgcccccgtccttgaccttgtccgacgatgtggcgatctctgccaaagaccacagtttgggcttggcgagcaccgcaggaggcggcggcggaggcggcgaatggataaccgagggcccgccgggacccggaggcacctcgcccgcggctggatgcgggccgggcgccggcgctccggcggggtagtgaggggccgggtcctccgccagccgcgccgccgctggcccagccggggagggcccgccggtgcggggggggccctgcagcgcgtcgaggcggccctccgagggcggctccttaaaatccgagtcgctgaggctgccctccgtctccttgcctgcaggggtgggtggtccctgaagccgttcgcagcccgaagccgccttctgctcagctcctcctgcgggcgaaacccaggctgtcaggggcgcagaggccgcgcggcgggacccggttcccgcccgcaaaggcagggacccctgcccccaacctccaggccccgtgcgcgccccctccaggcctctcttttcctttttactcccgcccaacacgccctttcccatgtccaccaacctgcttcggggccctcggggtcgcccttgtcctcgggcttctggggctcgtcctcgtcgttcttctccaggtcaatgttctcctcctcttcctcgtcctcgctgcggttccgcggcgtccacgtcattttattctctttcttgaggcgccggcgcgcgttggcgaaccaggtggacacctgggtgagggtcatcttggtgatgatggccagcatgatcttctcgcccttggtggggtaggggttcttgcggtgctcgttgagccaggccttgagggtagccgtggcgtcccttgtggcgttcttccggtacgctgggtccccgtaagggtacgatcccaggggcgccgcgtaaggatggtaccccaaggagcccgccatgccgggtgtgtggtcgtagggagagccctgcggtggagacgcagagaggtgagtgtggaccgtggtctccactgccatcggaacgaccgaagcacccttttccctgcgctccccggggtctgtgggtggacgaggcccgcactccagcttcctacggggcaaggctggcggggttcagacctaggagcaactcctccccctcctcagaaggcagcggggacctcaatttctgggtcaggtccttctggggcccctgaagctgtcc

SEQ ID NO: 28810 - DNA, 1204 bp, Artificial sequence
  DNA replication origin
gtggaggcaagtgctgagaaagatcagccattcaggcaggattctctctccctcaagtcacaacccaagcctctgtctcccaccctctgtttattcccaggccttagctagcatctccagtgaactgaagtcttaaaatagcatgactttaataaccatattgaaggatagccatgtgccgtgcacttgaatcctcacaaagccaggagtggtaaagccccatttcacagatgaggacactgaggctcagattgggtattggatctgtccaaggacacatagctagtaagttgcagaggcagggctgagccacgaaggcccaagtaccaacccggtaaactataacattttgggaaggcaactccagtcccccagctctaggctgcctcgggtgccacagtcacactcagtcctggagaagccattgtccccatgggcctgcagccgacctccccgcaggcctggacagctggttcgcagggggcgatggcggcagctagagcctgtgccccgaattaggatggggttgtgggggagaccgccagcaggaagcagctaaggaaagcactcaggaccgggcacttggggaaactcaagcaggcgctgagcccctggagactgaaccccagttgtgttgagcaccgccgccaggccgcgggtgcagacgcgaactctccagtccttgtttgatgagcagcggccaataaattcattaatcatcattttatgcctcatcaaaccccctccaagcccctccatgggagttacacaaattagcccctgaaaagacagtaatttcagtttagcgaggtaagtgctttctgatgggctccgcgcacagagctctcctgacaagccgatccatcagcgcgttggggacggggcgtggccgggacgccctgcccggcctggcctcctcccacacagcccttcccaacctcgccagtccagccatccagcccacagtgtctcagcctagggcgcccctcaccaccgactgctgtgtacccattctcggcaggttgtttcatcaggtctctcgccctagcccatcccgacttcctccgcagcccttctgaacatgagagaaactgcaggaacgaaaaaccaagaccccaaattggaaaacaaacttgcagggaaggaggatgctctggccttgaggttcgaactcccgccccggggaggcaagagccaggcaccc

SEQ ID NO: 28811 - DNA, 1271 bp, Artificial sequence
  DNA replication origin
cccttcagtatttgtttttcctgcacttcattcagaagcacattctgattcacactgaaaaatagtttcaagtgataacagttttattcttctattaacaattcaatttgtaatctcagtatatacatcaattaaacaaagacatggagaaatattattttaaagcctgcacccccacacacaccccaaaaaaagttatttggcagcacataataatgcctcaatgatctccagtaggtttaaattgggaaacataccttaacataccttttgcttgtttttattttttgtaaataaaaattttgtttttattatagtttcttaaatacttccaaccatataaaaagaagaaattttaatcaagcatttgagatactaagggctgtgtaaaatgtactttaaactcctcctttccccactctatgaggaaactgatgcctaaagactgtgtgggggtgtgtgtgtgcgcatgtgtgtgagcacatgggtgtgagtgtatgggtgagagtgtatgagagtgtgcctgggaacatgtgtgagcatacaggtgtgtgtgtaagtgtgtcataagtggcagtgtggtgtgtgtatgtgtgtgtgagagtgttgtgatgtgtgtgtgtggtgtgtggtgtttgtgagtgtatgagtgtgtgatgtgtgagtgaatgtgtggtgtgtgtgaatgtatgggtgtgtgtggggtgtatgtgtggtatgtgggtgtgtggtgcgagtgtgtgtgggtgtgtggtgtgcgtgtatgtgagtgtggtgtgagtttggtcagtgtgagactgtggtgtgtgtatgtgtatgtgtgagtgtggtgagtgtgtgtggtgtgtgtatgtgtgtttggtgtgtgtgtggggtgtgagtgtgtgtggggtgtgagtatgtgactggtgtgtgtgatgtgtgactgtgtgtcgtatgtatgtgagtgcggtgtgtgagtttggtgtgtgtgtggtgtatgtgtggtgagtgtataagcatgtgtgcatgcgtatgtgtggtgtgtgtgtgtatatggtgtgtgtgagtgcattgtgttgtgtgcgcatgagtgtgtatgaatacgagtgtgtatgtgagtgtggtatgtgtgaatatgtgtatgtgtgagcgtggtgtgtgtgagcgtgtgtatgagcatgtgagtggtgtgtgtgtgggtgtgtgatgagtgtatgagtgtgtgtgtgtgtgtggtgtgtgtaagtatgagagtatggtttatgtgtgttgggcggtgaatgtgtgtg

SEQ ID NO: 28812 - DNA, 1561 bp, Artificial sequence
  DNA replication origin
gcactagccaggaacattcttcccgtaattcctctgctccttacatcagaaaaagttggtttctgttgcctgcaactgagaatggggattgatccagagaaaaccagattctatcccattcaacaggtctccatcgaagagccagtacttacccatatattatgtataatatttacacaatgttctttcttatagtagctcacatttttacttaaatgaatttgcattagaagtttgatgtactcgtttttacttttctcctgactcacactgaagtcaatgcacaatcatttagcaagatctcttggtctccatacactctaaaatcctttcccctaccacgagcaccacaatttggggaaatctgctctgattgtcttggcttcctgagtagggtggtagagtaggacagatgggtgtcatgattttgtccctcagtcctaatttcttcaacagaaaaatgagatagttatagcttttctatgggtattgggacaattgaatgaaataacaaatgcaaagtgcatggccagaagtcttgtgtccaatagggtctagatagaagtttccttcctccttcaacaggtgacatttttccatgtgactgctgcccaaaccttgcctctcacagtatggttctactctcccttctataccctgcactctaagaccccaggctccctcatgaagaaatagaaaggcctgggaacccagaagaggagaagctgaagaagacgatgagggaaggaggagaagaacaggaaggagggaggaaggggaggaggggtgaggagggaaagagaagagggagaaggtagaagagaaggggaaaggaggatgaggagaggggagaggggagaggagtaggtagggagaggaagaaagagggagagggaaggaagaaaagagaggaagagaaggatggagggttggggaagaaggagatggagaggagggggaaggaagagaggaagagagtaaatcagaagggaggaggagaggaggacaggaaggaagaggtgaagatggagagaaaggagaaaaggagggaggaggaagggagtataaagagggacgaggaagacaaggagaggaaggaagaggaagaggagggggaggaatgaggaagaggaaggagaactaagtttttagcctgaggccattcagtgcttagctccactcctttcccttccccaccccgcgtctactcagaccttggcttcctttccagaaatgtccaacagttcacatttaattacttcataaaaaaactggaaaatagaagaggaagagttaaatgttctcctaaaaggaggaagctgcagctaatcccaattaggaggaagtcccaggctattgaaacgctacaatccaattacatcaggtaaaatgaattactcctttaatgctgacttattatgaagacaccttcttattgctctcattaataatctttagacatcattttagcgcatattggctgcaataacatttctattagcatcatggtggagcagggctgacaattaaaataaaaaataaatcaacccaaggagcgaac

SEQ ID NO: 28813 - DNA, 1149 bp, Artificial sequence
  DNA replication origin
agcgtcggtggatcccactggcccgcccatctttgtcctcggggatctggttccccgcctcagcctccccaggactcgggctagattccggctctccaagccctggcctggcccagggccttgaccttggagcttctctgcagctgcctggtcctcgagtaggccggatagcgccccctcgaggccgaggttcgggatccctcagattccgtcgggaaactcgccaggtccgatccctggcagccgcaggctgcttgctaagatccctgggcatctcctccgaaggcaaggcttggctgcctcgcgcgcgcgcctcccgcagtggccgcggggcagccagggagcctgaagaaggctcccggtccgggctgcagcccctgcgctccgctgggggtggcgctggagagccgcagtggagcgctccgggagggcggcccattccctgcgctcctcctggacgcccggctgggcccagcggtctgaccaccccctcactccatcccaggggtcttcaaaggggcactgatgggtgggcggcggcaggggtgggggaggctcgttggtacccaggaaggggctgcctcctctaggcctggccccgagacatggaacctccaatttgcgagcacggtagactgcacatctgaaggctcagtactctggccccagctgcccttctgagagcctccaacccgcgacgtctaggggtgaaaagggactgtcggtctggtaggggaaggtcttcggtgggcactgcaggaatccagtgggatttgcaggccagaaacctcagaaagccttgcctttcacttaccggggtcaccgcgctttatacttttaaaagcgctttatacttttaaagttgcaccaggctcttgctgcaactcctccaaggagccataggggttggttcaagggcccagttttattttctagttgaaacgcgagagcctgtggcccagaagatagcaacggctctgggttcttgtatgaggcggggcaaggtctggggtcctggacggggcgtacctcaactccaagtttgccactagcaccttacactgatctctttagcatgacatctctaggtccccacaccccgttttaaaaacacattctgcagaatgctcaaggagcttaagccacaaa

SEQ ID NO: 28814 - DNA, 1413 bp, Artificial sequence
  DNA replication origin
ggcgacatcgccggggaacttgatgatgggcgacggcgcggcggcggcgtggctcagcaggcagcccaggagacagagcgccctcaggggacccgtgagcgcgccccgggccattagcgcctccatcgtagcgctccctggccccgcgcgtcgcccgggggtcgctggctcggtgcgtgtggccgcctcgccgcctggttggagcctgctccgcggcgcagggctgcgctccgagggtccgctggctcggtggcctggggtttgcccggctcagcggctcatggtccggcccccgcgccccagcccccgccgccgccgccgccgccgcaggtcctggcaatccctttgtatgtttaaagccccagatgcgcagcctccagccaccgcctgaggaagtctggatgcagcggaaacaagggagggcagccgccagatgtagccggctgggctgggagggagctggcagagcggggctgggggcggggggcgcactcgggcccgcccctctctgccccacccccctactcgccctcctccacttttctcctcttttttcctttctccacctcttttccccggccgcctgctactcctggcctctacgtccaccctcagtgcacgacctcgtcaccccacttgcctctctcgcgatctgggcgcacagcctcagaaccccctgctgggaaacatctgtcgctctaggcccttgacgtcctgaggttagagagcagcggtactactaggagggacgccggcttggctaggacaccctgcactccctggggtcaggaacgggaaggaatggtcagaaacagatgatcagccacaatgatagatggtcagagacagaaattttcgatatttagggatagggacagagagattctgggatgaacagagatggaaagagagagatggaaacagagacagtggaaggtcccaggttgcttccttacctctttccttctgcaaatgtgtaagccttaacttggcctcgtatagtgcgagatgctagatacaccttgggaaatagagcagtcaggggccccgcgttagagacgttggaaccagagcgactccatcttgaacagggggctgggtaaaatgaggctgagacctgctgggctgcactcccaggagggtccgcattctcggtcacaggatgagatagaaattgggcaagactggtttaataagatagaggtcacaaagaccccactgataaaacagtatgcagtgaagaagccagccaaaaccaagatggcaaagaaagcgacctctggtcatcctcactgctcattttacgctaattataatgcattagcatgttaaaggaagcacccaccagtgccatggcagtttataaatgccatggcaatgtggggaggtttaccctatatggtctaaaaaggg

SEQ ID NO: 28815 - DNA, 806 bp, Artificial sequence
  DNA replication origin
taaacaacttttggacacatctgggcagttgctaagggctcttgccaagcgtctaggtaagcctttggcaaacagctacaggggtcgtttttgctaatgtaggactttgggaacggtgctctggcacacaatttgggtaaacttatgcgcgcataaggatgggagggagcttggtcaaagcggggcttggcaaatttctaggaaccttcggcacagatccggagagggacctttaaacaaacagctcgagggggccatttgggaagtgattggggcaggagggaagcagagagcgcatcttttttctcctggcttaatggacaaattggtcaagggctgggcctcggaaagtttcctcgaacttctccaaagggtcggagaaaagaaggagagagctggcccggcaggagggaggaggagtggggcaggcgctggagggcccggcgcgtggggcgggggcggactgcgctccgctcgggtcggagagcggccagagagccctccttcctggctgggctcccaaaccgcggttcagatgttgtcttgtgagcgtgcgcgcgcctggctggaggggcactgagcctggccgcagtgttgcgtaagtagggcctgaggagagaggcaggccagggacccatcaagatgtcctttccagtccaggggatatctgctcccttgttgcttcagccaccctgccctccagcctccccctcaacctgtccgggagaagacgcccatgccctctggtcaccctaggaactccttcaggaggtgacaactaccctctcccaactctcacccttcca

SEQ ID NO: 28816 - DNA, 1469 bp, Artificial sequence
  DNA replication origin
ggaatgttagggatcctggggtacccttcagggtcttggctcggaaggaaaacattcccctccgaggggatggactatattaccaagggggtggagccagatgcctgagggggtgtggccagagcctggggcgtgtcacagccgaaggggcagggcggcagcagcaggcgtctaagtaacttcagcgcctgcgcagaggctccccagcgtcgccctaggctgggactctagtaggtcttcggctcagttttggctgcagcgcccgcgtagatcgcttcggccgggttctacgcccggctcaactatgagccggtgcgcccaggcggcggaagtggcggccacagtgccaggtgccggcgtcgggaacgtggggctgcggccgcccatggtgccccgtcaggcgtccttcttcccgccgccggtgccgaaccccttcgtgcagcagacgcagatcggctccgcgaggcgggtccaggtgaggggcgtgggtctgaggggagaggtggtctgaggggggcctaggtcagaggggggtccaggtaaggggtgtgggtctgagagaggagggcggccgaggggggcgtgggtctgagggagtgaggtggtccgaggcgggcgagagtctgaggagggaggtggcctgaagggggcatgggtctgaggagggaggtggcccgaggggagccagggtctggggcgggtccaggtgactggtgtaggtctgacgggggagggcggtcgaggggcgcgtgggtctgaggggcgttgtgggtctgggaagcaaaggcatcagaggaagaaagagcagtggatctgagaggagaggacttctgaggggccgtgagcctgaaaggggcggagatgtgtgtctgagaattgaggacatttagaggatggtctgagcgggcacgggaggagagaagatgctgggaagatgcgggcctgagaggagaatccaaaacaggaagagactgagctggctggtggcgcaggctacattccatgccccagaaggttgaaggaatctgtgaatctgtgacagaagcttcaacttgagtttatgagagtgtagtgggaggcagatctactacgggagagtagatttgaagaagtctttttttttttttttttgccttaggaaggagaggagtcagtatgggatggataagagtgaggcagaaggcagagagcctaggtctgtggttagaacaacaggtaaggctggaaagatttagctgagcaggagcatgatggagggtgggaagtcagaatcaaagaaaagggacaactgagtcagcttaggatgttcaagaagttttggtccagaatcagtcttcacctaaaaacgtttcctaagttgaagcatgagaagtagtagcccaggctgttttccattgttaaaaatggctatactgttatgcacaaaggaagtttcctttcctttcctttttcttgtaaagggttccttt

SEQ ID NO: 28817 - DNA, 1155 bp, Artificial sequence
  DNA replication origin
tcccgcgctcagggcgcactcacgtgtccggcggcgaggggatccctggtgccttgcgccctgccggcccccgaccggcggcgccttggcaggctctagggcgcgggctggggctgggctccgccgtgtggcgttcgggcggggccggggaagagctggaggcgcggggcggccggcagggcgcgggctgactggttctggccgtgcctggcgggggccgggctggtaatgtagcctgcgccccaggtaacgcgccgattgcattaacccagcgcccggcccgctccgtctggagcctgttagcgctaatggagactgacagcgcggccggggatgggcaggggcgggagggtggcgcgggttcccagggatctgggggactcgggcgcgcactccctttctatcctgcgccgagcaccgctcgccgctcccaaggacaccaggcctctgatctcccaccacggggagcgagtgacagactctccagaactggggtctgcgtcgcgtcagaaaggaggccaaaaaaggactggggaagcagcgaccggtgcagcaccagctctgtcttccgcagcaggccacttaaactatctggtcagtttctttatcaacgaaatgggaatgtgcggctcagggcccagtgctgcaaataggcggccagcgggctgttgggcagttttgtttgagcggcttagcatgttgacaggtcacagcccagcacttactcctgcatctctgttatttatgggcagggtagcaggtcatttgaggttgtgacccgtgttctgtgaggctgagaactactatttattctttcaattattcattcattcacaccttcacacatttgttcttccatatgcccgctgtgtgccaggcactgttccgggctcttggattacactggcgcaacataactcggagattcctgacctcatggagtttacattctgctggcggagacagaggaaacgggaaacataataaatacacacgttatatgatgggtgagggaatggggggacagtggggctgcagtttgcatacggggtcagggaatttgagaaggtaacaattagacaagtaaaggagtgagccatttggacctgagagtcgttttctcattcattcactcatctattgattaatgtatta

SEQ ID NO: 28818 - DNA, 820 bp, Artificial sequence
  DNA replication origin
tccttgggagcggcgagcggtgctcggcgcaggatagaaagggagtgcgcgcccgagtcccccagatccctgggaacccgcgccaccctcccgcccctgcccatccccggccgcgctgtcagtctccattagcgctaacaggctccagacggagcgggccgggcgctgggttaatgcaatcggcgcgttacctggggcgcaggctacattaccagcccggcccccgccaggcacggccagaaccagtcagcccgcgccctgccggccgccccgcgcctccagctcttccccggccccgcccgaacgccacacggcggagcccagccccagcccgcgccctagagcctgccaaggcgccgccggtcgggggccggcagggcgcaaggcaccagggatcccctcgccgccggacacgtgagtgcgccctgagcgcgggacagggctaggtctgcctgggaggcccgggccgagacgcgccagcagagggctagcgagtttgtagtgcagtgacgttaagtgtccgagaaggctcctgtggctgttgaagtgtcgcggacctgagctggggagggggtcggcacgctgccctcagcctcggtgagttcaatcccagccatttggggcaggcgagagtgggtgaacgaggaaaagtgctgcagggtcttcagccgcccccagagggctgtcagaagtctccaactcttgagttccggcgtgccccaacctctgtttccaaatttttccagcggacgcgcgcccttttctgggaaccctgcgtccgctcagcgcgcgctcatcccagtgtctaaggcgctcccgg

SEQ ID NO: 28819 - DNA, 1414 bp, Artificial sequence
  DNA replication origin
aagtctccaactcttgagttccggcgtgccccaacctctgtttccaaatttttccagcggacgcgcgcccttttctgggaaccctgcgtccgctcagcgcgcgctcatcccagtgtctaaggcgctcccgggtggtcttgggagttgcaagtagggaggaacggccgggtaaccacctcttttccctttatccaagcagagcctcggcgtgcccccaggaccggtaaagttcctctcgccagccgcatccatgcttctggcgcggatgaacccgcaggtgcagcccgagaacaacggggcggacacgggtccagagcagccccttcgggcgcgcaaaactgcggagctgctggtggtgaaggagcgcaacggcgtccagtgcctgctggcgccccgcgacggcgacgcgcagccccgggagacctggggcaagaagatcgacttcctgctgtccgtagtcggcttcgcagtggacctggccaacgtgtggcgcttcccctacctctgctacaagaacggcggcggtgagcgtggggtcgggctgggaatttgaatctgggaggtccactgtctgcagcggtggctgggacaggagctggaatacacacggaagggaggcgaggagacaggggcaaatctggggcgcagaaagaactggacagggctaacgggaaaaaaaaagattggagtcctctggaaggtcattttcccaggctctttgcagagtacctcgagctcattccagcggaagtgtcaggattgggcaccctggaagcaaaacagcagaagagtgaaatcgagtcatgaccctaaagtcatggtaggggtatggatggaaaggacagaatctggggtgccaggttgggtgggggagcctgaccttttgatggtctgctggaagggaggtggagattccaagagctcttgaaggggcaccagaagtgggtgggatttgacaaccaggcccacagtgaccctaaatctagcactctgagcctgggggcaggaacctttgggccagaagcagtgggaatacttcggttttctgaaggcacctggggaggccctgtggtcttggggatagaaacacacaagaagaagccagtatcagaaataatgccattctcagggagcacagcccaggtggaatcaggccagtaggtgccaagaactggcctggtcctcaaggcaggaggcccagatgattggggtgaaacctctacctcctcaagttctagccgcattgcagggaggagtgggagaggggcctgaagaagactccagtggaacagccacactctctcccccttctgctggatggtccaactggccacctgcctgaaaatgagagcctagagatcacctacagccaatccaggaagaataacatagaaccccgggccagggaagcggt

SEQ ID NO: 28820 - DNA, 1829 bp, Artificial sequence
  DNA replication origin
tcatcgtcatcattatcattgggtataccacctatagaacaagggcagggtattgtaaataatagagtcatcaaaaagtgcatgggcaggaagaggagaatgattctagagaggaggcctgcatggaagaagtggtttttcatggaatctttaagacaatctttaggatttcattgggtaaagaagtcacctaagtgtggtggcccatgcctggccacacccctgtaatcccagagctttgggaggcagaagctggtggatcacttgagaccaggagttggagaccagcctgggaaacatagtgagactccatctctacaaaaatttaaaaaaaattagccaggtgtggtggtgtgcacctgtagtcctagctacttgggagactgaagtgggaggatcgcttgagcccaggagtttgtcatgccactgtgctcaagcctgggtgacagagagacactgtctcaaaaagaaaaaagaaaagaaaagaattcaaggcaaaacactccaggggaggaaaacataataaacactggatatagtgatgggggtgcagtgatgagatgcaggagtggaggtacagtgatggggtgcagtgatgagatacagagatgggatgcagtgatagggtgcagtcatgggcttgcagggatgggagatagtggcctgcagaggtggggtacagtgatgaagtatattggtgagagttcagtggtagggcgcagtaatgggggtacagtgatgtagtacaatggtggggttgcagtgatggaatgcagtgatgcagtgcagtggtggggtgcagtggtggaggtgcagtggtgaggtacactgttaggggtacagtggtagggtgcagtgatggggtgcagtgatggagtgcagcaatggactatagaaatggggagcattggtggagtgcagtggtggggtgcagtgatggggtagcagtggaggtgcaatggtggggtgcagtggtggggtgcagtggtagggtacagcgatgggataatgatggaggtgcagtgatggggtgcagtgatgtgggtgcagtgatggggtgcagcaatggggtgcagtgatggggtgaagtggtgggatacagtgatggggtgcagcaatgggctgtagaaatggggtgcagtgatggggtgcagtgggaggtgcagtgatggggtgcagtggtagggtgcagtgatggtggttaaatggtgggggtgcagtggtgggatgcagtgatggaggtagtggtgggggtgcagtgatgggtgtagtgatggagtgcagtggtagggtacagcgatgggttaatggtggaggtgcagtgatggggttcagtggtgagatgcagtggtggtgtgcagtggtgggggtgcagtcatggggtgctgcaatggggtgtagtgatgggtgcagtggtgggatgcagagatgaggtgcagcaatgggctgtagaaatggggtgcagtggtggggtgcagtgatggggtgcagtggtgggggtagtggtgggggtacagtgatggggtagcagtggggttgcaatgaggcattagtttggaattgtagaatggagccagatgagaaaagatttgaaggtcaagttaaaatgtttgggtttaatatgaatgtgagaggtgtttggagaaacaggttatgagatggaagctctaaggcttcccagctgtgggtccatgtgtggtctgtggggcattgcccggtgacctgattccagcaccagagcaccactcctttgttttgtccacctacaggctggtttccaccctgaggcagctgccattgctcttgtaccttcaaggttcctttagcct

SEQ ID NO: 28821 - DNA, 1000 bp, Artificial sequence
  DNA replication origin
ggcggccgggcagaggcgttcctctcttcccatttggggcaacggggtagaggcgctcctcacttcctcccagacggggcggccgagcagaggcgctcctcgcttcccaaacggggcggccgggcagaggcgctcctcacaccccagacggggcagccgggcagaggcgttcctcacttcccagacggggcggccaggcagaggggctcctcacatcccagatgataggcggccaggcagagaccctcctcacttcctagatggggtggcggctgggcagaggcgctactcacttcccagatgggggcggccaggcagaggcgctcctcacttcccattcggggcagccgggcagaggtgctcctcacttcccagatggggcggccaggcagaggggctcctcacatcccagatgatgatgggcggccaggcagagatgctcctcacttcctggccggggtggcggccgggcagagacgctcctcacttcccattcggggcagccgggcagaggggctcctcacatcccagacgatgggcggccaggcagagacgttcctcacttcctagatggggtggcgggcgggcagaggctgtaatcttagcactttgggaggccaaggcaggcggctgggaggtggaggttgtagcgagccgagatcacgccactgcactccagcctgggcaacattgagcattgagtgagcgagactccgtctgcaatcccagcacctcgggaggccatggcgggcagatcacctgaggccaggagctggagaccagcctggtcaacagggtgaaaccctgtctccaccaaaaatacaaaaaccagtcaggagtggcagcgcatgcctggcatcccaggcacaggcaggagaatcaccagagtccgaggcaggaaggttgcagcgagcagagatcatggcagtacagtccaggctccgcaagagagggagaccttagaaagagggagacagagagcaagagggagaggaggagg

SEQ ID NO: 28822 - DNA, 2476 bp, Artificial sequence
  DNA replication origin
aaattttctccacacacacagagaaaagtatctccctaaataacacttagtcattcaactgcattatcaaggttagagcaatcagattataaacaataatcagtaacggtctttaccattccttagacacttagtgttattcattagtaaagtgaatgataagattctcctccgtatttcagagatttggaagagtggaagtacagctgctctagaatcaggatccctgagctttcctttaacataagaggtcctaggaaacagactgtttaatttctctgaaaatcatttccacatttataaaatatagggcctctaacccagctattccagaagctgaggtgggaagatcacttgagcctggaaggttggggccagcctgggtaacatagtgagaccccatctctaaaataaataaataaataaataagatatgcagattaaacaaatgggtcccaagttcctttttagctgtaatagtctatgtgattatgaagaggtggaatggaggatatagtgtggtgtgtggatgtatattgtgtggatggagaggactgggtaatattgtatgtgaatgggaaaaactgggaagtgtggcatatggataggaaagactggggagtgtggtgcatgaatggggaggactgaggagtgtggtgcatgaatggggaggactgaggagtgtggtgcatgaatggggaggaccagaaagtgtggtgcatgaatggggaggcccaggaagtatggtgcataaatgaggaggactgagaagtgtggtgcctgaatggtgaggactagggagtgtggtgcatgaatggggaggaccaaagagtgtggtgcatgaatggggaggaccagggactgtggtgcatcaatagggagaactggggagtgtggcgcatgaatggtgaggactagagagtgtggtgcctgaatggggaggactgcggtgcatagtacatgaatggggaggaccagagagtgtggtgcataaatggggagaactggggagtgtggtggatgaatggggaggactagggagtgtggtgcatgaatgaggagaactgaagagtgtggtgcatgaatggagaggaatgaggtacatggtgaatgaatgggcaggatcagagagcatggtacataaatggggaggactgatgagtgtgatgcatgaatgatgaggactgaggagtgtggtgcatgaacagagaggactgaagtgtgtggtgcatgaatggagagaactgaggtgtgtggtgcatgaatggggaggactgaggagtgtggtatatggatgggaaggactgaggagtgaggtataaggttggggaggaccaaggatcgtggtgtaaggatggagaggactgaggagtgtggtgtgaggatggacagaagtgtggtgcattagtggggaagactggggagtgtggtgcatgaatggggaggaccaaggagtgtttgtaaaggtgggggagactgaagtatgtgatgcataaatggtgagggctggggagtgttgtctgtggatgtgagaactgaggaatatggtgtgtagatagggtggactgtggaacctattgctcagacagagagaactgaggaatttgttgtgtgaatggggaggactgagaaatttggtgcatgggtggggaggatgctggagtgtgttgtgcagagggtgagaattcgatagtgttgtgcctggataatgggaaggtctggggagttggtgtgtggattgggagctttgggaggtgtggtgtgtaaaggaggaggactgagaagtgtggtgcatgcagggggaggactggagattgtagcatgtgtatgacgcgggctgtggagtatggtgtgtggataaagttgattggaaagtctgttgcatggacaaggaggactcaaaaatgtggtttgtgaacagggaagattggggaatgtgatgtatggatggggaggactacagagtgtggtgtgtgaatgaggattgtagagtgtcttgggcagaggctgaggactggggagcatggtgtgtggatggggaggactgcagagtttggtatgtagatggcgagaactggggagtgtggtgcataaatggggaggactgaggagagtggtacatgattgaggaggtttggggagtgtggatggaaagaaatgtggaatatgtgtgtaaatggggagatccgaggtgtctatttaataaacagggatgattgaagaatattgtgggtagatgaggaggactggggaatctactgagtggatgagatgacccaggaatgtggtgcatggttggagaaaagtggggagtctgttgtgtggatgggatggactggggggtgtgctgcctttgtgggaaggattaggaaatgtgatgtataaggactttccccttggctttgccttaagtctggaaactgaggtaaagatggtgatgatcagtgttgaaaggatagagatatttggtgtgcaa

SEQ ID NO: 28823 - DNA, 1064 bp, Artificial sequence
  DNA replication origin
gcggggaggaggccagcgcagcgcgcgagtgcgccagcggctctgcgcacccggctccgcgggccgccagctgacgtcagcagggccgcgcgccgggcccccgggacggggagggcgcggggcgggggaggcgcgcgccggagttcgcgtcagccggcggcggcgcgcacacgcgctcgcggagcggcctgcccctccccccagcgccctcccggcccgcggctcccccggggtgggtgcttgcgggactggcgggggcggggagtggggccgggcgcgcgccggggcgccccaccccgcctccgcccccgccccacgcgccggcggcgcggacctccttgtcaatgggagcgcggggccgggctgcccgcaggacggtcaggtgggccccccagctcgctgccagcgcggcctctgtccctctcgggccggctctccatcttgtcgcccgtagcccgccttctccgtggctctccagccgctggggccgcagagccgaggccgggttacctcaggaaacgcgatgtggtagtgggtcggaataaacccgcgcgccccagaattcgccttgggggcgtaaggacagattcggacttttcgtttcctatgtccacatttattgagcacctaatatgtgacacccgaggctgtaagaagaggaacgcagcgggcggagaaaagccagagctttttctctgtgagccgctgcctccagggccatagccgaccctgctccgagatcccagccgccgctctccgtgcaggaggggtgcccaccctggggaggccagggtgcccggagtggagggacagggcttcaagcgaccgggagtttccagcaaacccctgatccctgagcagtttattttaaaagcttttgcaaatgttggacggtttcgtttggtggaggccgtctttgcactaaattctcctgtcctcccccttcgaaacgcacaaaatgaattttgaacagattttggatgagaggttttcttccttttttcatcttctgaaacatttccccctcatttcttctcagataaagacccagaaacccgggacag

SEQ ID NO: 28824 - DNA, 1133 bp, Artificial sequence
  DNA replication origin
aaagaaatagagacagaatgaaacagagacacagacagaaatggaggcagtgagacacagaaaatattccacaagcaagagtaatgatcataatcatgccaatagtgtgatgttctgatcaatatggcggacactgtcattcatacaactacaggcgctccccttccccctcccaaaaaacacccacccaggagttagggtggaggacccagaaccaacgtagggagtgggggaggggagtcaaatataggggtgtgtgtgtgtgtgtgtgtgtgtgcacgaattaaaaaacaggcctggagagcaatgtggagtaagcaatgtaataaaaacgatttaaaaattattcttaataaaagtacgaatcccaatgccacagggacttacttcatctgcttcacaatggtgctttttcctgattctccagcccctgttgggacacagacagtggggaaaaactggtgagtgtcagcttaagggaacagggggagggggggactaaggcatgcgagggggtgggcgatcctgggcacatggtggtgccaacttggggaccaggtctcccgggcgcgagtggggtgggggagctggtggcagggggtgcggagtggccggggtcgggggatgggggtagcagcggcggtccttaccgagcaggagtaatttcacgtctttggcggcgctgatgccatcctctttgaggtttttctcaatcgccttgctccgctcgagggcggctctctcctctgcgctcagagtacatcccatggtggccccttccctgccacagcccgcacgactcggctggcacggctccccggcttggagcgccccccacccccccagagagcagagcctgggctcaaggggggaaaatcacgatatcctctcctgggctggaaacaaaaatgtcgggaaaccagaaccctccaaaaagacagccgctaacaagattccagcagcggagactcgcggcagctggcaggggtctggggttgtcgaatcgagggtggccggggtctggggctccggagccaagggaggaggcgcccgcgggccgaggaggcgcggactgcaggcactgaggcttgtgcacgacccaaaataaataaaataatagtcgaggctggagc

SEQ ID NO: 28825 - DNA, 1269 bp, Artificial sequence
  DNA replication origin
acatgcggcaggtgggatggtgacaggtgtaaaaacaagggtgacaaatactcctgtcaactaaaacacaggtgaggcagagtggcacccatggccatgcagcagctgggccaggcaaggaggtcccagcgggccgtgctgggcggggcaggaggtggacagcccagtggagccagggctggatgccagctcctctgactcccagagcctggcccctggggtacagggggtcaggggctgagccaagcctccggggactcatctgccaagctatgtcagcagggagggaggagggaggggacgcgctcctcgggttctcagttcagcgcagggccaggtgggtggcctgctccagccaaggcgccatcaccccaacagtttttctctgaggtctgggatcagggtgcatggcctctacttagcccctgccatcctcatcttccctgacagacactgggtgactctgggtatggggtcaggcccgggtggggaagggtatcaactctgccctctgctggggaagagctgcacagggctcactgggtgagaggttggcactgcagctcctaacccagtgggggcagggggaaccagctcaggttggcactcactctctgaaactacagggccaccaaatgccacctgggctcaggttccactcccctccaaggcatttcttgctttccttcatccctgtcactcctcttacccccttccatgcctctctcccccatctccacccccaagccccacaccctggccagggtagatagaagccagccggtacaattagaaaaaaggagttcctttctgcaggttgtaaggcttagaaaagggaaggtgcactggatttcagccctctcatggtctgctagtcgggaacttttctgtaggccacaacctgccatgtaactaagttgaaatcaatgaaatgtgaaaatgaagcataccacttctgggtcaaggctcttaagatgtgagtgtgtctcctgtatgcacatgatgacaaaatcctagggggtggtggtgccataagatggaaggtgttggtccatgagtcactgtgtggaggagagccacccacccaccaagaacacctgccccagactagtagatgagcaagaaataacctattgcatctgaaccacgaaacattttgggtgtatttgttatagcagctagggcacccttactaacacattctgccattgtccttcttctcctggcttttgttccctatttgacatctgacctctgtttatcctgcat

SEQ ID NO: 28826 - DNA, 849 bp, Artificial sequence
  DNA replication origin
cacgctaggaaagcgggcactttttattaacggtaggcgactaataaatacattatggcagccaataaattattacaataactagagatttattaaaccaacaagtcactcttcttacaaaattacagttaatatggggtgggcagcagtgatggggttgggaggtgggaccactgcactcgagagagacggcttttctaaggagggcctgggacgcccgagcccacctcgcctagatgggggaggggggtgcgtggggaggaagaagatactcagcaggggcagggtgggggacggcgggcagagccaggggatgggtcagaaccagcggagtagagaagaccaggaggcaggaggggagggcctggctgcccagagctgtgggagtaacagggcaggtgtggaggggaggggagaggagggaaagggaggggaggggtggggagggaaggggaggacagtagtggtgcctcggagctgcactgccaggaagtggtgctctgccaggaagggcggtgggtctctgctggtggtcttgtgcactgggcctggggatgagagcttctgttccagggggagcccctctctcatggaggggatccaggagtttggactgggggccattctttctgcttttcccccagcctgccccttctttgacaggggccttcatctggctgcagtggggtctgtctggaggccccagctcctctctgggcagggtggggtcaggggtcaggactcttcttgctgaggggtgggagatggggagccctaccacagaccccacggcagcagctcacacgccggccctgttccctgggctgctgggatcctgcgctctaggct

SEQ ID NO: 28827 - DNA, 1629 bp, Artificial sequence
  DNA replication origin
ggcccggccgcagcgcagggaagcctgggggccagaggtcgccgctgccgccatgccgctgctcttcctcgagcgcttcccctggcccagcctccgcacctacacgggcctcagcggcctggccctgctgggcaccatcatcagcgcctaccgcgcgctcagccagcccgaggccggccccggcgagccggaccagctaacggcctcgctgcagcctgagccgccggcgcccgcccggccgagcgccgggggaccccgggcccgcgatgtggcccagtacctgctctcagacagcctcttcgtgtgggtgagcgaggcggccgggcccgcggggcaggggcggggtccgctgcgtcaccctttatccgcgggggcgtggtgggcctaggggcccctccgccagggacccccgagggcgagcgcctggggggcgcggccttgctcgcgggagcgctgctgagggagagtggtgaggcgcggggagggggagggggccgcgggcgggaggaacatcgcgtggggttgcgaggaggaggccccgaggggcaggccagcgttgagggctccgggaagggggtcggggaggcggcgggtgatggtctgcgctggggcgcggacggggcctggggcaggggaaggggttaaggggcagtggggaggaacgggctgggttttctgagggaccctcgggagaaactagaagatctcagagggcaggttcaaggggaggtcgggatctgggagtgcgttatcccgagggttggacgaagtagagtgaagttgaaagcttttcccacttggtcaggcatgggattgttagcggattttcttccgacgaagaggagagggcagaggggagaattcagacgttgagtatgggggaattttcggcactcaggtgtctttggacattccggttggagagaggccgtctcccacaacttttttgccgcttagtattcgattgtcccctttgggagctgtgtaatgaaacaaacaccaaactgtgcttccttttctgctgcctttacctgatgttcatgacagttttcctttgatgtctgaacgcagcaaaacattcacagtgtcaagaggcagcccatcattttaactgaatgtttcttatttgaggatctattctaacacagtttccaggttgtctgcccctgcgagataagcagcattgataaggcacacatgctggtttcgttcattagaacagataatttcagactgatcagatcaacggtattttggctagagaattttgctttcatcttggccttgaatacttatgtaaatcccgcagtgatcagaaaagtttctccaggatttaaagcctcacttggatttaatatggcttcttggatcttgtctccttgcatgttcccatttggggttgaaagtgggctgtaaatgactgagagattaatattccaagttgatagtatgatatgcaactcatttgttataattagtcccactgtgcttcatcaggaagcggtgggatttatggactctgtgggctgtagattaagtctcctggtccttctgatggagagtttagtagaaggcagtgaagggtgaagttcctgtttatctactgctgtgtaaagctgaactttacag

SEQ ID NO: 28828 - DNA, 1281 bp, Artificial sequence
  DNA replication origin
tgtgcaaaggtaaggcctctccctgtcccggtaaagccaaacgttcatcaaagaccctttaacaagatgtttctaaaatttccaaagtggaattgtaagcttgagagatcttttgttttctagttaatagacttttagaatattaggcatgaaaaagaccttgaaagataatttggtccttttctttagaaagtttggaaaatcctacaaatatttacagagcacctactctgggctgagaactcttacaggccctggggatgcaaaaggaataaaactcccaaggtaacatttttttcctttggtaacagcttattgagatacaattcgcatattgagatagaactatttaaagtgtacaatgatttttcaattcagagttgggcaatcatcacctcaattttacattttcattactttgaaaacaaacctatcccagccagtgactcacgcctgtaatccctgcactttgtgaaggcaaggtgggaggatcacttgagctcaggagccacagactggtctggacaacatagcaagacgctgtctctaccaaaaattaaaaattagccaggtgtggtggcatacgcctgtaatcccagctactggagagactgaagcaggaagatttcttgagtccaggagatggaggatgcagtgagcatgccactgtactctagcctgggccacagaccctgtctcttaaaagaaacctgcaccctttatcaccccctactcccctcttcctcccatccctaagcaatcattaatcaactttctgtgtctgtatatgtacttgcctattgtggacatttcatatcaatggaatcacacaacacgtggacctttgtggctgtcttctttgacttagcacgtgtttaaggttcgttcctattgtagcatgtatcagtagttcatttttatggccgaatagtacattttatggatgtatcacatttatccactcatcgcttgacggacattagcgttgttcccatcttttgattgttagaatgtaatcaacatttgtgtacaagttttgtgtggaggtatgtttccacttttcttagaggagtggaattactgggtcaaatggtcactcttgtttgactttaaggaaaggacaggttattttccaagacagctgcaccatttgacattctcacttctggggtatgagggaacacatttttatttcccgctaaatcaggttcattttttagtttctgctggaggctactagcaaacagcagaaacttgaaagactgttaatattctttcttc

SEQ ID NO: 28829 - DNA, 1176 bp, Artificial sequence
  DNA replication origin
cttgagcgaaggcgcagggcgtgggtttctttgcaggtacaagggcgcgcagtgcgcaggatgcgagcgggggcgggggctcaccagaagggcaggggcaggtctcagggtccatgtcgaggagagcagcagctggaggcggtgaacgggcttctccaagcaactggacgcgcggcttggctagtggcagcaggtggcgatgcttttatagcctcgggcgggggcgcgcatgccaagcccgctgggcgcccgcccctgcgcaccgcgcccgctctttccgtttgtgcgcttgggctccggcgcacgcactgcatctgtcgcccgcccctgccgtgtgtgtgcactgccggggcccgctcgcccacgcccgcgcgtgcgcccccactcccaccccgcatccgcgtgcacgacccactcgccgccgctgtgcgcgcactgccagcccactccccgcgtgggtcccgcaggggacgtgctcgccgcagcagccgccactgcgtggaagcgcgcacgtaccatctccgaaagtggagaaaaaggcgctttgcgtatttcccagctcttccctgcctctcttccccttcattctagaattctccaggacgccagatctgttcagacgggttgctgaactgggggcagaaagaacctgctcacgatgagcccgacactgactcttgcgccctccgagtgtcactggcaaggggcgtgttccatttccccgctgtcctgcctggcatcttcagatccttgactcctaaccctccattatacagataagaaaaagtgaggccagagaagcagaaatgtgcctgggtcccagaataagcctgaggccgagccaggcctagaactcagaactcaggtatctagagggattgtcagtggggggcatgttaaactcaaggcaggtcagtgagatttttctatttataaaaaggaggccggacgtggtggctcacgcctgtaatcccaacactctgggaggccgaggccggcggatcacctgaggtcgggagttcgagaccagcctgaccaacatggagaaaccccatctctactaaagatacaaaattagcccggcatggtagcaggtgcctgtaatcccagcaactcaggtggctgaggcaggagaatcacctgaccctgggaggcggaggttgcagtgagcccaga

SEQ ID NO: 28830 - DNA, 1178 bp, Artificial sequence
  DNA replication origin
aagaaagaggggtcagaaattgcttctctagcgctacagtctacactgggcatccccagcctcttaccggcggcgcaggagcagttgggatccatggcgagctgaagaggcggctagagtcgggacaggttgcacgcgggttcgctgggacttggaggaggcgtggtggagtgcagcgcggcaagcagtgtttatagctagaaagagccgggacgagtgcaaaagccccgccccggccgggcgctgcctgcacacgccccgcgctgagtcacttgcggctccaggcgaaacacccggccgcgcgcactgggccgggcgcacccggctctgcacacgggccgcgggcggtcagttccctgaaggcggcccacttgcgcctcggggacgcctcggcgcggaaggggctgggtgcagcgggaggacacagtgtaccgggtgctgggtgcccacgccgtgcgcctccgccgtgtgcacagctcccctccctcctgtcctgtactcgaacctgagccgttagcgcgcgggtgaaagcgggacttgggaatgctgcttgcattcccaaaccggttggaagtgcagacaggttacaactctgtagcagccaaggcttaataattgtgcagcatcacagtaaacccgtggggtggttactgatgacgtatccgttgcatgttgagtacttttagcgtgtaacagggactgtaggaagtgtgttgtgtgtgagatgtcacttaattctgtagcaacccataagataaggactctccagtattctcattgtagagaggagaaactgcaggtccagagaagttaatttgtccagagtcacacagccagtgagtggcagagcagggtgaatgcgaccaggccccagcagatgctaacggccctctaacatagagacaccaaggaggaagagtaaggagaagaagccacaagcttggtcctcaggaagctcaggggctgggggaacagagaggaggagaccccatccagcctgggaggaggtgggccattgccttgggcctgagggtcagaaggtgtttgccaggcagggagtgggaaggatttgtgttctagcctgggagggaggaactagcgggaacactggaatcgccctgagacatttggaagggaaaaaccccacaagaatattcttcccctgtggaggctgaggg

SEQ ID NO: 28831 - DNA, 1219 bp, Artificial sequence
  DNA replication origin
ttcagccttgagcctcagtattcttaactctgacgtagaggcccagggatgagggcaatgctctcaggggcgtgatcaggaagaaagcatctaacgaagtactggagtccccgtcgctcagaacttaaaatgcgacttcctgaaacccagagaccctctgtaatagggctgggaaatggggattccagggcgcagagcttcccttaccagtggcgcaagagcagttggggtccatttcgagcaaaggggatgctggagctcacaccagtgagacgaacaagcagtcaggcagttggaaagcagaatggagccctgcaactggctgctctatttatagacggaggtcgggccgggcgcagaggcccagctccgcgcctgcacccggcccgctgagtccgcaccgcccgcgttcctgggctgggctgtgcgccgcagaagggccgggcgcaccaccccctgagctctgcgcggtgggcaccgcgggacctcccctttggagcccgttcgctcgggtggggctgtgcccccgcaggtacgcggtgttcccgaagtccaggccgcctttcccagtttccccgaggttgccttccaccctcctcccagcgtgttccgggaccccagccttggcgtcgcgggcgtctccaccccacccctagctccgcggttttcagctcgacttgtcccagagtccgtgtgcagcccacctgctgccgtcccgggatccgctgagtgcggagcggggaacgtgcggtagcgagcgagttgtgttcagaacatccgccaccgatgtggctttcatttctcttcgtcccccgccttgcctgtccctgtccacacctaggttcctcggtcccgcacctccttacatagcaacacggggaacacggatcggcctctctctcctgtccattctcctcgcctgagaggatgtgtgggcacatttgtccaggtcctcctttgcacttaagtctccatgctacccctagccttagggccaccacaataccggatggcagttctggacatgcggggtgtccccaaagagagattacttcagatgatatgcagaccctgctttaaattaaaaagcaaggtgggcgaggtggcgcctactgctgtagtcccagctacttgggaggatcacttgagcctaggagttcgagtccagcctgggcaacatagggagtgaacgtctctaaaaaaataaaattaaaaagca

SEQ ID NO: 28832 - DNA, 1712 bp, Artificial sequence
  DNA replication origin
tgtggacagggacaggcaaggcgggggacgaagagaaatgaaagccacatcggtggcggatgttctgaacacaactcgctcgctaccgcacgttccccgctccgcactcagcggatcccgggacggcagcaggtgggctgcacacggactctgggacaagtcgagctgaaaaccgcggagctaggggtggggtggagacgcccgcgacgccaaggctggggtcccggaacacgctgggaggagggtggaaggcaacctcggggaaactgggaaaggcggcctggacttcgggaacaccgcgtacctgcgggggcacagccccacccgagcgaacgggctccaaaggggaggtcccgcggtgcccaccgcgcagagctcagggggtggtgcgcccggcccttctgcggcgcacagcccagcccaggaacgcgggcggtgcggactcagcgggccgggtgcaggcgcggagctgggcctctgcgcccggcccgacctccgtctataaatagagcagccagttgcagggctccattctgctttccaactgcctgactgcttgttcgtctcactggtgtgagctccagcatcccctttgctcgaaatggaccccaactgctcttgcgccactggtaagggaagctctgcgccctggaatccccatttcccagccctattacagagggtctctgggtttcaggaagtcgcattttaagttctgagcgacggggactccagtacttcgttagatgctttcttcctgatcacgcccctgagagcattgccctcatccctgggcctctacgtcagagttaagaatactgaggctcaaggctgaactgctccacatcacccagttggtcatgggcctgctggctgggccccagtgctctgtccaggctctgagcaatcagtgtggttgggggtgctggaaacattgactcttcagagttcaggacagaaggttctggctcgcagtctcaatattcctgggttgtatgtgcacgtgggaccttcctggtgcggtaaaacaggagggtccttgcccttcccagcgttagtggagaggacatggggcttctgttcctctgtcctgagtgggaaaggagctctgagggctggccctgcacagaggagggggcactggagactcactgacccactgctgtaccttctgcatctcactcactgcccactgcgttttcctcttccttgtaggtggctcctgcacgtgcgccggctcctgcaagtgcaaagagtgcaaatgcacctcctgcaagaagagtgagtgcggggccatctccaggaatctggggctgtggctcaggttgggagggaactcaaggctggccctgagtgcatccttctggggaactgggctttctttgccctcattgcccgtgtcattccctctccaggctttctgccctaaattcagatggggcaggacagcatttttctcgtgggacacaaaccccaactgtaccccctatggtttcagaacagagctgtgccagacgaaaaaaagcatcctctgggtctgggttctgagctcgagccaggcttgctattagggcagggaggtgcccggtcaagtctactgccacctctcactctccccttcttccccaggctgctgttcctgctgccccgtgggctgtgccaagtgtgcccagggctgcgtctgcaaaggggcatcggagaagtgcagctgc

SEQ ID NO: 28833 - DNA, 1202 bp, Artificial sequence
  DNA replication origin
gttggggtccatttcgagccgcggtaaggctggagatctcaagcgataaatggagcgactgctaggcccacccggacggcgtggtggagcgccacagcctgcggctgcttttctactcaggggagggggccgggcgcagaggccctgccccgcgcttgcacccgcccggctgggttcgcaccgccagcggtcctgggctgggctgggctgagcccagcataagtgccgggcgcaccatcccctgagctccgctccgagtgcgccgctcgaccgcccctttggctcgggtttgcgcgggaggggctgtgcgccgggtggtacgcagtgtccccgaggtcccggccgcctttcccagtttccccgaagttgcctttgccttccaccctcctccccgcgctttccgggaccccagccttggcgtcgcgggcgtctccaccccaccccctcgccccgccgttttcaactgggcctgtcccggagtcccggtgcagccctcctgctccagtccccggatcggtcgtgtgcggagcggggggcgtgtggtagggagcgagtcgtgtgcagagcacccgccaccaatgtggctttcgtttctcctccttccccgccttgcctgtccctgtccacaccgcggtccctcggactggctcctccgtacacagcaacacggggaacactggtcggcctctctctcccgtccattctcttcgcctgagaggatgtgggggaacatttgtccaggtcctcctttgcagataaatctccatgctccccacagcctagccggccaccccactaccgtctggcagttctggacctgtgggatgtccccaaagagagatgacttcagatgatatgcagactctgctttaaattaaaaagcaagatgggtgaggtcgcgggaagctgtagtcccagctacttaggaggctgaggcgggaggatcacctgagcccaggagttcgagttctgcctagtccacatagcaagtcagcatctctaaaataataaaattaaaaaacaagacatgcagttgtttctcttcagtatacctgactattgcatgacattgagtctacaccagtccctttttaatctctttcattctttgaatcctcacagcaatcctaaagggaaatactagttatgaacccgttttgctcatcacaggactacaaaggaaatgtccaagtaactggctg

SEQ ID NO: 28834 - DNA, 1640 bp, Artificial sequence
  DNA replication origin
gtgctctgcacacaactcgctggctaccgcacgctccccgcttcccactcagccgatccggggacaggagcaggagggctgcaccgggactccgggacaggcccagctgaaaacggcgaagcgagggatggggtggagacgcccgcgacgccaaggctggggtcccggaaagcgcggggaggagggtggaaggcaaaggcaacttcagggaaactgggaaaggcggccaggacctcggggacaccgcataccgccgggcgcacagcccctcacgcgcgaaggggcgccagaagggcggtcccgcggcgcgccgggagtggagctcaggggttggtgcccccggcccttctgctgcgcacaggccagcccaggaccgctgggggctcgaacccagcggggcgggtgcaagcgcggggcaaggcctctgcgcccggcccccttccttgagtaggaaagcagccgcaggttgtggcgctccaccacgccgtccacgtgcgccttgcggtctctccatttatcgcttgagatctccagccttaccgcggctcgaaatggaccccaactactcctgcaccactggtaagagaagcccaactctgcgccctgggattcccatttcccagccccagtactgagggtctctgggtttgaggaggttgcattttaagttctgagcggaaggggactcctttacttccttggggtgctttcttcctgatcgcgctcctgagagcactgccctccctcctgggcctctaagtcagagttaaggatactgaggctcaaggcagtcctgctccacatcacccagttggtcagggtcctgctggctgggccccagtgttctcctccaggctctgagcaatcagggtggatgctgagctagaggcattgagtcttcagggttcaggacagaaggttctggctggcaatctcagaatacctgggttgtatgtgcacgtgggaccttcctgataaggtgaaacaggagggtgcttgcccttcccagtgtgagtggagaggacatggggcttctgttcctctgtcctgagtgggaaaggagctctgagggctggccctgcacagaggagggggcactggagactcattgacccactgctgtaccttcttcatctcactcactgccaactgcgttttcctcttccttgcaggtggctcctgcacgtgcgccggctcctgcaagtgcaaagagtgcaaatgcacctcctgcaagaagagtgagtgcggggccatctccaggaatctggggctgtggttaaggttgggagggaactcaaggctggccctgagtgcacccttctggtgaactgggctttctttgccctcgttgcccatttcattccttctcccagctttctgccctgagttcagatggggcagaacagcatttttctcttgggatgcaaaccccaactgtaccatctatggtttcagaacagagctatgccagacgaaaaaagcttcctctgggtctggcgtctgagctggagccacgcttgctattagggcagggaggtgcctggtgaagtctgctgccacctctcactctccccttcttccccaggctgctgcttctgctgccccatgggctgagccaagtgtgcccacggctgcatctg

SEQ ID NO: 28835 - DNA, 790 bp, Artificial sequence
  DNA replication origin
ccagccgccccgtccgggagggaggtgggggggtcagccctccgcccggccagccgccccgtccgggagggaggtggggatgtcggccccccgcccggccagccgccccatccgggagggaggtgggggggtcagccccccgcccggccagccgccccgtccgggagggaggtgggggggggtcagcccccccgcccggccagccgccccgtccgggaggtgaggggtgcctctgcccggccgcccctactgggaagtgaggagcccctctgcccggccagccgccccgtccgggagggaggttggggggtcagccccccgcccggccagccgccccgtccgggagggaggtggggggggtcagcccccctgcccggccagccgccccgtccgggaggtgaggggcgcctctgcccggccgcccctactgggaagtgaggagcccctctgcccggccaccaccccgtctgggaggtgtgcccaacagctcattgagaacgggccaggatgacaatggcggctttgtggaatagaaaggcgggaaaggtggggaaaagattgagaaatcggatggttgccgtgtctgtgtagaaagaagtagacatgggagacttttcattttgttctgcactaagaaaaattcctctgccttgggatcctgttgatctgtgaccttacccccaaccctgtgctctctgaaacatgtgctgtgttgtccactcaggattaaatggattaagggcggtgcaaaaaaaaaaaaaaaagaaatttagcatttaattttaagcag

SEQ ID NO: 28836 - DNA, 1320 bp, Artificial sequence
  DNA replication origin
ccacctccctcccggacggggcggctggccgggcggggggccgacccccccacctccctcccggacggggcggctggccgggcagaggggctcctcacttcccagtaggggcggccgggcagaggcgcccctcacctcccagacggggcggctggccgggcggagggctcaccccccgacctccctcccggacggggcggctggccaggcggggggctgacccccccacctccctcccggacggggcggctggccgggcggggggccgaccccccccacctccctcccggacggggcggctggccgggcagaggggctcctcacttcccagtaggggcggcggggcagaggcgcccctcacctcccagacggggcggctggccgggcggagggctcacccccccacctccctcccggacggggcggctggccaggcggggggctgacccccccacctccctcccggacggggtggctgccgggcggagacgctcctcacttcccagatggggtggctgccgggcggagaggctcctcacttctcagacggggcagctgccgggcggaggggctcctcacttctcagacggggtggttgccgggcagagggtctcctcacttctcagacggggcggccgggcagagacgctcctcacctcccagacggggtctcggccgggcagaggcgctcctcacatcccagatggggcggcggggcagaggcgctccccacatctcagaggatgggcggccaggcagagacgctcctcacttcctagatgtgatggcggctgggaagaggcgctcctcacttcctagatgggatggcggccgggcggagacgctcctcactttccagactgggcagccaggcagaggggctcctcacatcccagacgatgggcggccaggcagagacactcctcacttcccagacggggtggcagccgggcagaggctgcaatcttggcactttgggaggccaaggcaggcggctgggaggtgtaggttgtagtgagccgagatcacgccactgcactccagcctgggcaccattgagcactgagtgaacgagactccgtctgcagtcccggcacctcgggaggccgaggttggcggatcactcgcggttaggggctggagaccggcccggccaacacagcgaaaccccgtctccaccaaaaccagtcaggcgtggcggcgcgagcctgcaatcgcaggcactgggcaggctgaggcaggagaatcaggcagggaggttgcagtgagccgagatggcagcagtacagtccagcttcggctccgcatgagagggagacc

SEQ ID NO: 28837 - DNA, 1364 bp, Artificial sequence
  DNA replication origin
gttgggagagtgcctccgcctcagccaatgggcggcagccacagagcgttctgtccgcagagccgggcgcggggcttctataaaaggcgcccgaagcgggggcgcgcgccccagagacgtgaactgtcgttgcagagattgcgggcggctgagacgccgcctgcctggcacctaggagcgcagcggagccccgacaccgccgccgccgccatggagtccgagaccgaacccgagcccgtcacgctcctggtgaagagccccaaccagcgccaccgcgacttggagctgagtggcgaccgcggctggagtgtgggccacctcaaggcccacctgagccgcgtctaccccgagcgtccggtgagagcggccccgacttcccgcccctaggctgtggccccccgccctctgctggggatgccacgtccggctgccctgtcctgtggcctcctcccgctgacggctgcgatcgctcggccggtcacctcccccagggctgtggtctccccttccctgccccgccgacgcgggcgcccctctgttgcccagtagccgtcagtaatcagcagcctgaccttgggcgagtcatttcaccctccaagcctgtttctcccccagcggccaggcaactcggtgttcctaattgggcttgcatccaatggctagaagtaagaaaacatccgtgctgcaaaatgaggtttctgaacgcagcctctctgcagggagaggagcgggcaggtgccacccggggccgtggcttgagaaacctggggaccgcccagacactgtggacggaaggccccacacccagaagcaggacgtggctcttctcctccctggccaccttccgccgtgcccctccctgtcgcactggaccgagcagccattgccgagtcccggggtggagccccgtgcactttctgaccaagagcgactgagaagggaagcaggcaggagtcgccttcagtctggttttaggacggcagcctctccattattagcaagacttccttgctttgttttggttgacacatctgtcaacatcacccttagcaccgcctgccctggccaccacgtgatgaggctgtaagctggcccttcctgtatttactttctgctctgatattatgtaagtgtcagcagtgttcttcactgcccacgagcataattcttcatcacacaggagagggcatccgggcaggaaaagatagtgaagtcgtgagttccagcttgtggtagcgcctgtgtctgtttttgtttcatatggtcaagaatgttttagaagtgagttttccttctgagttgttattttgaaatttgcatatttatttagtaagcttgcattccatgtcctctagaattcaccc

SEQ ID NO: 28838 - DNA, 1504 bp, Artificial sequence
  DNA replication origin
cggctgctttgcgtctctcacacctgcccttaccatcatcatagccaaaagtactcagcagcagcacctccaggtccagaggcacctccagctgcatgcacacacaatgaatgaaagactgccaggtgtccgaaccctggacatgcagcttgttgagttgcaggatgactctctgttcagggtccaaggtctcgttcctggaatccaggtccgtgttggggaggaagaacttcatcttggcgttcagccattctgggtctttggtgagcagcctcacaagacagctccacaggttcttgttgccgagctggaggccaacggggtccatgaggagccagccctggagggacagggaagataggtgagttgagggggacaggtaaactgggggcagatgagctgagggacaggggaacttggggggagttgagctgggggacaggcaaactggggggaggtgagctgggggacaggtaaactgggggggaggtgagctaggggacaggtaaactgggggcagatgagctgggggacaggagagctgagggggaggtgagctgggggacaggggaactgggggacaggggagctggggcacaggtgagctaggggacaggggagctaggaggaagatgaactgggggacaggtgaactgagggcaggcaggtgagctgggggacaggggaactggaaggaagatgagctggggaaccggtgagctggaggacaagcaaattgggggcaggtgatttgggggacaggggagctgggaggaagattagatggagaacaggtgagttgtggggcaggtgacctgagggcaggtgagtggggtacagatgaactagggggaaggtgatctggggaaggtgagttgggggataagggagtttctagggaagtcaagcagtcaagaaccagtccctacatttgagcgacataaaataggcagggaagtggcctctccatggagtcttgatgtctctgcccagggatcagctccagagatcagtctgtttcttctgcaccccctccctactccatttgtgcctgcaccctggctctctggaatggtcttgttcatcccctgtggacagtcccgtgaggatgcattactcattcttatttccatgaaccatttatgctgctctcagtctgagctaacctcatggcagagacaactagttgtctcccaaaatctgttcttcccttcttcctcagtattagaactactaaatattctctggtcatctagaatagattattatatcccagtctcccttgcagttatatgtagccatgtaatttggccagtggaatgtaagtagaaatgttgtctattcttctttgctccttcctgttgtctggattgttgatgggatggctggatcttgggcagccatattgaatcatgaggtggaacccatactgaggaaggtggaaggtaaagctgcccatctgccctgtgctcactgactttggacttctgttacatggcaggga

SEQ ID NO: 28839 - DNA, 869 bp, Artificial sequence
  DNA replication origin
agggaggactccagccccacaatacagtgcattgggccccccgtctcagcctctcagggaaccagctggaagatgaaggctgtcggctgatggcagaggctgcatcccagctgcacatcgccaggaagctggagtgagttgtccaccccaccgctgggtaccagggaaggccctgtagagccccaggaggtccccgtgttcgtaatcagcagtaagggtgctgatccactgccacccctgcttcctcccaactccagcaaagtcaagatggtttgaccatgccttgccttcacctccggcatgagccactgtcttagtccaatcatctagcacccttacatgtgtaaaatgcgttcattatacatcagtggcttgcattccaattcatctttgtagctgccctggagcacggtggggtggggtgttgcactggggaggtgtcagggtgggtgggatgttgcactgtggaggtgtcatgctggggtgctagggtagggagtggtgtgttcctgtggggatacactgttggggtgaggggtggtgagatggaaaggtaggctattaggctgctgggtgtgctgtggtgttgcatggggtgagggtgatgtttgggtgggggtgtcttgggggtcttaggatcaagtgtgggtcgggtttggggagtgttgagattgggtagcagtggtttggggcctcagctttggatttcaatcttcgctctgtcacttagtagcattgtgaacctgggaaagtaattgaatgtctctgggcctcggtttcccctctgtaaaatgggatcacatgaaaccatatatgtacaaagccttttgtacagagtctggtatagtcagggctcagaaaatggtggt

SEQ ID NO: 28840 - DNA, 1051 bp, Artificial sequence
  DNA replication origin
attaggagtaagttatttagggaggctgactctaggtcaggcactgtgccagcctctgggtgcatgggacttcctgccttacccgcagggtctcctttaattctcatagcaccaattagaggtggggaaactgactaacccaaggacacacagcagataagaaagaagggcagaatctggtttccatccaggtcagtctgactgcagaccccaagctcttaaccactgccttactctcccggaccagcactggctgagctccctggggagggaggtgtgcctgggattctccgtggggctctgctgtccaggcatctcagccctgggtggccagcagacgggcccagccaagtgaaagggcccagtgaacctcggggcagttcactctgatgaggcagggctgctgggatacttccaggaggggctgatgtttgagctgggtgttaaaggattgggagaattttatctcagaaaaggcaaggaagagaatgttgagctgagtgcggtgtgagcagaggcagagaatcttcaggcagggcttgatctaggagcaaatagtgaaggttatggctgaactgtgtgtgtgtgtgtgtgttgtgtatgtggtatttgtaggtattatgtggtgtgtgtgctgtatttgtaatgtgccaggtatgtatgtggggggtttgtttttgtggggtgtgtgtattgtgtggtgtgtgtggtgtatgtgtgtgtatgtggtatgtgtatggtatgtggtgcgtttgtgtgttgtgtgtgctgtgtggtgtgcgtgtgttgtgtgtgctgcgtgctgtgtggtgtgtttgggtgtgcttggtgtatctgtggtatatgggttggtgtgtagggcgtgtgtgtggtgtgggggaggtgggaaggaacatggtggaaggtgacagttggatcagactgtgagggagaagatgctagggactttgaacttcaccctggggttaatggggagccactgaggggcacagagtagcagaggggcactgtcagatgtgtgttgtgaagatccctctgggggctgtggagt

SEQ ID NO: 28841 - DNA, 2032 bp, Artificial sequence
  DNA replication origin
gccagctgtgactatcatgcctacccagagcctgagccctggagctagggatacccatggggaacctggacagcgagggtggcccagggcatgcagatgcagagttggcctcccaggggacagagcaggagaggggagctgacaggacagctcagctccagggctgggcaggctgcgctaacccttgcctctgcctggtcttctgcagcttgtctaacaatcaatttgatgaggagggcaccaaggcgctgatgagggcccttgaggggaaatggatgctaaagaggctggagtaagtagtgatggtggttgtgggtgagtgagtggtgggggtggttaatggatggtggaagtgggtgagtggtggggttggttaatggatggtggaagtgggtgagtggtggggttggttaatggggaatggggtgagtgagtggtgggagtggttaatggggaatgggctgagtgagtggtgggagtggttaatggggaatggggtgagtgagtggtgatggtggttaatggggaagggtgtgagagtggtgatggtggttaatggggaagggggtgagtgagtggtgatggtggttaatggggaagtgttgtgagtgagttgtgttggtggttaatggggaaggagatgagtgagtggtgttggtggttaatggggaagggttgtgagtgagtggtggcgttggttaatggggaagggggtgagtgagtggtgatggtggttaatggggaagagttgtgagtgagtggtgttggtggttaatggggaagggggtgagtgagtggtggggttggttaatggggaagtgttgtgagtgagtggtgatggtgattaatggggaagggttgtgagtgagtggcgttggtggttaatggggaagggagggagtgagtgatgatggtggttaatggggaagggttgtgagtgagttgtggggttggttaatggggaagcgttgtgagtgagtggtgatggttggttaatggggaagggttgtgagtgagtggtgatggtggttaatggggaagggggtgagtgagtggtgttggtggttaatggggaagtgttgtgagtgagtggtgatggtggttaatggggaagggttgtgagtgagtggtgttggtggttaatggggaagggggtgagtgagcgatgatggtggttaatggggaagggttgtgagtgagtggtggggttggttaacggggaagggggtgagtgagtggtggtggtggttaatggggaagggggtgagtgagtggtgttggtggttaatggggaagggggtgggtgagtggtgatggtggttaatgggaagggagtgagtggtgatggtggttaatggggaagggttgtgagtgagtggtgatggtggttaatggggaagggggtgagtaaggggtgggggtggttaatagggaagagttgtgagtgagtggtggggttggttaatggggaagggggtgagtgagggatgacagtggttaatggggaaaggagtgagtgaggggtgatggtgcttagtgctgcatggtcagtgagtagcatgcctaggaacctttgcatgttttgtgaacacaaaccgccatgtttctggatggacccaggtgagctgaatgcccttacatgaccttttactttctattctggatctcagtgccagcaagaaccttggtcataggaaacagaatacacaactcaaagcaatccaagacagaaatatattggcttatgtcatggaaaattacgaggccaatgacttcaggcacagctggatccaggggttctatatttgtcaggcttctctctcacacacttcactctggcccttactctttctctgtccaccttggcttccttctcaggcaggccatccctgcacctgcaggcttactttctctcagcttagtggaaagggagtaccattctctctgtggttacaacaaaaggtcctagactgagtctcactggactagcttgagtcacctgccccaccctaaagcaatcactgtggctgtg

SEQ ID NO: 28842 - DNA, 1708 bp, Artificial sequence
  DNA replication origin
catttcatctaaatggagccatgtaatatttgtctgagactggcttctttcactgggcataatattttccaagtttgtccatactgtagcatgtatcagtacttcccacctttctttttttcctttctttttttttttggaggggggatggaatctccctctgtcacccaggctggagtacagtggcgcaatcttggctgcaacttccgcctcttgggctcaagtgattctccttcctgccttccgaattgctgggattacaggttcttgccactacgcctggctaattgttatatttttagtagagacagagttttgccatgttggccaagctggtcttgaattcccgacctcaagtaatcgcccgccttggcctcccaaagtgctgggattacaggtgtgagccaccacaactggccagtaattcgtacctttctatggctgtataatattctatgttgtgtggatataccacattttgtttttccattcatcagtggatgaacatttgcgtggtttccactttttggctattatgaataatgctgctacgtacatttgtgtatgttttgtgtggccatatgttttcatttctcccgggtagatatctaggagtggaattgctgtgacccctggcctttgtactctgcctccttggctagggatctagtatcttccttgacaggcccaactatctcatccttcaggtttcttaaaggaagcctcgctgactcccatggctgagttgggtcttctgtgccaccctacctccaatctttgcacatttcatatggtgatatgatggcctgggtcctgatcttggcccccacaggtgagcaacttgagagagactatctgctttggttcaccactgtccatcccagtgcctggctctcctgctgctggaaagacaagagacagattctgaggccagagcaatcaggaaagtcttcctggaggaagcggggctggagttgggttgataggttggtttgccccagagcggggcagagggctttgattggcttcggtggaagaaaggtgaagagagcttggagaaaggaaagatggatgggtgacaggcaggcagagaacaaagctcagagccccgggggctgtttagtctcggcccctgtaaggctgcaaagtgccagtgactcagacgtggagggaggctcacaggctgcagcgcgcgaggctcccacattaaccctcacctgcctggaatcgaaaagccacaatggaagcactcggcattaaccctcagctgcccagtccttgagccccagggccaagggctgtggacatggccttgagatccccgggaaagccccgccccccagaatctggttacgtgaggctcagccttctgatgcccggtggtgaacttgcccagagagcacctaaataccgcggagtggccaaaggcttgagcgcccagcgacagacaagtgtcctaagaattggtgcctcttctagggaaaaggaggcctgggctccaaggccttaaagactcgcctaattttccgcacggatgagtagacccaggcccagttcggatccgtctttatcttatcgtctgtgtcagagaaatatgtcatatttccaatctctggcggcaagaaaatgccgagctcttttgctattgaaaaaaaaaagggaagaaaacactgcggccctaatcctgcccaatacaacccagaaccca

SEQ ID NO: 28843 - DNA, 1260 bp, Artificial sequence
  DNA replication origin
tgcggtgagtggggcccgggcaggcggggcagcttggcgtgagtgcccaacttcggccttggggctgggctctttgatccagctgcgggtccgaaggaacccgggttccgcctcggggggctgcggcgctctagcccccgccgccagcgcgaacccggactccggcgcttcggtgactcagctccgacccggccacgcgggggcgccccgccggctcccggactgcggggaagggcgggcggggtccctggggaggggggcgccctcgggggtccgagcccagctgctttggggacccttccacccgccccgaggggcttggagggcgtacgggaggtggagacccgccgctgccgcagctgctgaaggcgtgaggtcgccctggctctcggcgggcgctggctcctctccgctcccctctgccctcctcccacccctcaacacccaccccctgccccaggcaactgccggagggccggctcccagccccggtactgggagcgcagagggggagtggagctgggcagcttcccagaagtcggagtgtgtttgcaaactagtttttgcgaaaaagctgtctggcacctgtgtgtttaaagggggtgtgggggtgggcatggagagagcgggcgaacaaggccctctcttattccccgtttctcacagcgatgctcctctgaaaatagaggggtcttacaccctcttccctgctcttcccaccccatcccccagcctcgctccacgtccccccgagttcaagaagctctcctatggggaaggggctgcttcaaagggggctgtgatttgcccaaggtcacagatgctgctggctctggtagctaatagggtgttcatcttgcatctgaatcccctgccccatatgtactgggggaagggacaaggggtctggaagaatgatcttccagacaaaacgcccttttttttgtctgccttagttttttgctcccttagaggtgtgtgctgtcatcaaaggttggggggctttttctgccccttgggcatccacagcttcacggactgcagggagcccatggttttcaggaaacaggcggtgtgcgcagattgtaatccctggcagctgcagcctgccctgatggggaggcctgggagacctgggtctgaaccccacctatgaccaacagggaacttggcccagaccctccccccctgtggccctctgggtcaccatctgtgaaatgggctgatgttccggggcctgcctcctggagaatggacaca

SEQ ID NO: 28844 - DNA, 896 bp, Artificial sequence
  DNA replication origin
ggagtcctcagtgtctgttattcccctctgtgtgtctgttctgtgtgcacccattgtttagctccgtcttataagggagaacatgcagttttttgttttctgtttctgagtcatagtgggcatcctgtattctatatggcaacactaaagacaggtagtgtcatcggtgctgaggtgggggcaccgtaggcctgtggggagccgaggaggtaacccaacccagcttggggccatcaggcttcctggagggggcaagctctaagccaagaggggaaagggaagtagcagagtgactagaggtggcagtggggcagggggagccttcagggcagagaacagactgtgcgaagcctgcaggacgagctggaggaactggcagaggtgggtgatagaccctccattggaggtgagcagggtggagacagatgtgggcgttaaagggccacggggacccctgcagggaccacataggggctcatcagcagattggcatttctaaaggcctctcctggctgctgagtggggcgtggctagggcgagagtgggcagagtggagggtggagagaaggggcgaaggcaaggaaactcagggcagaggccaggactttctgtgtgaccaagtgagtgtgggccgaagaggtcaccaagatttccaactgggcactgaggcgggggtggtgctgcttactgagatgaggaacggggtgggtgctaggctcagcaggggagatggtaaggtgggagtcccaggagaaaggtggatgatggctgggcacagtggctcacgcctataatcccagcactttgggacgctgaggcagatggatcatttgaggtcagagagtttgagatcttcctggccagcatggcaaaaccccgtctctactaaaaataca

SEQ ID NO: 28845 - DNA, 782 bp, Artificial sequence
  DNA replication origin
tccctggagcccagtgagctatgagtgcactgcactccagcctgggtgacagagtgagactctgtctctaaaaaattaattaattaattaattaaaataaaaaaagagacagctgcatgagagagccaggcagatgaagcggagactgagcccgggggcagagcagggaggaagtgaaggagggaggggcagaaagcaaacccataagtagcagcatttattgggcccttagaatgttctagataccactctgcctgctttaccagtttcaactaattctcaccaaagccaatgaggtaggccctgttatgaacccattttgatcgttgaggaagccaagcagtcagggctcggggaggagggagtggggttggaggctgcccctgggcctggtgaggtaaggctgagaagagaccatccgtttcactgaccatggctggggccattatggcagagacaagatggggaggggagaagggcatggagacatcagccagtgtggcagtcagccagcgtggaagtcaactggctgtgagggaggggaagggttaggtcaagcaggtctaaaggctgaggaggagccaggagaggcgtggaggtgaattgaagcgggggtccctgaggtgtggttgtgggtagtcctggggcaggaggcgggggctcctcatagaaccacgggcaccaggggaggggtggtttggtggctcagagatggagacgtcaatgagggcagaagctgtgatgctggggagtcgctgcagatgggcagggaatgctgtccc

SEQ ID NO: 28846 - DNA, 1131 bp, Artificial sequence
  DNA replication origin
ccgggagggaggtgggggggtcagccccccccccccccggccagccgccccgtctgggaggtgaggggcgcctctgcctggccgcccctactgggaagtaaggagcccctctgcccggccagccgccccgtccgggaggtgaggggcgcctctgcccagccagccgccccgtccgggaaggatgtggggggggccagcccccagcccggccagccgccccatccgggaggtgaggggcgcctctgcccggccgcccctactgggaagagaggagcccctctgcccggccagccgccccgtccgggagggaggtgggggggtcagccccccgcccggccagccgccccgtccgggaggtgaggggcgcctctgcccggccgcccctactgggaagagaggagcccctctgcccggccagccgccccatccgggagggaggcagggaggtcagccccccgcccggccagccaccccgtctgggaggtgaggggcgcctctgccctgccgcccctactgggaagtgaggagcccctctgcccggccaccaccccgtctgggagatgtactcaacagctcattgagaatgggctatgatgacaatggcggttttgtggaatagaaaggggggaaaggtggggaaaagattgagaaatcggatggttgccatgtctgtgtagaaagaggtagacatgggagacttttcattttgttctgtactaagaaaaattcttctgccttgggatcctgttgatctgtgaccttacccccaaccctgtgctctctgaaacatgtgctgtgtccactcagggttgaatggattaagggtggtgcaagatgtgctttgttaaacagatgcttgaaggcagcatgctcgttaagagtcatcaccactccctaatctcaagtacccagggacacaaacactgtggaaggccgcagggtcctctgcctaggaaaaccagagacctttgttcacttatctgctgaccttccctccactattgtcctgtgaccctgccaaatccccctctgcgagaaacacccaagaatgatcaataaaaaaaaaaaaaaagaaaaagaaaaaaaaaaacaaacaaaaaaaacaaaatgagtaaactgaggtttggagtg

SEQ ID NO: 28847 - DNA, 1454 bp, Artificial sequence
  DNA replication origin
agaggcgcccctcacctcccggacggggcggctggccgggcggggggctgacccccccacctccctcccggacggggcggctggccgggcagaggggctcctctcttcccagtaggggcggccgggcagaggcgcccctcacctcccggatggggcggctggccgggctgggggctggccccccccacatccttcccggacggggcggctggctgggcagaggcgcccctcacctcccggacggggcggctggccgggcagaggggctccttacttcccagtaggggcggccaggcagaggcgcccctcacctcccagacggggcggctggccggggggggggggggctgacccccccacctccctcccggacgggcggctggccgggcggggggctgacccccccacctccctcccggatgggcggctggccgggcggggggctgacccccacctccctcccagacggggtggctgccgggcggagacgctcctcacttcccaggcggagtggctgccgggcggaggggctcctcacttctcagacggtgtggctgccaggtggaggggctcctcacttctcagacggtgtggctgccgggcggaggggctcctcacttctcagacggtgtggctgccaggtggaggggctcctcacttctcagacggggcggttgccaggcagagggtctcctcacttctcagacggggcggccgggcagagacgctcctcacatcccagacggggcggcagggcagaggcactccccacatctcagacgatgggcggcctggcagagacgctcctcacttcctagatgggatggcggccgggcagagacgctcctcactttccagactgggcagccaggcagagaggctcctcacatcccagacgatgggcggccaggcagagacactcctcacttcccagacggggtggcggccgggcagaggctgcaatctcggcactttggggggccaaggcaggcagctggggaggtggaggttgtatcgagccgagatcacgccactgcactccagcctgggcaccattgagcactgagtgaacgcgactccgtctgccatcccggcacctcgggaggccaaggctggcggatcactcgcggttaggagctggagaccagcccggccaacacagcgaaaccccgtctccaccaaaaaaatacgaaaaccagtcaggcgtggcggtgcgcgcctgcaatcgcaggcactcggcaggctgaggcaggagaatcaggcagggagtttgcagtgagccgagatggcagcagtacagtccagctttggcttggcatcagggggagaccgtggaaagagagagagagggagagggagaggagggagagggagaggagcagtttactcattttgaaataggaatattaaagcttatctcagaggggccgagcaggatagctcacacccgtaat

SEQ ID NO: 28848 - DNA, 1147 bp, Artificial sequence
  DNA replication origin
caggaagcagggtccacgcgggaggtgggggtggggtggctgtggcctggggtggcgaccctcgctgccaagctccccactgtgttcccagggcatagaatagcgcctggcacagtttgtttaatgactgaatgactccgtttggcaacttacatgcccatttttccgacgagaaaagagagcttagggctattcagtactgcccaggtctagtggatctggggctgggttccgagtctgctgtcgccttcctggagagcggggatgactccaggatcctcgaatgctggaatgcatggcatgggaattccaaggtgccctccctctcacacagtcagggggtggtgtgtggctgtgtcgtggccagcttaggcgcccggagcctctgtcccctgcccctttgtctcgtgtgatacaatgggtggctttttgtccccataaagtccctttcactgtagggagaagggccagagcgggggtggggaccgagcctggccaggctgagttctgagtgtccttggcttgcccagatgtgtccccagtgagggggaccccaggaagggtttgctttgccatgctgggcgtggttttcctggatggagcagtgggaatagagaggccggagctggggaaggactcggggacctgggaagcactcaggggccatggatggacttgggggcaggggaaggactcgggggctgtggaaggacttgggggctgtggatggactcaggggctggggaaggactcgggggctggagatggactcgggggctggggatggactcgggggctggggaatgactcaggggccagtaaaggacttgggggctggaaaagggggttgtggatagactcggggactgtgtttggactcgggggccatggaaggatttgctgccttggcccctttggccgttacgttgtttctaaaaacctttggttcagtcacccatgtttaaaaagctgatttttgccaggtgcagtggctcacgcctgtaatgccagcactgtgggaggccaaggcaggtggatcatctgaggtcaggagtttgagaccagcccgggcaacatggtgaaaccctgtctataccaaaaatacaaaaattagccgggcatggtggtggcacgcacctgtaatccc

SEQ ID NO: 28849 - DNA, 1551 bp, Artificial sequence
  DNA replication origin
ggctcacactgttccctgcccttggaacaccctttccctgcgtctgcctcagatttcagtgaagtctctgctcaaaaaccacctcctccaacaagccttcctggtcgtgaaattgctctccttctcctctgccctttcgcaccacttctcacacccacctggctctcccctgggcagccaggcagctgctcatggctgtgcccctcacaaccagcccagagcagagcattctagcggtggcggggtcagtggctctccccatctgcagaattaaatgattccaggaactagacctcttccctcagaagacagaatcttctccccttctcccccaccccccaaaagagaaacaaacaaaaaactctgggagaactgttaaaaatgaatttctggctgtacttcctgagattcaaattccgattgcacatttttttccgggggtggagtccaataatctaaattttaaacaaacccgccaggagattcagaggttggggagggggcccacagagatctgagaaatcctgaaatgagatagcactgacccaggtagaggtgggcccgcacctggagaggtcagggaagggagactggacctcagcccagggtctggcaccaaagcaaccaccctgccctctagcttgggcctcgcagcagcgctagcacccagcaataggagacaatgggaaatgtccactcgctggattgctaagaaatacaggtcctggcccaactccaattccacctgagtcctctgaaaatgtatcaggccctcacccacccagggcacccacccagcttccagaccctcacgaaagggtggcagaggaagaagctaacatccgggcctgtggctggtgtgggagtggaggatgttcccatgggtccgcctcagttggggtctgtacaggggtctgggagagagtaggagtcttgcccctggctacccacaaacccctccctccagcgatatctcggtcccgtggggctggctaaaccggctgaaacctggcgggtcacccagagaaagctagaagagcccggctcccgcgcgggcgcccacagggtagtgcctgagtgtgcgtgttggggagtcggatgtgccctctagattagatgaggaatgttcatgggtgcggccacccggagccgctgggagcgggacagaaggtggtcagagagtggactttgcctcagactgggttccctagagggctgggggcactgtccgggcagaaagaggggtgaaaaagagagaggagggaagggagggctgggaagggttggcgggttgtgcgcagtgactgtggctccggtgggggcttctgtggccgctggtaaccaccttggagggggcacgatggggcacgggcagtgggcactctgtacacggtgcagggtgctcacgctcgcagcgacggccacggggtagtgtcgtggtgagagggatgcagggcgatcttgggggcgtccgtgcgggaagcgccctaggggtacgcgcagcgcgtcggtgacagtgtgagcccgggtggggagcgcaaggttcgcgaa

SEQ ID NO: 28850 - DNA, 1156 bp, Artificial sequence
  DNA replication origin
ttcggcgccctgcgcaggactgctggtccgcgtgctaactttcgacgggaactcggccatggcggctccgcttgcctcccgaggtcgctacggccgccgtcgccgcccctccagcggtgggtgccggctcccgcgccgcttttcccccaggctccggatccctgtgtggctccaggcgctgcaggaggcgtcggggctgggagcctggggcgccaggtgcggccgagatcccggctccgcccccgccgccggggccgcccccttaaccctttgctcgccgccgccgccccagccgcgaccggttcgtgggcagccgcgtccactccccggaccagtaaacaaccccgggtccgtgaatcggctccgccagcaccagcctagaccgcttcgccggcctcccccggggcaagccgcccgctgggaatttcccggctctcgcccaggccgtggtagcttccgcgcctagggataaacttgtggtagctcgcgggggacaccgctctcccaggcgctttctacgcgctgtgcaccctcggcctaggccccggcgcagcgactcttgaagagtcccgggagaaggctggatgcggtggctcctgcctctgatcgcagcactttgggaggctaaggtgaaaggataatttcaggccaagagttcgagaccagcctgggtaacacagtgagacgccccccctccccccgtctgtattttatagaaaagaaagtaaagaagaatcctgggagacccagcgcggggaaggggagggtctgggtaagcggtgggtaagcggtagaagggggaggtccttttctgcctattaatgctgttttcacttctgaacatattttatataacttagatgatcgcggagcctcagtttcctcgtctgtcatatagatacgaaggaaacctgcctcacagagcgttgtagggaataaatgaaatattccccagaaagctcctgacagcgtgagggaggaggggtcactcagaagatgggaggtcatatacagtttcattgccacacatgcaccctaaaatacttacacacacacacacacctcttgagcctagaggtttgcacagataggtcatcatgcattcatcaaccaatgtttgctgaacacctactacatgccaggccctgtggataca

SEQ ID NO: 28851 - DNA, 1285 bp, Artificial sequence
  DNA replication origin
cacacctggctcccttatgccacccacaccacctctctgtgcttccaggcacagccactttgctcgctgggccaggcagggcggtcgctggcaactggaaatctgtccagcgctgcatctgggggaagcgaggtgcccagccccctctcgcacatccctggggaagcggctgccaccggccttgagctttacccaggcagggtctggggcccctgatgtcaggcttgagggatagacaaggggctgggggctccctaccctgtttgtgcccaagtcaagccccacttaccagccagcaggacagtcagatggcagaaggtggccaagcggagcagccacgacagagatatcggagccatggctgagggtgggcaagagtcccggcgggggccaggcaggcggctagagccaggcggcagagctcagtgctgtccccttgccgccgccagagatctgtggctttttataatggggttggctgcctccgcctccagcccccgcaggcaggagggtgggaggggagaggaagggagccagtgtgcagccgctggattcctcaggatgttgccaaggaaccaagccggctttgtgtccctgggcttctcaccatcctaggcttgtcatactgggaccttccccgggaggctggactgggcctgcctgggtacaaaggcctcctctcctgccacaagctgggaacatgccctaggatctggcctggggcccttgatcctaagtgggcaacacacaaaaggccagcaggccgtggaatagagagcggggcgccaaggggccgggagagactcagggcccctccatcctgggtctgacaagctcttctttgatccagagaatgcctcgcccacatcaggatggacccctaaatttcccctcttagaatcccaagctcctgggggaccttgttgatctatgcatctccagagcccagcagggagcctgaagtcagcaggggcttggtgcagggtctgctgaaagaaggattgagtccaacttcatatggatagatggggaaactgaggcccggagccaccccaggttatccacagcatcagagtggagaactcccctcccaccaccatgatgagcagaatgtggacagctcaggacccaggagagagccctggcctccctgcctccacctcccggtctcccgctccctgctttgcacccactcccacctctgctctggcccctgttagcccaaagaacaaggtggctgccaacccatccccgataactctgtggctcttggctcctcaactct

SEQ ID NO: 28852 - DNA, 800 bp, Artificial sequence
  DNA replication origin
ataaataaaacctctgatactttgtgtgcctaatttacctgtccatcaggctgggagccttctgaggccagaggcattccttgttcatctcactgtacctcacagcacccagcacagggcctggcaagaggaaccagcatttgttggttgactgaataaacagagtgatctgatggcatttattgggatggaagcactctcttcaaactcagcaccagtgcctatgggagaaagagctcaaggttaaggataagagggcctgagatttttgtatatactcaaaagtaattccagccagtgttggctgaatcaggaagtggatggatggatggatggatggatggatggatggatggatggatggatgggtggatagatggatgaatggatggatggatggatgggtggatggatggacagatggatggatggaagaagggatggggaggggatgatgagggatggatgagtaggtgagataaaagggggcggaagattgacaggtggtaggtaggggagagggagtgggtagatggatgaatggagatgaataggggttgggcaggaggtggcaggtgggcgaggaatgggtagaagattgataagagtgggtggacgggtggatggataggtagatagatgcattaaagagagataagtaaactgagactaatttcattcaatgaatattgattgagtatccaccttgtgcttgatgctgggaaactatgataccaagacagacaaggtccctgccttcctgacactcctatgacagataatatatgactggctggatg

SEQ ID NO: 28853 - DNA, 1057 bp, Artificial sequence
  DNA replication origin
atggtctctgctctgcccatttccatttgggggcccacagggcagggtctgtgctatcaactcactcccttgcaggccctctgggcctcagggtccaaagacaagttagtccattggcagggactgtctaaggtgctctgctggtaaggactgtgaggctgcatccaggggctggagagaagggcctcaggtcaatgagtgttgtcagggggacaggtattccttacctccctctttcctttcacagatgggagtatgttggtggcttgatggtggaactaggatcagaacccagccttcagactcagcacagtgtagaccaaagaggaaagtcaccagatacccttatctccccttcccacaatgcctaaccaagggcagagcctcactggaagcagtgccaggaaacaccacactagcctcatgcaagaaaagacatgtcaccagtgggggcgtgggctctgtacagaggatggggctgggggagatagcaccgcaggtggccggggtgactggcaactgcagcaggaccaagagacacaatcaggttgcagggagtgggcagagggcctggcctgatgctcatgtgtgagatgggaggactgtagtactcacagggcagcatgggtcagaaggggctgggcatttaataaataattgttcattggggctgggatggcgtcaaagggaacctctaaccagccagcagcagaggagagttttggggctggggtgagttgggaggccaccccctctgtccctggcaggtggagaatggtcaaggctggcctcctggggaatgcctgggagcttggagcttgtgcacctggaggatcccacctcccccctccaatcatcccagctcaggccaggcccttgggtgggggtgggtatgaggatgagggatcccaggcagctgtctgaatcaaacaactagacacaggccagaggagttcacacgggcaccaggacatatgaattactaccacagctccgggggatgtagcgaaggccctccgccatctctcctgccatctttcgagggcagccctggagg

SEQ ID NO: 28854 - DNA, 1016 bp, Artificial sequence
  DNA replication origin
aatatatatattatattatatatatgttatatatattataaatatatattttatatatatataatatatatttataatatatataatatatatttataatatatataatatatatttataatatatattatatatattataaatatatataatatatatatatatatattttttgagatagagtcttgctctgttgcccaggctggagtgtagtggtgtgatcttggctcactgcaacctctgcctcctgggttcaagtgattctcctgcctcagcctcccaagtacctgggactacaggcacctgccaccacgctcagctgatttttgtatttttagtagagatgggatttcaccatgttggccaggctggtctcgaacccctgacttcaagtgatccacctgcctcggcctcccaaagtgctgggattacaggcgtgagccaccacgcccggcctaaaaaagtttgaaaaaggtgaaggagtgagtcctgcaggtatctggggacaacattccaggctgaaagaacagtccgtgcaaacctcctcaggaaggagcatgtctgtctggttggtttgaggcatagggaggaggccagggtggctggggcagagtgaaccagggaaccaggagatacaggtgggcagagagcagggcacagaactcgcggggcctcgtggctgctggagggtcttggacttgtcctctgcgtgaggtggagagccacggggacgttctgaacacgggagattcatggtccctctgctgctgtgctgagaatacactgtagggggcaaggatggagacagggagagcacccagaaggcagttgtaggaagccagggattgatgctggtttctgggtgtatttggaaagcagagacatgagctcacccaacagatgggaagttgggggcgagaggaagaggcgtcagggatagcgcccaggtttctggccctagtaaccggaaggaaggggctggcagagaaggaggagagagcaggtgtaggggtggg

SEQ ID NO: 28855 - DNA, 1611 bp, Artificial sequence
  DNA replication origin
gggcacagaactcgcggggcctcgtggctgctggagggtcttggacttgtcctctgcgtgaggtggagagccacggggacgttctgaacacgggagattcatggtccctctgctgctgtgctgagaatacactgtagggggcaaggatggagacagggagagcacccagaaggcagttgtaggaagccagggattgatgctggtttctgggtgtatttggaaagcagagacatgagctcacccaacagatgggaagttgggggcgagaggaagaggcgtcagggatagcgcccaggtttctggccctagtaaccggaaggaaggggctggcagagaaggaggagagagcaggtgtaggggtgggtgggaatcagaaattcagcttcagacttggggggttggagctgcctatttggtatggcgagtaggcagctggacgtagaaggaggctggagtttgcgagagaaacttgggagtggttggcatatagatgatatttaaagtcagaaacgtgtactatttgccagatataagcagtaaggcagttgatgcaaaccaaagccttctaatgtaattattgttattattttcattttgcagctgtagaaactgaggctcagagagaagtgactttgagctcacagtgtcaccgcctgctgatgggagagctgaattcaaaaccaggtgacctgacctagagtctttgctcctaacccctccactgtgaggtgaccccctcgctggatctttcagggcatgtgttagatgagcggtggatggactttggatcaagggaagataatccatacaagaaggggacaggagtttggaagcagcaaaccaagtcacaaagtgaggggacgcactggccctcaagaaagctcaatgttggggagcagggagatgagactgaataggaaggaggggctagatggaaggtacagcttcaagattggcctgaaaagttttgactggatggggaaggaagcagggagccattgacggttttggaggaagggggcattacatggtcagggcagcccttgtgaaagatccaccacatgtgggcatgcagctgatgagggaggtgtcaggagagaccagagaggaagaaataggcccagaagtttttgagactctctgggtgtgaaggatgagggctgagccagtggagatgagaaggaagcaaggaagccaagctcccactgaagacagcgctgggcagagtctctgcctgatgtaatgtgggggatggaggcgaggaatgagtcaagggcaaagtttcagacttgggggcagatggggagatgggaaacaatgctggcttgaacagaaaaaaaggaggctggtgtgagagggaactcggttttgcccttctggtacctggggctgagtgaaccatagcaggacagacttctgcttcccagcagctcacaggttagtgtgggggacagaactgcacagagctggccaggctgcaaggcagagagagctgaggggtgccacagaaagatgggccggaaggaggagtgtccaggtgggtgtgtctgattagttactggtcagggctggagacagagatttaagaagtatttatcaggccaggtgcgg

SEQ ID NO: 28856 - DNA, 940 bp, Artificial sequence
  DNA replication origin
cctgtctcaaaaaatatatatatgtttactgaatgtataaataggtgagtggttgtatggatgggtgaatgaatgaatgggtgaatggatatggatgggtaaatgagtgaatggatggatggaggatggatgatggatggacgtgtgggtgagtgatgaatggatgagtggctggaaggtggatgaaagaatggacggatggatggatggtagataaatggatgggtggatgtgtgtatggatgatggatagatggattggtggatggatggtgaaaggataaatagatagatggatgggtagatgaatggatggatagatggatgggtagatgaatggataaatggatgggtagatggatggatggtagatggatgtgtggatggatggcaaaagaataaatagatggatggatgggtagatggatggatggagggatggatggaagaatggatggatagatggatggatggtagatggatgtgtggacggatggtgagagaataaatagatagatggatgggtagatgaatggatgaacggatgggtagatggatgtgtagatggatggtaaaagaataaatggatggatgggtagatgaatgaatgaatggatggacagacggatggatgaatggatggatacatgaatggatgaatgaatgggtggatggatggatggatggatgatggatggatggaaggatggatgaatgggttgatggatgatggatggatgcatgaaactggatgggtgagcagatggatggactgatggatgggtgggtgtatgtgtagatgtatggctagatagatggatgtgtggttggatggatgaatagaagtatgggtgcatggcttgatagatgatgaatggatatatacatgcatgaatgcatggatagatggatggtcacttagagattctgaactacaacat

SEQ ID NO: 28857 - DNA, 1009 bp, Artificial sequence
  DNA replication origin
tgcttccttggcctccctacctcagcctcagcttctctctttgttctgtgctccaagtcagtgggctgatccccctttcagaggaagagcaaagtagccgatggctgccagggcccagtctcaactaggttgagccccagggcagggaggcacaggaggggaagtggggccagaaccaccttctccaagaccagccctgctctgtctggtacccaggtagggaagctgggtggcagatccctctcccactccgcatgccccccaaccccactcaggctgagccagggatccttgagcagcctgagccgacccgcccccttcaaggcaatgggagagagaagggagaaggggacaggagtcctgggtcaaacacaagacttgggtgacctcagtcaccagggctgtccttcctacaggggaaggggcaactgccagacctgtctttggcaggggggcctggcagaggaatagaggcagctctcagacagcctcgccgagatcatgaagttgatcccctctgctcctgtcttctagggggtcttcaccagttgggggtctacagagggtaggacaggatgcatgcccagtaagacctcttctctgtagcccctccaagcccccagttcagggccaagcaccaagcaagcacagagtcacccaccaacaacttggagggaagcagcctgtcccagagcactggaccattctgcccaaagttctcatttggaaaccacataaatatcagcttcagtgcctcacaccaccccgtctcgcccagccaaccactccccttttcaaacacttctttaacattaaactcgacaaccaaaaatttactaaatatctgcacacggaaagcagtcagaagcaaggggagaggatgacctaaaagaaaagaggccaggagaggtgaggggaggccgggggtggggggcaaacggaagggagaggaggccaggggaagtgagacgctgcttctcagctcagacacagcccggccttgccagcc

SEQ ID NO: 28858 - DNA, 1445 bp, Artificial sequence
  DNA replication origin
tgggattttcttgttcttacatctgtccatttgtttctggccacagagagacatctggaatgtcagctccctggtggctcggcctcgtctgtctagttaacagctctatcccagctcccagaatggtgcccggtgggaaggagatgctcaatatttgggggctgaacacgtaattctctccaggacttgtcctcctccccatcctttcttccaccaccaccagcctccatctggctggacctggctcagcttccagaggtgcgtgagccacagtgggctcccagctcctgggtctcagcgctgactggcatggccagcaggctgttgttactggagaaccagctgtgcccaagacccgcagtttggttcagagctgcctcagggaagagcatgctgctgacatcgaggccaggcctagttgggcggccccaccttggccagggttgtggggtgaggtcatgcccagccctgctgccctgcccaggagggaagtgctgggagtaaccagtaccagcacagcaaggcaagcaactggggagaggaggcacagctcctgggatcagagttgggggtgggggcaggaagagcctgtaccagcgccacatccctctgaaagggtccaggaaagaacctgccctaagcaagcccacctcacactgcccaagtggagtctcctagagatactgccaggcccctcgctgccctggccatcagacccctccaacccacaccctccatccaagcggaagcgccccagcaactgacgtgtccccatggcttggggcaggcaggctgcacagagcccctgctctgccacatcacccaggtgcccagcctcggctcatgccccttttcagtaatagaaagcatgtaactggatctagggccttgcgggccctgggggagaaggtggacaggaccttgggggccaatggagaaaggttcaaggacaggaggcagctggccatgagtttgggctgtggggagaaaccccataggcaggagggggtcggcagtgggggccagctggggtacagaaaatcatctcttggaatttggaggaggtgagcgaacaggaggccccggggaggagcaggaaggcagagagaaggttgggagctgccaggggctgggttatgccccttccgggggggcaggcccgggagcgcagggcctgggttgctcggatgaggtttgtgtgggtgcgggtgaggtcagctcgcgacctgggctcccccggagaggaaagctgcgggtggagagagcgcagggagtttcagggcccaggcactggcttttggggggcgggtctctaagctccccacccgagagtaggaaggtcccatgggacggagcgtcctcaggttcaggaagtgactgagggtcctcaggggtgggagtcgccgagactcttgcaggctctgggcggcctatgtccccctccc

SEQ ID NO: 28859 - DNA, 930 bp, Artificial sequence
  DNA replication origin
gggtgttgggatccttggtccctcactgctttaggcctattcctctgagacacctggacagtagctggatgtggaggtattttcatttctcaggattttggctgttcaggtggcctattgttttgttttgtatatatggtctaaagcagtggttctcacacattcgtgtgcatcagaatcacctggcctgttaaaacacacatttctgctggaaacccccaaaaattctgatttcataggtctgagtagggcagggaatttgcatttctaacaagtttcaaggtgatgggaagcttctggtccagggactacactttgagaagccctggtgtaaaaaggtacagacgtgaaaaccagaggggggacagctcctccccagaggaggcactgggcaacttctcttgtccctgcctggcacagctgaggcctgtgactggggattccgacagatcagtgagtcaaccactgcacaggcccgaagggcagaggtgagggggttgggggctgggtgggggcagcaatgaaggggaatgaagtttgagcttgagggcaaagtctcagggggacctagaatgggagaactggatgttttgagggtggagaggagaccagggaagacagaggtgctggtgcggctacttgaggaggggtagcagaggaggtcactgtggggctgggagagctgggctgtgagggcccagagagtcatgatggggttaggggagcaatgggtgtgtatgtgattcctgaagaagtgaaggaattgagatatgggggctgggagctgatgtggcgtatgggtgtgtatgtgattcctgaagaagtgaaggggttgagatgtgggggctgggagctgatgtggagttcagctttcaggggctgagaggccatgtgggctttggggcccagggaggggcggtgggaatgagc

SEQ ID NO: 28860 - DNA, 1060 bp, Artificial sequence
  DNA replication origin
tggctggagggccccaggaagacaaggcagtgggggcttgggaggaaatacagggcagcagggagagtcagagagggaatagaatggcacagtcaatgtcagtgaaggcgggtttggacagcccatttgttcctgtccccatttgacagatagggaaaccaaagctgggagagaggcaggagctcactggaagacacatagccaatcagagagcaggctggggccagaagccaggtttgtctggagggctggagtgcagagggctcactgctggacatggatttctaggcaggaacccctaggggctgcctggtagagtcaggctggacaaaatggccttggctggagaggaaggacaggcccagggcccccagccctcccactatgggagaggaggggctgggtggtggggtagtgtctggctcagctggttctccagcccgtctgggcactccagcctgtgaggagaggcactgacactgctgcccctgggctgctgtggctttcggtacctgggcttgggggacttccacgtccccctccaggaggaagacttagctgggcagcagcaagaccctcctaggactggcctggcagttattgcagtggagctgggggtggggtggggttctggtttcagcttctaccatcccacccatccgtccttcctccacccatccttccacgcatccatcaagctttccctcctgcctcccctctaacacttaaagatgcccactaggcccaaggcatgtgctggttgctagaggattctctgtcctccaggagcagccaggggggcagaagcagcagacacataaacagcccctctaacacgctaagaatgagcccagtagaccgagttctgaagggctggtgggactttgatgagtgcagggcagtactcggggcagtaaggaggtcggcatggctggagctgcagcgtctgcagagtagagtgtggtggtgaggcagagggcaggggccacatggggccttgctttggagggtggggtggcgacccatgatcaggagcgtgggccaggtgcggtggctcatg

SEQ ID NO: 28861 - DNA, 1032 bp, Artificial sequence
  DNA replication origin
tggaaggcacctccagcctctggctgctcagccaaacctctactgctgatacttcagacaacagatggagagattctgggaaggagagacacccagcatccctagaactgcctgacctcgtgggactccctggcatggcgcccaagctgatactgattccctcctccctcccaccccatccctgtgccctgtaggagctggcagacctgaagcatgtgcatggcaagctgaagaagcagttccaggagaaggtggcagagctggcacatgccaaccggcgggtggagcagcacgaggctgaggtgaagaagctgcggctgcgggtggaggagctcaagaaggagctggcccaggctgaggacgaggtgaggaccacagaggggcaggggcagcaacagaccttggccagggaggagtgggggccgcagggccatcctggcttctccattctcagcccctggtgcctggcacaagcctgtctctcaggagtcgcccaggatagagtgggtaggtgcgtgatgaatggatggcaggatggacatgtgggtgggaagatgggaagaaaaatgaacagaagacaagatggatgtgtgcatggatgaaccaatgggtaaaggaatgaatggatggatgaatgggagagagaggcagggcgggcagatggatgggtggatccaatggatgtatgaacagatgatggctggatgggtagagagtggacagatggatggacagctgactgggtcagtgggtggaagaacgaatacagagggagaaagaaggccaggttgacgggaagataggtgtgtccgggagagcaggaaggcatggctaggcatgctagatgggctgctgattagattaatggatggggagtggtgggtgactgtctccatgggcagatgaatatctccctggacgaatggtccgatggacagactgatggggacagaaggataggaggtggatggctgcatcagtagtgcagggcctgggaggatgggtagatgtgcaagaggaggcaaaggggat

SEQ ID NO: 28862 - DNA, 1425 bp, Artificial sequence
  DNA replication origin
cacgccgcccagcggcacgccctcgcccgggccgccgcccgcactgcccctgccccccgcgcccgcgctgctggccgacggcgactgggagagccgcgaggagctgcggctgcgggagctggaggaggcgcgggcgcgggcggcgcagatggagaagaccatgcgccggtggtcggactgcactgccaattggcgcgagaaatggagcaaggtgcgcgctgagcgcaaccgcgcgcgcgaggaggtgcgccagctgcgccagcgcctggacgcgctcaccaaggagctggcgggcgcacggcgcgagcgccaagaggcgcagggcgagtgcgaggcacggggccgcgagctggcgcggctgaggggcgcccggggggtcgccgaccagacgcgcgacggccccgagccggaagcggagcgcgagccagtgcgtgacgtcgggtccgagaggccgccaggcagccaggtgcgcggcgcgggcggggcgttcgcgctccagtctcgaagtgggcggggccgattgtcctgagctgctgggctcagaaacaagctagtaaaggcctggcctcctggaggtttcacttctccaggtcgggttctacccttgcggggcctcacatcattttccttccagagacctcagggtggagaatcccaagttctgtgatccctccactcccacacctgagaagtcaacagaaccaaggaatcatcccctttgagccaggagagggatccagcaacttgcctagaagttagctgattcgtagcagagccgaatccattgattcaatcagagctgagcggtgggagaaatcagggcactgggatcacagaggaggtccctgacgcaggcttcacagaagctttcctggaagaggtcacatttaagctgagactagaatgatgagtaggaattagctgtgaaaagtgccaggagggcaggacgacgtggctcgtacctggagtaccagctacttgggaggctgtggctgcggcagcaggatcccttgagcccaggaagtcgaggttgcagtgaaatatgactatactgctgcactccagcctgggcaacaactccacctctaaaaaataaaaattaagaaaaaaagtgcccgaaggcattccagctgatagaaactgcctgtgcaaaaagtctagaggccgagagggcctggtgagtttggaaaaaggcagtaatagcaacggccgtcattcactgggcgcccacgcagcacttagccgagcatgtgcgttatctaggtaacccccacagcaaccctctaagatatttgctccatggggaggatcctgaggcacagagagattcagaagtaagggctgggcgtggtggttcacgcctgtaatcccagcactttgggaggccaaagctggtggatcacctgaggttaagagttcaagacc

SEQ ID NO: 28863 - DNA, 1107 bp, Artificial sequence
  DNA replication origin
tccaggcgctggcgcagctggcgcacctcctcgcgcgcgcggttgcgctcagcgcgcaccttgctccatttctcgcgccaattggcagtgcagtccgaccaccggcgcatggtcttctccatctgcgccgcccgcgcccgcgcctcctccagctcccgcagccgcagctcctcgcggctctcccagtcgccgtcggccagcagcgcgggcgcggggggcaggggcagtgcgggcggcggcccgggcgagggcgtgccgctgggcggcgtgggcggcaaggagtcggcaggccccatgcgctccggcgacgggctgcccaggatggtcaggaggctgcccttggacagctgcggggactcggccagccgggggctgggcccgtggctcatggtgcggccgggcgggccctgagctcgaactcgcggtcgggctcaggggcggctccggggacgcgcggcgggcgcgatacaactgtgcatgatgacgccgtgccccgcttccctctgggccaccgggcggaggacgcctcctcggacctacgggagaacacaaccgttattggactgcgaccaccgtcagtctcgaagatcagccgcgccaaggccctggcggagggaacagaacggccaaggtaggaggagagagttctgttccaggagagtcccaatgaggcaggattggtggagcaagggcccgcaaaggcctcctcagtggcctcgactccctgctccaatcccttcacccagcggcgctaatctgaaaccttgatctgttctttattctcccggtcccggctcacacactgatggcttatactatactactatgcaacttccgcacaggacccaggcgggggcactgggctggtgccaggagtcccctccctgccttttcctgcactgggctaactcttctcatatttaagactcttctgaggtatcacttcctcctggaagccctcctggagcacttcaggccaggtccatcagccccttatgtgtctccatcactgcactaacttaccctgtcatttatgtgtctgctgtgtacctttaaccaaggctgtgagtttgctgtggtccaggactgggtcctgaccactgtttt

SEQ ID NO: 28864 - DNA, 1952 bp, Artificial sequence
  DNA replication origin
gacagacaataaacaaacagcaaatggcctagagaaatgcagcggggtcgctgagcagcacggaggaaccttgacaaaaggtcatgagttttaaaaaatactgctccacgtggtggtgtagacctccaatgcctggctccatagttgaaggtaagagtgggcaaagcagtggagggaacagggttggcgtttgccaggagaagccagaacaggaggggcctagggcacagagggtgctggcaagggagaaattaggagcacagaaggtgagctgggaaagagagggacatgggggtgggcagtgcagtggtgggatcagtggcttgcggctcctgctgggattggagagtatttggagttgagtcctagagggagtaaccttagaattgaggctagggaggaatcagtattggtaatgacacagggaggggccatcagagtggtcaggttcttacaagaactcactctggctgttgctgttgagaatggatttgaaggaggtgaaagtgcatgatgggcagggaggtgggtgtgggtactgttacccaggtgagtgaaggtggtgtggaccctgacaggttagtgactgtggacaaagaaggtggatggaaggcggatgcacagcagatagactgacaaggtttggcggtgggtgggggaggaaagaaggcagatttcagggtgccttcaaagctggaaggagtgaggaagtgccttctctggaaggagtgaggaagtgccttctctcggaggagcacccaggaggagctggtcacggggggaatggaggcagcaagttctattttaaccaagatgagcctgaatcatctatcaggcatccggttggaggtatgggaagctctgagggcaacctgggctggagagggacttggagttggggacatagcgagatggctcgggcagggatatcgtgagaggagaagggggcccagggcccgatgacagccgcattcgagggataagcccagggggttcacctgggaggctgacgagcagctggagaggaggggaaacctggagaggaagacgtggaagcaagtgaggcagggaagcaggtgccacggtgggtccagagggcacaccgtcacaggggactggaaaccagcctggcacaggtggccgggtgacagagcgccaagcaggtagacggagtggagacggcgagtgtggaccactttggaaggaccttaaaagggaggtgccaggggaggggagaagaaggtgtcaggagacacttcagcaggggtaagacccctggaaaggacgtcactggctagggtgggactggcaggagggaggccttcggctcaaggaaggagaacccctctgtcctctcaggggcagagaggagggggccgtggggcttgacagcttcctttttcactgcaaatcatgacgatagatcatctgccgagaatgaggtgggttagagattggaagaaggtggagaggggacatagagggctgccaggcagccttggggacagccagtgccgagtcccaccgacagtacactgatcactcagaaagggtgggtcttaggggcaggtgtgaagatctgtggaccagggctctctgcctaatggggaaggaaaagtgtgatgtcccaaggggctgttggtgggtggcagtcaacagaggccgcagtggagggagactggggacagagagggacatgcctctcatttattttaaggaggaggggggcatggcccataaatggcagagcccagtgctgggcgatggggaggctgaagtgagacacagagaacaagagagctgtttgcggtgagtcacggtgtcagggaggggtggttccggcagagaaggggagagaacatcctgctgcactctcagaagccctttccatctgaggactggtttgtttccatcatcatccccagcgcgtgcgttcattcagcaaatcctta

SEQ ID NO: 28865 - DNA, 1455 bp, Artificial sequence
  DNA replication origin
caccgactgactcctgatctttaggatgactcaaccttcccaaactctgcatggtcacaagggtacccctaagagtggtaccaccttcttaggggtaccttccatccatcacgcatctgctgtatgctgggccctgtgctgatgccctcgctcgtggacttcaaagtaaggcctttgctgtagaacacggaggtgcctggtgctttgggagcatactctgtgcagagaggttagagaaggcttcctaggggaggggacactggaggtgggttttgaaggatgtgtaggagtttgctgatgaaggaaggagagatattccagacaagtccacaagcaacaggaaccactgggtcactttctgtgggcagggctgatgagggcctagcctgcagcaagtgtcagctcaaaatattcttgtttctgtcctggagtgagctaccagtgagcacagctgtggggctggggttcaggagccctgatggaagctctaagtggcacaagtgtcccatctggatgagggaagcctgtactgccagaagagagatggcagcttgccaggcttggctgtgggaggttgtagggctgtggtccccaggtgggggtggggttggggagatcaaggcatttcctggagttggtggcagctgaacttgaagatgggtgggggttttggagtctgggacatgggcatttggaatacaaacccagagacttaaagcagtaatagacctgtctggctgttgggaggcaggacaacgaagggtggggtaggaaaggctccccggggcctgtggtggccggtcccaccgtgacctgccccttggtggggcagtatgccaagggaacaggaggccacgccccacgcacatagacaccccatggcaagagggcattgagcctggtggaaggggcgggcagggcagctggggcatctccacgactgtaagccatgctctgcgctgctgctgcccctcagtgagtgtgtgcgttaccagggctgtgtgtgagtgtgcacgttactggggctgcgtgtgagtctgtgcattaccggggctgtatgtgtgtgtgtgcacgttactggggctgtgtgtgagtgcaggtccctcgggccatgtgtgagtgtgagtgttactggggctgtgtgtgagtgcgggtccctggggccatgtgtgagtgtgcgcgttactggggctgtgtgtgagtgcaggtccctgggggtgtgtgtgtgagtgtgtgcattactggggctgtgtgtgagtgcgggtccctgggggtgtgtgtgtgaatgtgtgcattactggggctgtatgtgagtgtgtgtccccagggctgtgctgtatgagtggggcagggtagggggaggcgttgcaaggcagggtctggctgcccttgggtctatgtgggagtgcaggattcctggtgtgctgggggcggggtgggcttctccagaaaact

SEQ ID NO: 28866 - DNA, 1231 bp, Artificial sequence
  DNA replication origin
gcaggccggggggcggcaggccaaggcggcccgggaacttgctccaggccgcgcgccttccgcgggaaggaaggggttaagttgtggggcgtgctggaggagcagacacagtcggggcgcccgcggcaacccccgaactcagagcagaactttctagacgcctccccggcctccctcagcccccggaaccccaggtctccggtggggaggggccgcggggtgatgggggaggggaggcgcctccggaatgccgcggcccgggccggacgggagggggcggcgggcggggacggaatttgggactctcccgggggacccaacgtggtcgccatggcgaatgcgggatggacgggcggcgctggccaatcagagcacggcgccctgcccagagccgcggcgactgccaatgggggccatgcggtggggtgggcgggaccgcgcggcgcgggccgggaaccccctccaccctccgcccgtcgctaggtggagcggggcggttcgcagggccagcggcttgggaggggtcgactaagtgaggactaaggcgacgcagggctggggcttcagtttcagtaccttaggtgggggtggtgtccaccttcccacccccgctctcccagggctcttgtgggggttggattggtttgggttcgggaggtctgcccacctgttagagcgttcaggaatctttttagtgcctctccccatcctgtaggtaaggaaactgaggcccagagagggcagggacttgcagatatcacacagcatatcagtgatggagctgggactagcgggatgtctgctgtacaagagtgaagagttcacggtgttgccgagaggggtggggctggggtcggggtggggctgggtccccatgaaggttcaccccaccattccagctgtgcgtatccacttggcctggtgcctgcagaccccatcgtgtaggtgctctcgggggcattgtgcccctcaggtggctaagatccagaagaggaggcatcccatcaccagctccctactctggccttgctgctggtccgcggtgtggacacagacacgtagctgtccctctgggcctcagttggtccatatgtaaagaaaggagttcaaatcaatgatccaggctgtctctgtggctcctcagtctaagatggggctacctgggaataggccaggggtgcctacccctgggcttaggtccagcctggaggcctagccgccatcccttcct

SEQ ID NO: 28867 - DNA, 908 bp, Artificial sequence
  DNA replication origin
cagctgcgaccgccgccggaggggccgagggagggccgcggagtctcctcctccctcccggggggaggggaagcagggggagcggcggggcccccgaagcggtcgcaggctgcggccccgctgtgaccccggcccaccgagctgctggggtgggggctccagcctaacttcggggcgaggggtgcgggccggggcggtgggctctgctgcagagcgggccgtaccccaacggaggccccacccccgtgaggggccgagagttgcgggggggctcggctttcttggttcaggtttcctcagcgccaactacgtactaggcgcccccagcagaaacggccaccgcgggtcccagctcggcacgtggagcgagcttaccaagtcttcactgttgttacctgcatttttccctgggccagctctgccaccgagtggaagtgggccaacaagtctgtgcccatcgggcctcagtttctctttctgtacaacagaagggttgacgaaagcaaccttgcgcttgttaagaggtggggggcgcggggagcactcggcccggcgggcggagacttttctctgcattgcgatggtggttggcaggccctggggaattacggtacttcgccttcggggacgcccagctgttttggggctttctctctattgggggtaggatgtttgtggtcttgactggaaagccgggacaggcgtctggaggactccccactacatcctgtaccctggaaggcccccgaggtgaatctatttaaaagaagaccaacaattcaccaagatggtggggaaaacctggcctgattgggattttacctagaaaaagaagctaaatattacgaagataaattagttttaccccgtgattaacggagtttagattatgattgcaaccacgcacg

SEQ ID NO: 28868 - DNA, 3148 bp, Artificial sequence
  DNA replication origin
ggagggcagggcaggacagaggaggcgggaggcccggctgccctggcaggttggcgagcagacgctggcttcgtagacttcaccagcatagaacacaaggctgcctctgcaggagacctggatccatggaagggatgtggtggagccccctgcaaactcccctgtctaagccccagctccctctctgccccacagccagtgctttgcctacaggatattccatttggagccccaggcccatgtggcccttctgccagagccagggagcccactgcagccctgagggcactcacatggacatgttctggaagcctgtgccattctcccagctgtcgaagacggggattgtgcagggtccgtataccgagctcttgacagagagggaaagcagcaccaggagggctggggcccctgaggggtgggacaaaggctcaggagatgtgggagagggctgaccctcggtccctggggcggtccctggggctgctgacacagaatttcactggtcaagggacaactgagaggagactgttgtgagcccccaacttcagagcaatgagcctggtggtttggaggaagctctcctccaagatgatgttagtgacggctctacgatggaacagtggtggagggaggagtggtcacactgggaaggtggtggtggggagcaaatgggagggaggactggggaactgctgaggaaatagaaataagcaagaaaggggcaaggacggtgatgaaggtaccagtgatggtgctgctggagatagagaaggtggaggaagtgatgatggtggagatggaggtggagtaggtggtgatggtggtgaaggaggtagagaaaatgaaggcggtaatggaggtagaggaggtgatgatggtgctgatggaggtggaggagatggaggtgatgatggtgatagtgcaggtggaggagatgatggtgatgacagaggtggagaagatggaggaggtgacggtgatgatagacgtggaggaggtaatgatgatgatagaggtggaggagatggaggaggtgatggtgatgatggaggtggaggaggtgacgatggtgatgacagaggtggaggagatggaggatgtgatgacgatggtgatagaggtggaggaggtgatgatggtggtgacagaggtggaggagatggaggaggtgatgatggtgatgatgaaggtggaggaggtgatgatggcgatgatagaggtggaggagatggaggaggcgatggtgatgatggaggtagaggaggtgataatggtgatgatagaggtggaggagatggaggaagtgatggtgatgatggaggtggaggaggtgatgatggtggtgatagaggtggaggagatggagcaggtgatgatagtgatgacggaagtggaggaggtgatcatggaggtgatagaggtggaggaggtggtgatggagttgatggaggtggaggaggtggtgatggaggtgatggaggtggaggtggtggtgatggagatgatggaggtggaggtgatgatgatggaggtggaggaggtgatgatggaggtgatggaggtggaggaggtggtggtggaggtgaaggagatgatggtggtggtgaaggaagtggaggaggtggtggaggtggaggaggtgatgacgatggtgatgaaggtggaggaggtggtgatggaggtggaggaggtgatcatggtggtgaagaaggtggtgatgtacgtggaggaggtgatgatggtggtgatgaaggtggaggaggtgatggcgataacggaggtggaggagatggtgatggtggtgatggaggtggaggaggtgatggtgatgatgaaggtggaggaggtgatgatggtggtgatagaggtggaggagatggagcaggtgatgatggtgatgacggaggtggaggaggtgatcacggaggtgatagaggtggaggaggtggtgatggaggtgatgatggtggaggaggtggtgatggaggtgatggaggtggaggaggtggtgatggaggtgatggaggtggaggaggtagtgatggaggtgacagaggtggaggtggtggtgatggaggtgatggaggtggaagaggtgatgatggaggttgaggaggtgatgatggaggtgatggaggtggaggaggtggtggtggaggtgaaggagatgatggtggtggtgaaggaggtggaagaggtggtggaggtggaggaggtgatgatgatggtgatgatggtggaggaggtggtgatggaggtggaggaggtgatcatggtggtgaagaaggtggtgatgtacgtggaggaggtgacgatggtggtgatgaaggtggaggaggtgatggcgataacagaggtggatgagatgatgatggtggtgatggaggtggaggaggtgatggtgataatgaaggtggaggaggtgataatggtggtggaggaggtggaggaggtgatggtgataatgaaggtggaggaggtgataatggtggtggaggaggtgacgatgatgatgatggaggtggaagaggtgataaaattagtaacatagaaagtagaggtgggtgtagacagagttcacagctggtggtcatgtaatggccactatgacgatgaggaggaggggaaagaaaggactaaaggggatcaataccctgcccacctggaagtctgaggaggcgaggagagatgatgtgcttaccccagcctagcacaccaagcttgaacacatatctgcggatgtagatgttgtagacacgcccgaggaggaggtagaggttgaagccctcgatggccatccaggtgaggcagctgagcagcgcgtagtgcagggcagcggccagagccgtgcatgctgacccgggcacaggagacattgcgaatgcggggctcagcaggaaggcgatgttcaggagcagcacggaggcatgcaggttcatgtggatgcgtgttaaggagtcactctgcttcctgcaggtgagagaatggtcctccatggcccagggacatcacccaggcagcactacccactgggtgcataggtgcatgccgacagggaaactgaggcgaagaaggggcagggatcccacagcagtcgcaccacaaggctggtctcccgcctcctggtccccaccctctggagaag

SEQ ID NO: 28869 - DNA, 1059 bp, Artificial sequence
  DNA replication origin
tgggttaaacaaaaatctgggtggcttaggttgcttgctcctggaaggaaaacgggggaagggcctggggttagactccgtggtctcaacgtggttctctacaccctccaggcttggtccagggaaagctttgctaaggctgagaagcctgcttctcagaagcacgccagacctgctttcaggctgtgcctggcacagtgggagcctctggtctcagacaggccctgcatttgttcccttacccaggaacccaggctgcaagaacacagacctctctggagtgcctggagcctgtgggcttggctgcttccgctagcagatgttagagtggggagagaggtgtcacccagcctggcccgggtggtgcagggcaggagggtttcctgtgggaggtgacttctacaccaagaccacagtgttgaacagggttaggcaggagaaaagggaggggaagtggcacaggcttggggttgggtgtggtgggggtagagagagaatgcaggagagtgggcttggtgagcagagtggcggtgggaggagctggagagaaaccagaaaaataaggaagagccaattatggtgctcgggaagtagggagatactgaagctctttgaccaggggagttcctgatccaagtggtgtttcaagaagatcactctggcagggggtggaggcaggttggagtggcatccagggaggagtagctgtcctagattgtgcttgggcatcagcagcaggtgatgatgagccaccacacctgggtcatgctgccagcaggaataaagggaggggcgaggctctgggaggtgctgggaggtagaacccacactgcaggtcaggtgagggtgagggtgaggttggagcatcatcaaggctgatgtcttggactcttgggtagttggggtggcctgtctgtaactaagatggggaacccaacggagggaagagaattggtgatgtgtgtggctcggtttgattgatagattggtggattttcagagacaggatctactctgttgcctaggctggaatgcagtggcacaatcaaagctcactgc

SEQ ID NO: 28870 - DNA, 722 bp, Artificial sequence
  DNA replication origin
ggcaagggccagtcagcctggtgtgacacttccttttgtcagggatacaaacaaacaaacaacagttaggaggtgagatggaggcgtgagataagcttgctaacagagggcccagagaaggggaagaggaccagggagcctctgcggaaggcacttaggctgggcttgggagaaggtgggaggggaagggactgatgtctgtatgagcactgtagggggagtcctagtggaggaaactacttaggaaaacatttggggaacgatacaagctggggaccacggggagggtgataccggacccctggcatgggtcatttcatgggacttgatgagccaggccagcaggtctcaatctgctctgtgggggggaagagaggcaggaggactcgccaggcaggtgctgtgtggggctgggggcccaggctgcaaacccagcaggacggggagggccaggatgggtgttcagtgtgaggttggccaggcagtcccagtctctggctgctgggttaaggctcaagcttgggagcagcttcacgtgtgagggagacgagggggaggtggcgcccagtcgaggggaaggacaggagagaggtggcagagctgcagcagggttggtgtaggggttggcctcctggcaaggcccagcatgacaaaggcaggtaagaggagtgggcaggacagccatggagggaccactgcggaccgtcctccagccggactgg

SEQ ID NO: 28871 - DNA, 998 bp, Artificial sequence
  DNA replication origin
tgaggcttcatggggaggacttgtcttagctcgtctcaaagatgagcggaatgtcacggggctaagtgctatccaaggcaaagggacaccaaggggcaaaggtctgtgggtgggatgcctgtgctcgggggcgggcagtggtcactgtgtgtaaagggaagaaggaagcagtggatggccaggttcgtgggtcttcccggcaggagacagcagagaggcgcctgcccgggaagggttaatcccagagccgtccaggtcctgtccactcaacttccacctccatcctctgaggaaatgggttttccaggagcttggcctgggcagcggtgactcgtggctccacacggaagtgactcaggtcccccgggagaaagcgagccgtgggtccccactgcccaccgtgcagaggggcagggctgagccaggtctggagctggagccctgggggtggggcgggggatgggctggtggtggggtgggggtctcagctcagacaaaccctggccaccttccactctgctggatccttggggaaccccatgatgtggcccccattgtgtcagactggactggcctgttctgtcctgtgtgtgtttacggaaggtctgaggtcaagggcggctgctctggaagctgggggttgtgggggcttccttgggcctcagccccagcaccctctatcccaggctggattctctgctactctccattctcctctccttccctttgtggggattctaaagccggggagttgggaaggatgtgcatctctggggcctttatcaatgccagctctacaaggagggggagacttggcaccacgctcgtgtgatctcagaacacacagccttccccagcctcagtgtccgcatctgtaaaatggtagcagtgagacccgtatcacagggtggttctgagggtttggtgtgataacgtggatgtcaccactaacattatcattgcgggggtgttgctagaatgccccctgctcagccact

SEQ ID NO: 28872 - DNA, 1317 bp, Artificial sequence
  DNA replication origin
ttctctgctactctccattctcctctccttccctttgtggggattctaaagccggggagttgggaaggatgtgcatctctggggcctttatcaatgccagctctacaaggagggggagacttggcaccacgctcgtgtgatctcagaacacacagccttccccagcctcagtgtccgcatctgtaaaatggtagcagtgagacccgtatcacagggtggttctgagggtttggtgtgataacgtggatgtcaccactaacattatcattgcgggggtgttgctagaatgccccctgctcagccactccctctggctctgtgtgagcagaggcagggcccttgcctgtggggccgtggttggtactgagcgcctgatggctgaggccctgtagcgctggggatctgcggctccagaggcagagacaggtcaggtcccaggggtctgtgcggagactcatgctacatccctggcgcctgggtgggtgggtgggcaggtggcaggtgtgtgtgcgtggggcagacctggaggggtggcataggcagggatgaaggaggggcgctaagtggacaagcgtgacagtgtccccctgcccaatctgtgtggcaactttcttgtccccagcccagctctcctgtcccaacgggcttctggaggagggaagttttctgggtggggtttaaccttccattgcactctcccggaaaggaagcttcatgctctaagaatttcccctcaaggtgctctggtgggtgagctggttgctgggggccgtacgggaagagggggaaacagggaggaggggcctgtgacaggcccagggggctgagttaggggcaggcatgagctgtttagaaagtacagagatacttagctgagactgatggcacctgcctctaagccgtttacaggtatcaattcatttaattctcacaatgacctttgagtgaggttgacttctttattcttctttactagtgaggaaagcgaggcccagagaaggtgagtaactagcccaaggacacacagctagtgagggagtcaggatttgaacccaggcagtctggctctagagtctaccccatgggttaaaggaagccagccagcccctcccctcaagcctcaagcatgttaatggagccagggctgtccaccttggagtagttgttcaaacagctgaggtggagtggggatgactcaggaagtggcagggacagttggtcccttgtgtgtgtctggatttcttccgtggaaccccatgttgtcgcttcacttgtttccttccaatgatggggagctctctacctgtactcccctcc

SEQ ID NO: 28873 - DNA, 784 bp, Artificial sequence
  DNA replication origin
tcagtccctttccagtctctgctctctcaccctattcagacctcatcctccttcaccaagaccttctctgcagcctcaggacgggcccttgcccttccatcctcacccctgcctgcccacaaagtaaccatcaagggacagtggggccgagcgcagtggttcatgcctgtaatcctagcacttggattacactcctcccctcctcagacaccttcactggctccccagtgcctgtgagcaaagcccagtcttcatgatctgatattgtgagcccagtccactttgcattttgccttccctgcctctagaccactgcccagttgttccctccgcctggaagttgccttactgtggaaggagaaggtgaagctggcggcactgggcaggctgatgttctgagggctccaccaggaggtgacagaagtggctaacagcggggggccctgagccaggctctcctcctggtgctggaagcagaggaggctagaggctttgtcactcagcaagaagtcacgcttgccatagagaagatgtaatctcccagcatgtcggttccagtagaggcagaagtggtagaggcccctggggtcagggaaggatcgggaagcagggtgggctgcagggaaaggggcatggactgtgagggcctcttcggagttctcgatggagatgcgcaggtctggtgtgggtttgtagtggaggctgctcctgtgtgtctggttccgctggctgcagaagcgaaagtcttccctgtggcccctgccgtgggcacctgaggaggcag

SEQ ID NO: 28874 - DNA, 651 bp, Artificial sequence
  DNA replication origin
tggtataggaagcagaccctgccactgtgcccacacagggtcctcaatcccacggttgaactactgacttaggatggctatcctcgggcctggaaccttctcgggaggccccagggagaggctgcgacggcactgagcttcagggagtgctcacagcccccacctccatctggccccggcccaacccgcatctgcttcctgcccaggcctgcccctgacctcctgccgggagtggatgtgcaggtcctggaggccggctgtgggctggagcttccacaccgtggcgttgatccggtcctcctcgaaggacaccatgtcccccatgaatctcacagaggtcagtttcgactccaggctctgcaactgcctggcagggaggagaaagcggtggtgatggtggggagggggccgggccaccagggagactgaggcaggaggacgagagactcagacagagacacagggaagaggcagaggcagaggcagaggcagagagaggggtggggtgggcaagagagagtggagagcagacaaaagagaaaagcaggcatctgcgtgtgggagagaaagaatgagctggggtagggtcagacagaggaggccaggacctgggagccaagggaaaggagagcaatggtgtggtgggggctg

SEQ ID NO: 28875 - DNA, 1073 bp, Artificial sequence
  DNA replication origin
ccagggcaggagctggaagcccctgggatggctgggatcagagtggagggggctgttaccaggagcagggcgaaaaaggtcaggtggtcacagcagcacacggtcccctcaggtctgacctccgtggagcagccctcagaagaccagtctccagtggtccctggagaggaggccaggggaacagagggaaagggaatatagggaggggagggcaagggaggggagaggaggggaacagaggggaagggaatatagggaggggagggtaagggaggggagaggaggtgaacagaggggaagggaatatagggaggggaggagaggagaggggaggggaggggaggggaacagaggggaagggaatatagggaagggaggggaggaggaaggggaggtgaggaggggggggaggggaggggaagggaggggatgcagggagcaaagaggaggggaggggaggggagaggaaggcaggggagggactcagccagtggagctagccccgccccacaatgcagcccataccctcccttcctgtcttaccccagagaaggtcctccgggccctacctttagtcacatcccagaatacacaggtgagggtcatgttctgaaaccgaagagtggaagtcaggagagaggaaaagggaagtttgggggagggcaggggaagcgggaggacggtgtgctcccccgagtcctagtgtgagtgtgcattaggtagaaagcaaggttcacacccatgggccacacagaaaaattaagtgcaccatttgatgagccctgggccggcgtgtgaagcgtgcgactgtggtgtggggctgtgggcaggagggtttgcctgtctgcatgcatgtgtgcgtgtcaggggagcatgggtgtggaggatgtggaatgccatgtgtatgcaggtgggcttgccaggtcctcatgtgcacctctatggtgtgtggccttggatccaattatgtgtatggccctaatggctcctcctgggcgactgtggaagggtaggggacagatatgtagtgtcccatgcagggcccatgggcccaggtgtgcccactcgcctgt

SEQ ID NO: 28876 - DNA, 2091 bp, Artificial sequence
  DNA replication origin
tggaccagaaaagaagctcaaggaatactctatggaaggaaaggaaagaagggagtggggaaagaggattggaggaaggataggagtgtggagttggaagaagagatgggagatgggtaggaggatggctggcaggatggatgagaggactgatggcaggaaaaatggataggaggatgcatgggaggagagaggggaggatggatggatgggaggatgggtggatgggaggatggatggatgggaggatgggtggatgggaggatggatggatgggaggatgagtgagacaatggatggatgggagaacagtgggtaggagggtggatggatgggaggatggacggatgggaggatgggttggaggagaaatggaaggaaggatggatggatcggaggatggtgagaggatggatgggagaatggatgggaggatggacggatgggggggtgggtgggaggatggacggatgggaggatgggtggatgggaggatggatggatgggaggatgggaggatgggtggatgggtggatgggagggtgggaggatggatggatggaagcatggatgagaggacggatggatgggaggatggatggatgggaggagaaatgggaggatggatggatgggaggatgagtgggacaatggatggatgggagaacagtgggtaggagggtggatggatgggaggatggacagatgggaggatgggttggaggagaaatggaaggaaggatggctggatcagaggatggtgggaggatggatgggagaatggatgggaggatggatagttgggaggatggacggatgggagggtgggtgggaggatggatggatgggaggatgggtggatgggaggatagatggatgagaggatgggaggatgggtggatgggaagatgggtggatgggaagatgggagaatggatggatggaagcatggatgagaggatggatggatgggaggatggatggatgggaggcaaaatgggaggatggatggatgggaggatgggtggatgggaggatggatggatgggaggatggtgggaggatggatggatgggaggatggtgggaggatggatggatggaaggatggatgggaggatggatggatgagaggatggatgggagaatggatggatggatgggaggatgagtgggatgatggatggatgggagaataagtgggtaggagggtggatagatgggaggatggatggatgggaggatggatgggaggagaaatgggaggatggatggatgggaggatggatggatgggaggatggatgggaggagagatcagagggtggatgggaggatggatggatgggaggatgatggatgggaggataaatgggaggatggatggatggatgggaagatggatggatgggaggatgggtgggaggatggatggatggaaggatggatgggaggagagatgggagaatggatggttgggaggatggatggatgggaggtgggtgggaggacagatggatgggaggatgggtggatgggaggatggatggatggaaggttgggtaggaggatggatggatgggagatggacagatgggaggatgaatgggaggagagatcagaggatggatgggaggatggatggatggatggattggcgaatgggaggatggatgggaggggagatgggaggatggatgggaggagagatgggaggatgaatggatgggagggtgtatgcaggtatatccccagtaagagtctagagcaaagaggacaccagagctgcctagcatagaatgggctgccccaggcagtacagtgccctgatgttaggagtccatcatgagaagctggctgaccaccagtgggagattcctgcagggccaggtagaggttgggggtgattgtgaggtggacctagttggggggtccatacacacatcccctccatgacctatgcctcttttcccatccctagcagtcctttctcgatagctgagcccaggggattcagggctgaggacccaccatgaggcgctcctcctcctccctcagccgcttcttctcctgggctctgatctcctgctgct

SEQ ID NO: 28877 - DNA, 975 bp, Artificial sequence
  DNA replication origin
taaccagttgtttgcagatggctgtgggaccatctgcagaggtgctgtgaagacctgacattccaacggagagaaggacaggaagcaaacgacaggccaaggggaggaagggggtggtcccaggctatagataacagaagaagagaaaggctgctgctggagcttgtgaagcgcaaggcacaaatggcaaattaagagtgtgtttatttacaggaaaatcatgagaagcaggaacaaacagggctgtaggggaggtgggctggcagtgaggccaggtgtctgtgtaaacaggcattggctggatagagggaacacaggagccaggctgcgggaagaggtttcctttctctggcagctctggctgaggccccaggagggacatcaagcgaatattttctggagctcccccaggcgtgggtccttgtagagcttttcctccagagccaggtacttcagtggggccagttccttgtgtctgaagtcagagaggcaaggaaagagggtgaggggttacaaagctggtggtccagcctcccagtgggttctctccacctgccctgcctgctcaccgattgaggcgctgctccaggatgcggatgcggaacatggcctgagagcagtaactcaggtacaggtcttcatcctcgggtgtcagcgtcacctggttctcctggtaccactgctgcttcttttgcagctcctgggtctcctgtggtcatagggcagacagagaaggaggactgacaaggctgaccttcacccaggctgcaggctgcaatcccatgggtcactagacagcaccatgacggttggccccagtgtccccactcacacaagccacctatccatacctgccacagaggcaggggccacaaaatatcttgggtgggagccagtggggtcatgtttatagggatgtcatgtccatgagatcagaacggggcaagactgagagagccatgtagctctggacaa

SEQ ID NO: 28878 - DNA, 1055 bp, Artificial sequence
  DNA replication origin
ttcctcttgattagtcctatttaggaaaagagggcgggtactgaggaaaagcggcagaagcgcctgcttccattggtcagtcctggcaggaggcggagcacccgcggcagctgattggtgcgggaggcaaggtgggcggggctctgagccggaggttttgttgtgagggtcggttgtcaagcagcggccaatcaaggcaggggatggaggcaagtgggggtcgcgcctggagcggagcctcggcctccggagccgcagctgcaggtggagtgggcaaggggacgaggtggcgaggggacggtgggccctgggctgggccgagccaggcggggctggctgggcttgcgggcagagagctctgagcgtggggaggctagagcccgtactccgcaagcagagggttgggaggatcagccgtggccgagggacctgcccccgcccccggacgagaggggtcggggtggaggccggagggggcaaaaccagggaggccggaagcagagctgggggtctgcagaaggacaggtaatgaatagggagaagagaagtaggagaatgaatgaatgggagaccccgcgagcatatgggaaagggcagtaacgggagtctggcgaggcaggggccacgtgagggatatcgggagacaggatgtgcataagtgggagactcagggggcagggagaaaagggggtgtgaacggaggactagagaggcagacccggggacccaggagaaaggggacggaggggagcgggctcatgggaaagaggtgaagtggctgtgggaaggaggtgggaggctccatgaggaggccttttagagttgaagagtcatagccacttacgcccagactggaggcctagttcctagctctgtccttgggaatcgcagggagcaggagcggttcccttgccaggagctggggaattggaccatcagggtcgtcttcgagattctttccaaggaggacttcagtggccgtctctgggatgcctttcctaggcccctaagcttagcttctgactccgctctcccacatcccacacgtcagacaa

SEQ ID NO: 28879 - DNA, 864 bp, Artificial sequence
  DNA replication origin
actcagcggttgccggcctggggcctccctctctgcctcccgaggcacccccaaccctgggtcaggaccttctctaggccccacaccatgctccctccatggacatacatttggcaccgggaactgcacatccatggcagggctgggctttgctgcctcctttgctgtggctgcgtctggaggcaaaaggaaaagatgactgggtccggccagaagggcctggcaagaagggcagggctcagggcgggactctgggcagcatctgcaatggggggatggagcaggagcatgggggaggctgcaggccagtggcgtgggggttccagaggacctggggcaggcctggacctgcctcctccctctcccccaactcaaccttaggtctgcctgtgggtgggacccagggggctctaggatgtggccatcctgtcccttcactggcatgtatgtggagggggctgggatgactggcaagatggaagtggaggctcctaggaaagccaggactgacggcaaggacggtccctgaggggagggcaggggtactctacaggacaggtggccccatgcctgcccgttctccaaccacagtgcagatcatttttctcccttcttaatccaaacccccagctgaggccttgtgggcctgacctcttgctgggactcgccccagctcacctcctctcagctcccttcctgccagaagcacttctctctctctcttctcactggcccccaggccttgacaggcattgggcctcctgagagcctcccgatcatcccgtctacagcagaccccatctaaggtgggcccccagtgactcctctccatcctccacagcccgagtgcccctggcaggcccc

SEQ ID NO: 28880 - DNA, 788 bp, Artificial sequence
  DNA replication origin
ccacccatgggggacagtgtgggataggccatccctgacgtcacaccatctgtttccgccatcatcatcatcatcacagactgccgtttagtgagcatctgtttacatgcctggccttacactcattgcgttaggtgcagtgctgaatacccacagccccatcagcacacccacattcacgttcgtacccccaccctcaccctcacagggccacactgtcccccactgccccacccctgacggtgctctgtttgcacagacgtcggtggactccgctgtggccatcaacgacctgtcggtggtggtggacctcctgaacatcgtcaaccagaaagcgtaagtggctgcagagggggagtgggcggaggggcagggctgggctgatggcagcatgtcctggcctctcctagctccctgtggaagctggacctgtgcaccaccgtcctgccacagattgagaagcttctgcagagcaagtatgagaggtgcgtgtggggaagccatgcctgcctgaagcagggggaggggagaggtaagaagcctcctccagaaccatgggaaggacccccaagagcctgggtgttcctgtgagctggctgtgaagcattgctgcccctcaacagtccggaggtgggagtggaaacaggcgtgtgtgggtgtatgtgtgggtgtgtctgtgtctgtttctgcccctctcctcctttgttccttgctgtttctctttctgtctgtggcccttggtccatctgtgacttcatccatctccccctaaagctacgtccagacgg

SEQ ID NO: 28881 - DNA, 879 bp, Artificial sequence
  DNA replication origin
aagcacgcacccttgggcaagtccgcacgcctctctgagcctcagtttcctcatctaaactgcggagggtggtgccactcctcatgggtgcttggggccaggtgactctgaggaccccattctcaacgctgtgcctctgccctcctcccaatcccccaggtgtttgagtttggccacactaatcgcacgaccgagttcaccaacctgaacgagcacagctcccgctcgcacgcgctgctcatcgtgacggtgcgaggcgtggactgcagcacaggcctccgcaccacgggtgagagtggcaggcagcctggcctgaggatccccacaaccccaaggggcagggcaggcctgatctggtgggtgccttccctgcagggaagctgaacctggtggacttggctggctcggagcgcgtgggcaagtcgggggccgagggcagccgcctgcgggaggcgcagcacatcaacaagtcgctgtcggctctgggggacgtcattgctgccctgcgctcccgccagggccacgtgcccttccgcaactccaagctcacctacctgctgcaggattcgcttagtggtgacagcaagaccctcatggtggtacaggtgaggaccttgggttagggcgggccagtccctagcatgtaggggctacgctagcagtgagacccagtcaccccaggctgtgcaaatggacctccccgcccctagacctggccacacacaccctgtgtaactcccagtccctcctctccacctttgaccacagcacctctgccatgttgcctgccctcccaccccatccctcaggcctctccaggaagccttctgacggccccagctgtgagctccctctcgtgaccctgttgcccctccagct

SEQ ID NO: 28882 - DNA, 1415 bp, Artificial sequence
  DNA replication origin
gtggccccacagggccaggcatgcatctggccctcagctgccctgtgtggggtctgggccaggcccctcatcccagtgctgcactataagtctcagggtagtcctggcagggcgatgccattttaatggtggggaaatagaggtgcagttgcccgcagctggtggagggcattttgggggacagtggcaggtaggtaagagctttgggcaaggaggcttgcttgtgaggggtagtcaaggggctttggggacagacaccacacgagcgtctttggggacaggcctggcttactggggcctttccttctgtccccaggggaccgctgagaacccaggtatcaaccagcgggccctgcagctgctcttctccgaggtgcaggagaaggcgtctgactgggagtacaccatcaccgtcagcgctgcggagatctacaatgaggtcctcaggtgggagccccagggtgtgcggagcaggcctcaggggcagctttggggtcctccggggtggtgctggaacgaggtcctcaggtgggacccccagtatgtggggagcaggcctcaggggcagctttgggatcctcaggggtggtgctggagcaatgggggataggaagtggggtcttcctgaagggagtgtagggaccagatgaggccgtcaaggtgaagggagtgtagggaccagatgaggccgtcaagggacctggctgcaagtcctgactcagcccagtgggttggatggttctggggggaggaggggctctctctgagacccaggcaatccttgcccctacctgtgggctacaccaggtggccatgggtgagagtgggcagctaggggccctgccaacaggggctcattgtattgtggagtgagatctccacgtcttcagctgaatgcggtggaggagctggaggaggagagatgcactcagctgatggctggagaaggcttcctgggttgggggaacattcctggctggggggctgggtgcagtgcaaacagcagctggaaatgggaggagggggtgactgtctcacctgcccctccagggacctgctagggaaagagcctcaggaaaaactggagatccggctgtgcccagacggcagtgggcagctgtatgtaccagggctgactgagttccaagtgcagagcgtggacgacatcaacaaggtgtggaggcgggagcccctgaccacagccacactgctctagaggacacaactgggtttgaatgtaggctctgctgtgtcctaagcacgcacccttgggcaagtccgcacgcctctctgagcctcagtttcctcatctaaactgcggagggtggtgccactcctcatgggtgcttggggccaggtgactctgaggaccccattctcaacgctgtgcctctgccctcctcccaatcccccag

SEQ ID NO: 28883 - DNA, 1491 bp, Artificial sequence
  DNA replication origin
gccggcgcccgtctggccgtacgcaaagatgcagacattgaagccatcaatgcaagaggtgaccagggcctgcacctcctggaacacctgggagggtggtgggagggaggctggtgggggggcttccagggccgctgggaccaccagctacaagtccagccacctccccaaccatgctgtccttcagcaacaccacatcacgtgttactgcagtcactcagctcacaatgattcgtgactcatgagtcatacattagacagtagtgggcaaccgggccgcccaaagactgcagggaagacaggccagtgcctgctgcccttcccccagctcctcctgctctctctcaaagagtgctcagcacaaggaaggtggaggccagcacatgcctggggcctctctggcctgggcctgcctgccagccatcagaggatgggggcaaagatagaaccagacatgagaacaggagggcacaggcctggcagggctggcaggttggtctgggcagagataagggaagagtggacactgagaacacatggttctcatacagcctcagggggttgggggattcctaggaaggcccaggggactgatacaggagggtattcccggatggggaagatgggcagggtcatgaagatggatggggccatgtgggtggccatgggggtgggaggggctgtgatggtgggaggggcctgaaagtgggtgaggccacatggtgggaagatgggaggggcctgagggtgggtggggccatgcagatgggaggagccacagcatgagggtgggatgggctgtgatggtaggaggggccttgggagtgggcagggccatgcagtggaaggggccacctgaatgggaggacccaaagccatggtggtgggaggggctgtgggtgaggccatgtggtggaaggggctgtggatataggaggggccacatggtgggaggagccacagctgagagaatggaatgagttacgatagtgggaagggcctcaagggtgggcggggccacacggtagaaggggccttggggacgggaggaaccacagccatgggaggggatgggctgtgtctggatctctccttcctaaggaggctttcaagggcttcagtcttaacttcccaccctcttctgtcctccagaggaaggagcaggaccctggctccccacttctgattcctgcaccccccactcttaacgcttcttcctgcccagcgcccccgctccctgtgagtccatctttccctctctcccttgctttccctttcccgcatggggccacactcacgtcctgctgcgaggcctgtggggagaagaccttgtccagctcgaaggacacaggcttgcccttgtgcagcaggtggatgatggagtcgtcgtcggcatcgaaagtcacagcattggtggcctcaggtccttccccatcctctttggtgactggccggacacgagcaatcactcggatgttccctggattggtt

SEQ ID NO: 28884 - DNA, 1740 bp, Artificial sequence
  DNA replication origin
aggacggcagcccgcagagctctgaccagcttggccagagggaatgcagctgattccccctgctctgtgcccgacccgtgttaaagtttaacccggcttccaggtctcctcttttccagacaggggcgcagggaaggagcgcccggcgagactgacgctccggctccacgcccgcctggctctgggctgtcggttaccctgtaattacctgacagctctgactgggcttaggaaccggtgagaaacctcagtctcatctctggtatctggaggaaggaagggaaataaagaggcattttaaaaatgcggactcaccagttctcaacctccccgggccggtgtgtgggaaagggcgggcggccgggctggctggggctggggcggggcgagccatccccggctcgggctccggggcccggcccactctccacaggccccgcagcgagggcgtggctcccaggttccacgtcctgcgagaggggaccatggcctggggctcagcagcctcctcggggcaccaggcagcctgcggagagaacaaggggagataagcttgaagaccgtggaccagcacaactgcacctcgggcagagccagccatctggaagggtctacgccccaccggtcgctggttacccagcgcagcagctccaactgcactgtcccccaaagaccctagggctcgcaggatgaaatggggcctgctgccttttgggggtatttgtttccgaatacggaggctccgaagtgcgaaagttgcatatcagctgtgcctgagaccccacacctgagcccttcccagctgagcctggagcctgaggacaagccaggtcctagccccacacagaggaggcaccgcgagtcagcagcatctccgtaagtctaatccttttcctccaagacatctaattttctaattgcacttaaccacatgcttaacccttaggcttcaggctgctctgcctaaggcctgtcagcagagcagtgaatgctctgaatattaacatttcactgaggagggactcaaaagggccctgactgtggccaatgacaagtgaagtctatatacagtaagttctcattcatgtattcgactagcctgcgctctgtgcctagcatgtggcaggcaccgtatgggtgttgagatacaaagattcattcagtcttcatttaataatgcctactgggtgccaggcatctgccaggggtccttttggatcagaagagatgaggcctgaaaactcccagtcagaagggagataaacacttcaaaaaaaccctcacagtctgagcaggctactggaggcggcaggtgcgagccaggcaccaggtggtgtggggaatggaggggggcagagagcattggtcagggatagaaagcttcagtcagggataggtccctcatgaactgaacaaatgaacagagctcaggtattccctgcagaagtctttattgagcacctactgtgtgcaaagcaaccttgaggacatttaaggtgatcatgctacagtcccagactcagacagtaatgtcatttacagaagaagcgaagtcagcttggagaggcaacatggggttttaagattgaggtgggggtaactgaaggacttcctagtggagcttcctgggctgtcgactactctccccatccgtcactgcagtggccacttcctgccaggaagtgaagatagctatttgaagggtgtccacctcccctgacccactatgggcccacacac

SEQ ID NO: 28885 - DNA, 1566 bp, Artificial sequence
  DNA replication origin
tgggaggccccgcgaaggagtgggagtgggagtgggagtgccggcgggagacctgcgggggcgcgcccgggctgacgcgtgcgcgccagtgcgcgtgagtgcgggcgcgcgccgccgccccccgccggggtcggagccggttgccatgggaacgcgccgcggcccgagttaatcatttcctgtggaaagtgtgcgggaggggcgcgagcgggctggccgaggaggaggcggcggcgtggagctgcctcctgccggcgggccgggccgggccgagccccgggcgctgcggcgacgcctggatcctgcctccgccaggccggtgagtggggggcccgggcgggctgggtgcgagcggggcgctgggctctgcccggcccgccgtttggggcgccgcgtccgggccggccctgccctcgggacccctctgcccggacccgctatgggcgcggggagggaaaggcccgggagacccagccctgcgaggtcccctccagcgccgttcagcccgagtcgaggaccttgctgggagctgggcacaggggcggcgtgtcccacgggatccgagcagcctcgggaccccgtttggattttattgaacgagaagagcgcagaccctacccgggatgggcttgtcaatcggcgccgccctctccccttcctggcgtcttccccacccccagggctccctggaaggctgcctttgggtccctcccaccacgtcccttggggagttcgctttttccctggcagggcctggggcggggtgcgcccgcccagaggttaggaagaagggccttggccggtgccctccgggcagtgaggaatcgggccattgacagccgcagcagttgtgagggtctcagcagggagggcgatcccaggaccacccctttaagcccagcattgctagttagagcagaactctggctggtgcagtgaagggcctggtcctgggagatattaaagaggaagctgtgtttaattaaattctggagtaccatttactgccacccagcccccacctccataccccaacactgtctcaagattgcgggttgtggccacccctggtctttcaccttccccggcttttcctctgcctgaacagggtgagcacccattctttcccagacgtgtattccccatgcccttgttagagtagccgtctccttgaccagggagagtcatttgctaggaatgcagtctcagaatggggccctgcatttgcagtgagtggactttaggggcacagggtggtgagttctgctgttcacaggggcaccagggagcagagggtttgaaatctaggttgccctggaaagcccaggatagatgatggtgtgcagggaggtggcattccctgtacaacttccttgaccttctgcctgctctcccagggcgaccaagccctgcttgctgcagtctctgagcagctgtccagcctgtccccccagtctttgcaatgtccctgatctagggcagggggagtattgcagctctgctgtcctggtctaaacccagagaggcagagaccctcttccccagccaggccctctgcattcaccc

SEQ ID NO: 28886 - DNA, 1085 bp, Artificial sequence
  DNA replication origin
aggccttcactgaggaatctcagttgtcaaataaagcatgcactaggctgcttccagctgggggactgtgactgtcctgctctggcgtccagaacaatctgaggcccaggcccttggctccgtcgctggtcgagattcttgactggcagcccagcgcctgggcggcagcaggagatagaacccacctggagttgcccgaccccctccagtcctctccttgatcttcttgggccatcccctgacaagcaggaagggacagagtacccgccctcctgggattatctgcagaaccgtcagcctgcatgggctggcttcagagtgacttgctttctcctcttccgcacccgggggtgtggagagtgagggagaatattgctgctggctctggaataaaatgctgcctctgtttgggagacaaagaacagagtggctcctccaggtcagctgtctctcccggctggcaggcccctggcctcccccaggcctcttctgaggctctaggtgccccagtagcagggccttctgcagcaaggccgggaactgctgcaccattggtgtgttttaccttaagggactccaggcagcttccttgctgggaagatattcatttgctggggtggggctgggggtgcagaggtaggaagtgctgtggctagaaggcggcctggccagcgagtaggtggtggagcgagtgagagcgtgtgcgctgtaaacagtgtgagtgcatgtgcgccagcgcgtgcaaggacacggtaagggatgtacatgtattgtctcgtgagtaagagcttgtgtgtgtgttgggatgggaagacacgtactggtatgagagcccgcgtgagaagtgtatgtgtgagtactcgcgtggaagttttgcactcgggtttgaggctgtgcaaaagtacgcatggctcaccaggtgtggggctgtgtgggctgcctcgtgtgtgccagcccgtgtgcaggcctgttttgtgagagccttcagggaacgcatgagcacgtgtgccagtgcgagtgcgggacgcggggaggcgggagagaccgagtgggaggccccgcgaaggagtgggagtgggagtggg

SEQ ID NO: 28887 - DNA, 1424 bp, Artificial sequence
  DNA replication origin
gcacgctttgcgaacgccgcttcttctcctcttccgagttcgtgcagcaccgctgcgatccggcccgcgagaagccactcaagtgcccagactgcgagaaacgcttcaagtacgcgtcagacctgcagcggcaccggcgggtacacacaggcgagaagccctacaagtgccccaactgcgacaaggccttcaagcagcgggagcatctcaacaagcaccagggcgtgcacgcccgcgagcagcagttcaagtgtgtatggtgcggggagcgcttcctagacgtggccttgttgcaggagcacagcgcgcagcacagtgccgccgccgcggcagcggagggcgcctaccaggtagccgcctgcctgccctgactctgcggctgtggcccctaccagcctgacctgagtcggcgccgtgggcccagcaggcctcgcgcagcctagctcctcacagctgccttgcaccaagggccccacccagctcggtgttctgagacctcgggagtgaggacgcaggggtatgaggcagggagagggtgtgccgctcgtactcctggcaccagcgggcagtgcgggcggccagattgctgtggcccatcctgattccacaaacctctttcccatgacaagattcactttcttgagagccatcagcaccccccttatttccggggcactggagccaggctggaagtcaagtggcttctccctgccctaaggagggtgtgatgccagcccaaccttcccatatctttcaagctagcagccacataggttaggaaagcggaggctcatggtggggctggggccccagaggtgggctaggtgtaaggcatcagttgccgtgtgggggagaaggccagctttaagacgtaggcctggggactgggagggcagagggtgagtcacagccctctccgtctgctctagccaggggcgacgtgtccccaggtttctggcaggggagatgtgcagggtgggtcttggggctgggtctgcctggagaccagtgggcccagggggaagggggaagctgagaagttcgtgtgacaccctcagccaagggacagtgccatccttggggacaggaggaaaagcagcctgtctctgctaagggcaaatcctccggttttggaagcgcccctcccacctttgtagtgcagttcctaggtgtggtggggaatgtgccgtgctctcagcagacagaactgctggtgtgaaaggcagggattgtcagcccacctgaggctgggaggaagcaggaccaggcctaggatctccccagcagatgcaaacaagtgtcctcccctgaattgtgtgaaccaaagcgtcaggggcttggggcacagccccagtcagctcaacccagtcctgcttcagagccaagactaggccagggtggggacccccccagtaccctcccta

SEQ ID NO: 28888 - DNA, 1106 bp, Artificial sequence
  DNA replication origin
tcgcaaagcgtgcagcgcaggggcttctctgccgccgcacagtgggccagctggtgcttctgcagggccgacgcgcgcttgtaggccttgttgcacacagggcacttgaagggccgctcggccgcgccgggcaggcacttgtgccgcagcagctcggcagattggtcaaagcctttctggcacacggggcacttgaagagagtctcgagggtgtgcacgtgctggtggtagagcaggtggctgggctgcccaaagcccttctcacataggccgcatttgaagggctcctcggtcttgtgtgtgcgccggtggcgcatcagtgcgtactgctgcttgaagcccatggggcacaggtcgcacttgaagggccgctcggcgctgtgtgtgcgctcatgctgccgcaggtccgagggccgcttgaaggccttctggcactcgccgcagcggaagggccgctccccacttggcgtgcacgggtgctgcagcagctccgacgactccttgaaatgcaactcgcacacgttgcagcggaacaggtggtgctcgcccgagtgcgcgtacatgtggcgcaccaggtgagagcggtgcttgaaggtcttctcgcagactgcgcacttgtagggccgctcggagctgtgcgtgcgcttgtggtgcaccaggtgcgacgactggctgaagcttttgtcacacagcgtgcacttgtagggcttctcaccggtgtggatccgctcatgccgagagagctccgacaggtgcttgaagggcttttggcagatggggcagctgtagggcttgtcggcctgttcagcaggggtgacagtggaaggcgcgggtgctgcgggaagcgacggggcggctgtggtggctggctccgctgcctcagctggcttgtaggtcttttcacagatggaacacttcaccaggccactgtgggagctgtggtgctgtgccagtgaggtgagtagtgagaagcccatcttgcagaccccacagacgaagggcttctgctcagcctgcacgcactggtgctccagcaggtcagtggcctggtggaagatcttgagacactgtgtgcactggaatgagcggtcatggcccgccagaca

SEQ ID NO: 28889 - DNA, 1209 bp, Artificial sequence
  DNA replication origin
taagggaatggagttgtctctagagaggtgatgagaaatgctctgtggttagcatgctgcatcctgcattgccaaggcagaccagggcagtttcttacattttcctgcaggccttgacactatgagattcagaggatttaggactttgtgtgtgtgtgtgtgtgtgtgtgtgtgtgtgtgagttctgggagagaaccagagtgaggaagttctgctgtgtggacatcaagcctgggtggttctgtggccctctcatctagcccccatcacctatgggctctggttcctgtagggccacccatcctgtcacgcggagagagaatgggcctgtggtcagggatagttgaaggggtgtggtcagtccctcataggtgagagtttttgaaatggtccttggttccacgtagttgtcctaaatattgactgtcagaggccatttgccactgggctctcagacctgggaggtctggcctccttagctctaagtggtgtggcccgtattaagactcagggtagcaacaggagaggagctgcgggccttaaggaggattctgtattgtaggcagataaccccggactctcacctgtgagtctcagctaaagggttggcaggaagctggaggggacttgtggaggctgggatgtcctggcccaggggcggggcactgaggtgggtgggggtggaggccgctgccatttcctctgcctggaggagctgagctggctgcagacctctctgattgcctaagaagggaggagtcctgcagccctgagcacctctgccttccccgatgtgtggtttgtgatggtgtggtgagtgcgggcaggacagggagaaggcccaggaaactgctgcttgttccttcctcgagctcatactttctctcttctctacagaacggatcactggggaaggcagagtctccccggcactgctgggaccctcccttgaagagcccccatgtcctgtaggcagagccttgtagtctgtccgcttggttactgactcgggctgtctgaccagcccctcttctgtgccttgtctgaggtccttgtccatctctgtgattgggcagcttctctctctggattgggtcacgtgaagcgggaaactgaagccattactctccaaaccctgtttcatcttcccaagcatgtcggaaagctggcaacagccgccacagacgcagccgcagcagccacagccac

SEQ ID NO: 28890 - DNA, 939 bp, Artificial sequence
  DNA replication origin
cgcgtcgcttcctccgttccggccgccgctagcccgtcccccgcccccggtccggccgcagccgctacgcgaggccggggattggcagcgcgcgtaggccgcgccgccgcggatggagccggaataaaggggcggccgagagagcagctggtcgccgctcgccccgcgcctgccctgcaggcggcctggagcaggtgagcggcggggcgcccggggccgcatctgggggccacccccgcgcccgccgcaccccttcctctgccggcccggccgcccccccgcgcccctccgccgcgacctagcggcctcttgagcttctgggcggcccaggccgggcctcgaggcgcagccgcttcctgggcccggcctgtagccctggggcctttctccagcccggccgccctcggggctcgccctcgggtcgcagcggccgggccatcccggacgagggctgacaggacgcagcccagctgggcctgcaggcagggccggcgggaggtgatcggctttcattcggtttctcagggaggaagaagagacggggtggggcgcaggtggggggcctcccctgcctctccttgcctcctctctcccctttgcggagtgatcacagaggcttcctggctgcaccttgctgcaggagggccagggtgggcagggggtgctgcagaccaagccaggggacactgtctgacagccattcatgccagaaaaagcaaacaaaacagtgggttggcacagcggacctacaggcgctcagagaagcccaccttccccctctctgtcccgagaaggcttagagtggtacctgcttgctcaagcaacctgctgcctccacccagagcagccgctcctctcctccctcccttccggaagatgctgaggatgacagcttttagcctgactcttacatttctttggcagagcagttagaggcca

SEQ ID NO: 28891 - DNA, 991 bp, Artificial sequence
  DNA replication origin
gatgcggccccgggcgccccgccgctcacctgctccaggccgcctgcagggcaggcgcggggcgagcggcgaccagctgctctctcggccgcccctttattccggctccatccgcggcggcgcggcctacgcgcgctgccaatccccggcctcgcgtagcggctgcggccggaccgggggcgggggacgggctagcggcggccggaacggaggaagcgacgcgcgctgccggagtagcggggccggggcgaggagcgccgggagggcgggcggacggaccgatggccttgcggagacgggcggacgggcgggcggcgcgggggccagggaggcggggccgggggaggagcggcatcccgggcggcggcggccaatgcgggaggagcgggcggcgcggagcgaggccgccccctgccggggaccccgtggccgggccaggtcggacaagccgggtgctccgggcggttttcgagtcgccaggcctgggcgcctcgactaaccgaggaagggcgctctgcttccggccaccccgctcgggcttaggggagggggctccgggtgaccgccctcggcccggctctgcgcaggagaggaggggcctcctagaggctctggtctgccacaattgatccgcccctaactgctcagcttggcttttaggggcttggactttgggctggtttgaggagggggctccaggacctctgatcctggccgggctcggggcaggcaggggtctccgctgggtctagtgcgctgacccgggactgtcgtgtctggtatgtctggtcccgggtggctgcagacagcagcgggcagaaaggtgagggccctgagcgatatatgaaatgggtacacgaaggctggggaggtcccagcggggtgccgggaggctgcaggtgaccagatccgcgtgcgcagccggcagacagcttggagtcggtgggctgaatcttcaccactgtcctgccgggttccgcccctcccggct

SEQ ID NO: 28892 - DNA, 1356 bp, Artificial sequence
  DNA replication origin
ctctgcgcaggagaggaggggcctcctagaggctctggtctgccacaattgatccgcccctaactgctcagcttggcttttaggggcttggactttgggctggtttgaggagggggctccaggacctctgatcctggccgggctcggggcaggcaggggtctccgctgggtctagtgcgctgacccgggactgtcgtgtctggtatgtctggtcccgggtggctgcagacagcagcgggcagaaaggtgagggccctgagcgatatatgaaatgggtacacgaaggctggggaggtcccagcggggtgccgggaggctgcaggtgaccagatccgcgtgcgcagccggcagacagcttggagtcggtgggctgaatcttcaccactgtcctgccgggttccgcccctcccggctccgccccgaggcggtgccagcccaggccccgcccctgggagggcgcttccggcacagcggaactccgggtgccggttgaggttgctggtggacctgctctggtggtcttggatgaggccccatgagcgcggcgcccctggtgggctacagcagcagcggctccgaggatgagtccgaggacgggatgcggaccaggccgggggatgggagccaccgtcggtgaggagtgaggaagtctctccggagggcgcgcgcattcaccctagagccagacgggacccgaatgtctgggggtggagtggggagggaggatgcggggcggctctgggaaggaaaaggggacgcaggaagaaaggaggatccagaagatatacccctcccccccaccccagacaaagctccagagtggccccacctggctagggccaagttgggaggccagacctgggttcgggtccagcctcgcgctggcccactctatcgcctggcacacatccctgtaccatcctaggtccgtttcctgatttgaatacaattgcgatagtaatacttgctaaagcgtagggagagccttttcattcatccagtaaatattcactgagcacccactccctgccaggctggggtctggtaattcagtggtgaacaaaaccgtcggccttacttcctggggcttagattcttaaatgctaggccttatctttgctgagtgctttacaagcagtagctcagttgatcccacaattgctctatcaggtagacatatactttcagatgaggcatttgaggcccagaaaggggacatgacttgcccaaggtcatagagctagaaagtgctactccagctgcagcctgtccagcttggaaatgtgacccctgaaccacattgttgcatgccctgttgtttcccatggggaccttgtgccccagagttggagaccc

SEQ ID NO: 28893 - DNA, 2162 bp, Artificial sequence
  DNA replication origin
ctccctgcgcgcccagctccctctgtccatgcccggggccgggcgctgcccggagcgcgcgcctcctgcacggggattctgctcgccgccgcgcccgaccgggcccgggtccccaagcagtcccgggaggaggcgcagggagccgacccgagagagcgagcgagagagcaagcgagccagccaaggagcgggcgcccgacgtccccggcgagttcagcgcggctccgggcgctcccagccctcctccccgcgcgccgcggccgccgcgctcttaaagggccagtgtgctcccaatgcgcggacccgggcggggaccgggggcggtgccccagccgcaggcttctcacaagcaggtgcgggcggccgaggcccgacaggtgggcggtccgtttacgcttcccagacggcaggaaacctctccagcccaccccgcgtcactcccaacccagcgcctagggggcgggggtgacctccaacgcgaccccccgcggagggaggaggcagggaaggcgtggtctccccgcctgggaagaatgaagactcctccttctcatacctggtgggggataccgaggcctaggcggacgggaaggaggtcttaggggagggatcaaagagtcgttttaggcttaaatataaatatatatgtatatatggatatttgtcagcctgaaacctcttttcaaaagccgcagggtgtctctggccattgaataactttcctcagtagcaaagtgagggttttgtgcgcgtcgagggcgcgttgcggcggacaaggggcaggtttaggagggacacggttcaagttccgcgtccgccccttagctgccgcttgcacgtgggcaaattaatctctccgagcctccatgttcttatcgggaacgtggggcaaagagttggggtgagggcgaggtaagacttccggctcctggcctggcgcaataggtgcccaagcactttggccactggctggtgcgagtgaagtgcgacagtgcggccggagtcggcgcggggcgggtggacacacctccccgcgaagcttaacgagctggatttcattctattccggaagcagcttgaggtcggggcggggtggatgcaggaggccagagctgggaggcccgggtcgaaggtccaccgagacccggggaccaggccaagggcagccctggcgcggcggactggccggcgtggtcagtgggtgagggttgcaggcaggagggcggagaccgaagataagctgttccttatcttcagacccggaaatggaagccgtcctcacctgagggcggttttctctagagcaggccctcggggcaccctagccggcctcacctcccggaaactggaaatcaggagacctggcagagtgccttagagagggcgcgtttgaaccctcctgggatgtccttggggaaaggaagtcggagtttagagaaaggaaccgggcgattctatcatttccacggactcacttctctgtgggatccttcatctgggaagttggtttctaaattctccacttcgaaatttgcttttgggaaatgtgcagtggtcttcagacacggacaacggggttgtccttgtttaaccgaccacgtcgcactctttcatgatatttagtcccgattagccaattttaaaaagtttggggctaggtaaagtggctcaagcctgtaatcccagcactttgggagaccgaagtgggaggattgctttagcccaggagttcaagaccagcctgggcaacatgacaagaccccatctgtacaaagaatacaaaaattagccaggtgtggtggtgtacgtctgtaggcccagctacttgggaggctgagttgggaggatcacttgaacccaggaggttgaggatgcagtgagctatgatcatgccgctgcccttcaacccggctgtcagagcgagacactgtctcagaaaaaaagaaaaaaaaagttggggtttaaggggctagctgttagtgagaggagcccaggaatgagtggagcaacgttctttgaggcctgggtcggtcaagtctggtgattttctctctgttggaggttcctctcttggggtccaatcctgccttaaggaaatgacatcccctgtgaccagatcttgaagctcccaattattggttctggctcctataggtactttg

SEQ ID NO: 28894 - DNA, 2611 bp, Artificial sequence
  DNA replication origin
gagtcacctccacagagcaggctgaggacctgaattgtgcctgggaggagggggtagggggaggcaggtgagataagagctcccccggtgagcctggagactctcagccctgcagggcaggaacaacagtgagcacctcagccaggtggggatctggcccggaatggctacagactgggattggacatccaagggagaatgtgggataggacgtggcagctcagtggtgggctagggcctggcaggttgcaggtgtttgtcagttcctagcacatgccaggctccttgatgtctcagcctcgtgaaagtcctgtggcttccaccctgggaggggagagaggaagtggagagaggctggccttggctcagctgccaagctgctccgagaaggtcccagctgtgaccctactggaggcctgaggctgtgtggatgctggggtgaggatgagagagccagccttctccaaggaagggaggctcaacacagggtgtaggccaggcccaggagtctgaggccacagcccccggcagatgggctggctgctgaggccatttgactctttgggcccacatgtggccagacctgatgggaccctagaagcagcctgtacccaaagccaactgtaggagctgggacactccacctgtctctagccctctatctgcatggctgccaacattcaaggctccttaaaccttccggggtctcttccagtcactgcccaggtccaacccaagtgtttccccaggagtagggctccaggacagtcacaacctccagatcaggagcacggtttgtgataacgcaaccatggcttcttccctggcggcatcgagctgtgggcactccctgagctggggagttggggtaggggtgagatggaactggaaaagcagaagagagagagagtgaagcccctccaactacaggtccctgcacccctgagctcctggccagctaggatgccattagcaatgcacggccattgaattccatcactgcttcctatgtattgacgccatccctaagtagattagaaactcaatggtgggactgtgacttgaaattctttggcactccagcccagagtggcaggtgggcccaaatggcactctccgcccagtacttgggtcacaggctgaggggtaatcctcaccaacaggagccccctaaagctcctcctgcctgtgtgaatggggtgggggagggtggccagactgggtcggggcggggctcctatcctgcctcccaccagggcctggctcctccttcagctctccctggccaggccagggagggagggcagagcaggtggggaaatggctgggaggtgtaactcgagcccaggaggaattccctgcccttcctctatgcttttattaaagtagggcggggaagggcaagcttccatcggaaaaatctcccaggcagcccggagaggtgggaaagccgccgtgggccagggagggagcaccagctgagctgcaaatagaaacggcgctcaggcccgcagcccgggcagcccaagggcaccaaggcctgagcaccgttcagaagcggctccggggtggttctttctccctactccccgcccaagtcctctccccgcctatctggggcagggcgcaggtcttagaagtcggggaagagtggaccctgctcttgctctggggcaagaaagctggcgccttcggtgtcctcgctcgggagacaccatggagctggggcgctggctggactcggctctacgccgggatgtcgcgcctggtcacccgcgggacccatccagagcggggccccgggagggacgccaagcgggctcctagcgaagagaggcgcggggtccaccctctcgaatccagggcttcgacgtaggggcgctgttgggaggaagcgctgtgggaggcagggtccgtccttaggaccccgcccgggcgtgcctaggcttcctcgcaaaagcgcagaaagtcgccaaagcgcccccgcaacccgagtccgctgcctcagccgtttgcacccatccccccgcctccatcctggcccgccgtgcgcggctcggtatcacccagacgggaggccacctgggcaggagcgcagttgcccagccgcccagctcttgctccgcctgtggctgtccccgagagcagccccctccccactcgcaaagagcgccactgcgcgccagccgggctctcgaggaatcggctgccctggagggaaggaaggaggggaggcaagggctgggggcggcggaagcggctcccgggacacaggctgaatgtaagggggtcggggtgggggctcagtgcccagaacagggctgtaggagtagcggggaggagagcgaggccctgcgccctcaagggtttgcgaagaggtgcgctgcagagggcgagctggggaggggcagactgccaagtccgcttgcttccccgccacggcccagaacagggggcgcgtctccgctccctccacctccaagtcccagcctgcggacgtggcgcctctccctccaagcccccagcccgcagccaaagggcagggcgggggtcttacctcggcatggacctccgcgtcttcggccgctacgccaaggcccaggcagcccag

SEQ ID NO: 28895 - DNA, 1093 bp, Artificial sequence
  DNA replication origin
aggctgtggctgaccgtctggggtacctgcagagaggcaggggttcagaagtgaggtctgtgttcctactcagaaccctgggccccggggcccccagcacaggcccacccacgcggaaagtaaaatcctgtccatctacagcagacccctccccaacacctgcctccatcctcggtgggacctgggtcctcctccttctagcccctcctcgatctccccacactgaccttgggtcactgtgctcctgagggtgtctgcctgcatgtccccttggggacattccccttgggatgccagcctgctccagcagaggctccaggccctggcttcaggcgttttggactctgcatttccaagttgctggggatgcagcaaggggtgcccgtcaagtgcccagcacggcaggagctgccagccccgaggagggctcggtgtgggcacagagtgcaggacttggcccaccgaactggcccaggggacctcactgctggagactttctcgggtgggccctgggtgggggggtggcacttcctcaaagccactgggaagtgacaaaccagcagcactgtggacagagctgtgacaggctcaggctgggagtgacggtggaagggggcgggtcctgggatcccccaggcacttgtggtctagtaagaatactgccaagggtgaggaggagaggagggtcatgaagaacctgtgtcccttcaaggcctctagcctgcagccacagcctcgagtgaggcccaggccctggaggcagcctgccctgggtttcatttccagtaccaccatttattccccaaatgatgtgggcaagtcactaatcctcactgagccttgggttcctcatctacaaaatggggatggcagcaatgcctactcctcattggccagggacttgagagcggcatgcagagcccgctggtcacagcccacgcaccgtagagctgctggatgccacggagatcgtcctcgggcagcttgaagttgtcaacgtccttccactggtagaacggcgccatgatggcattggggttgctggagtgctccagccccagcgcgtggcccagctcatgcactgccaccagg

SEQ ID NO: 28896 - DNA, 826 bp, Artificial sequence
  DNA replication origin
cttcccaggtgagggtgggcccaaggggaggacactgagatactgaggcaggcagtggcttggaaagccagggctgcacagaaacagagccctgagctggggagctggcaccagggcttgctgtgtgaccctgggcaagtccctcaacctcttgggctggattcctccccatctagagctgagggcttaatggctccccggggcctgctgagtgagggtgggacagggggcccagagcagccagggaaaaggctcagggccaggcatgggaggcggggccagaccttgaacacgaacatctccccgcgaagcatggccactgtgtcaaagtccccgtcgcagatgttggggccatactggtcgggccgctctgtggctcggggctggactggggggcccggctttgggggccgctctggcttcccacctgggggtggtggctggggaggccggggcggccggtggtcaggccggcctggccgccgtggcgtcacagtggggagaggctgggtaggctgtggctgaccgtctggggtacctgcagagaggcaggggttcagaagtgaggtctgtgttcctactcagaaccctgggccccggggcccccagcacaggcccacccacgcggaaagtaaaatcctgtccatctacagcagacccctccccaacacctgcctccatcctcggtgggacctgggtcctcctccttctagcccctcctcgatctccccacactgaccttgggtcactgtgctcctgagggtgtctgcctgcatgtccccttggggacattccccttgggatgccagcctgctccagcagaggc

SEQ ID NO: 28897 - DNA, 1242 bp, Artificial sequence
  DNA replication origin
gtcgttttgtctttttcaaaggtgagcagaggtagggttagagggttgggcacgcctcctgccatgacctctgaccctgctggatctgagagaagaggaggtgaagggttgcattgcatgtctggtcctgtgcccccactgtgggctcactctgggaggatgaggacacagcagcaaggcaggacgggaggaagatagaggctggaggcagggttggacctgcaacccggaagtgcctggccaccttgtgcagcacagggctcagccctgcttccctctgtccttgcctctttgcctcctgcagccccatcctcataagaacaggtgcccccagcccactccggggccagatttctgtggtctgtctgcagagacgaggtcttgcagggcagcgccccgtgatggatccaccagggctctaaccccactgtcctgagcttcagtgaggcaggagctccctgaggacagggctggcaccaaactaaaagcagggagccctgggccacacactgtgagggctgcaggtgtgctccagggacacagcccccagacccagaggccaggcagtcccctccccatacaagaactatatgtgcgggggtggatgtgcacatggaagcgagggctgtgggtggcatgtggcgtgtatgggtgtgagcgggtgactcttgctcacgggaacaagtgtgcctcaggtatccatgagtgcagcatgtgatgtgcgggtgacctcattgtatgttgtcttgaatatgtagaggggtgtgagtgtgattttgtgggcccagaagagcattcttttcccgcacacacccctcagccccaggcctgacctcactgtgcctgccacccctcctgtaggtgaccgctactggctctttcgagaagcgaacctggagcccggctacccacagccgctgaccagctatggcctgggcatcccctatgaccgcattgacacggccatctggtgggagcccacaggccacaccttcttcttccaagaggacaggtgagcagtgcgtccctcccctaaggggagaaggccccatctaggcccccctcaacctcaggcctacccagaaagaatccactgcctgtggggaacgggtcctggcccaagcaggatctctaggtccacagcctggtgcttttgttcacaggtactggcgcttcaacgaggagacacagcgtggagaccctgggtaccccaagcccatcagtgtctggcaggggatccct

SEQ ID NO: 28898 - DNA, 1293 bp, Artificial sequence
  DNA replication origin
caggctataggacccttccaggcccttccccagctaatgtcagtctggtcaggaagcccagggttctagtcgtacccttagcccaaagccctctgagcctcagtctggctcctgcaagttgagaaggggcagatttgaaaatactcagggaagcaaatgagaagaagggtgttttgaagccctcagcatgtcctggcctttgatggttctcactggtggttcggctcaacctgaagccactctggcctccttgcccctgcagcctacacctacttctacaagggcaccaaatactggaaattcgacaatgagcgcctgcggatggagcccggctaccccaagtccatcctgcgggacttcatgggctgccaggagcacgtggagccaggcccccgatggcccgacgtggcccggccgcccttcaacccccacgggggtgcagagcccggggcggacagcgcagagggcgacgtgggggatggggatggggactttggggccggggtcaacaaggacgggggcagccgcgtggtggtgcagatggaggaggtggcacggacggtgaacgtggtgatggtgctggtgccactgctgctgctgctctgcgtcctgggcctcacctacgcgctggtgcagatgcagcgcaagggtgcgccacgtgtcctgctttactgcaagcgctcgctgcaggagtgggtctgaccacccagcgctcctgctaacggtgctcagggggcgcctgtggttctgagatggctcccaggggctccctccgcccccaggtaggggcccctctcagccctcacacaccctgtctgccccgccctcattatttatgtccaggtgtttgttttgttttgtttttggcaccttacttgaccatttgtttctgtttccccgactggggcagggtgtttagaattttctaaatgtagttctgctccagacagggaattaggcccccatcatcctctggcttggccacagccaggggagcagaggggcagaggcccacattggaagagcagcacctcctcagcctgaaccccagggctgtaactgccaggctctctttgcccagttggagactgtctggcccccctggtcccctccttcccaagtgagtctctctgggccttaggaagagccttccacccaggggcagccccaggccaaaggggacctggaagggaggtgggccgtggcccttgagtccccattgaggcttggttccttcccaatccagtggacttcgcagtccacttctgacagcctcagtgaccctggctcctt

SEQ ID NO: 28899 - DNA, 1399 bp, Artificial sequence
  DNA replication origin
agcccaagcctggctggcgatgtcgctgcgtgtccatgtccaggtgggccctggggcctcctcctccccacccccagcctttgttccaggaaaggcaggaaaaggcagctggaggagaggggtggagggctggagcccgcggaatgtttccagggaaaaagtgatccttccacagaacagccagccagtgccacctcccctactccaccccactcccacccttccccctcccgccgccgcctccatttcttcttccctcactttctggcagaaggagcccagcagctggaaaaaccatgctctgctcccagctcccatccttagcactgcccaaccccaggtgccttgcaggcggggcaggggtgggtgagggtgtatgtgtgcaagtgtatgagtgtgtgtgtgtgaatgtgtgtgaatgtgtgagtgtgtttgagagtgtgtgtatgagtgtgtgtgcatgcgtgagagtgagtaaatgtgtgtgagtgaatgtgtgtgtggtgtgtgagtgcatgtgtgtgcatgtgtgcgtggatgtgtgtgagaatgtgtgcatatgtgagcatgtttgtgcacgtgcagtgtagtttgtgtgtgcagttgcgagtgtgtgcatgggtgtgacagtatgagcgtgcatgtgtgaacgtttgtgtgtacgtgtgttcgagtgagggtgcatgtgttcgagtgtgtgtgcatgtgtgttcgagtgtgcacttgtgtgttcaagtgtgattatgcgtgtgtgaatgttagtgtgtgtatgtgtacctgtgtgtgttcaaatgcgagggtacgtgtgtgtttgagtgtgaatgtgtgttagggtatgcatgtgtacgtgtttgagtgtgaatgtgtgttagggtgagtatgcatgtgcacgtggtgtgagtgtgcatgtgtttgagtgtgcatgtgtgtatgagtgcgtgtgtgcgagtgtgtgttcaagtgtgattgtgcatttgagtgaatgtgttagagtgtgagtgtacgtgtgtgttcgtttgtgttcgagtgtgagtgtgcatgtgggtgtttgagtgtgaatgtgtgttcgagtgtgagtatccatgtgtaagtgggagtgtgtttgagtgtgaatgtgtgttcgagtgtgagtgtgcatgtttgagtatgagtgtccgtgtgtgtttgtgaatgtgtgttcgagtgtgagtgcatttgagtgtgagtgtacatgtttgtgagtgtgcgtgtgagtgtacatgtgtttgagtgtgagtgtgcatgtgtgtttgagtgtgagtgtgcgtgtgtgagtgtgcatgtgcacgcatggctgccgctgacgtaacccaggtgcatgtgaggacatgggagtagcgtggccatcacctgtagtcgtggatgctggagagaagcaggg

SEQ ID NO: 28900 - DNA, 1898 bp, Artificial sequence
  DNA replication origin
cctcaccctcccgagaagctgggactacaggtgtgcaccagcgcacacagttaattttttttttcttttttctttttggtagggatgaggcttgctatgttgcccaggctggacccgaactcctggcctcaagtgatcttcctgcctcagcctcccaaagcaccaaggttgcagacatgagtcacagagcctggcctttacttggatttcttacttctaacctgggccaagtccctcacactgcagtgtgacattctatgctggacagggacctgcccttggagggaagcaggcaggaaacggggagcacagagggacaacccagtggctattgagaggggaagctcatggtccgccgagttgcctgggacagagtgtgtgcctatgacaggggtgagaggagggagagggcttcccaggcagagcaggcagcatgtgcagaggccctggggaggccaggccctaccacagacatgcaggagtgatgaggatgcttggctgggtggggaggggccaacaggtcttgctccagagcaggggctttatccagaaagcaccaagccctaacccaaggtcccatgtcggcccttaggaggtgatttttggggaagatgggagccaggagcaggggcaggaagaaagcagccagcggggacctggggaagatgaggaggtggatgagcctggccagtaatgggtccaagggttgagtcaactgaccagctcaggatgaaccctgggttctgacttgagcaatggagggggctggaggagacaccaatggggctgggagcaattggggaggagcagggtgggtggggggtagtctgaggagctggtggaacaacttggggagatgcccgcaggatgggtataaggctacgagtgctggagagcctggggagagaacgggatgagggtgggaggaaaggaggaggaaaagtaaggggagttggaggaaaggagagagagaagagagcaagaaagaaaaggagaggttgggcgcagtggctcatgtctgtaatcccagcactttgggaggctgaggtgggcagatcacgaggtcaggagtttgagaccagcctgcccaacataatgaaacctcgtctctactaaaactacaaaacttagccgggcatggtggcgcacacctgtaatcgcagctactcggaaggctaaggcaggagaatcgcctgaacctgggaggcggaggttgcagtgagccgagattatgccattgaactccagcctgggagacgcagcaagactctgtctcaaaaaaaaaaaaaaaaaaaaaaaaagaagcaatggagaaagtgaaggaaagtgaggccaggcgtagtggctcaagcctgtaatcccagcactttgggaggccaaggcaggcagattgcaaggtcaggagtttgagaccagcttggctgatgtggtgaaaccctgtctctactaaaaaatacaaaaataagctgggtgtggcggcggcagtctgtagttccagctactcgggaggctgaggcaggaaaatcgcttgaacctggaaggcggaggttgcagtgagccaagattgcaccattgcactccagcctgggcgacagagcgagacgcaagactctgtctccaaacaaacaaacaaacaaacaaacaaacaaacaaaaaccaaaggggaaagtgtggtgaaagtgagaaccctggagctctacactgtggcccctgctttctgcgtgagaggagaagatgctagaaccacaggagaatggcatgattgacctacctgattatgagcatgtagaagatgaaacttttcctccattcccgcctccaatctctccagagagacaagatgttgaaggggctgaacctgatgaagagtcaggaagcagagtcccgtacctccaaag

SEQ ID NO: 28901 - DNA, 1029 bp, Artificial sequence
  DNA replication origin
ctcgcagcttaggagctgaagatcgcggacttagcgttgccgcgtccgagtccggccatcagtggctgcagatccggaggccaggagctcaaccacccttcttcggaacagggccggcctgctgctgtgccctcgacgctcggtgcctgtatctactccggggcctaggtcggctccgggggcggcttaggagaaggccgccggcgagatgttcaaaaacacgttccagagcggcttcctctccatcctctacagcatcggcagcaagcctctgcaaatctgggacaaaaaggtcgggctaggggcggcgacggggcggggtggaggggctgcaccccctcctcgtccgggggctggggacggggaatggttgtgtcgaattggggcctgggagaggccgagaggacgctgctgtgccttgtccccagcctggcgggactggggcgcgaggtgggggcgtcgtgtaagcagcggaggaggtggggggggggcggtgcatgtgggtgggcgtggctgagatctaagtgtcctgcagctgtggtgtggttaggaccgcgaccctcgctgctgtcttgacttggtcggtcagtccattcttttgagccactgtttccccaccaatataatggggttgatggtgcccatctcgtagcatgaaatgcacgaacttatttgaaggagctttggggatgtaaagatgaaaggacctgctattcacgaattccaaatatttactgatatccgtttttgtgccaggcacggtgctgggcactagacacagagcctttgttcaggcacccttacagaggagcagacagaaagactccggccaagccagtgatgtttaaattgcattcatttgctcccttcctcccactgatcccaaataagtcagaattcagtggcccttggcacctgctccacactcactgtgacttgcctgtactatgccctcggtgcctgatttctccatcaggaaaactgcagaatgctgacagtcaaagtcttgtttggattaataaactcaga

SEQ ID NO: 28902 - DNA, 1341 bp, Artificial sequence
  DNA replication origin
gagaccgccgcggagcgcgagcgccgcccgccccgccgccccgccggccgctccagggccgggccggctcggccggcgccccccgcgcccccagcccgcccgcccccgcgggcccggcctggcgcggccgcccgccgccgcgctcctcctcctcctcctccagcgcccggcggcccgctgcctcctccgcccgacgccccgcgtcccccgccgcgccgccgccgccaccctctgcgccccgcgccgccccccggtcccgcccgccatgcccggcccggccgcgggcagcagggcccgggtctacgccgaggtgaacagtctgaggagccgcgagtactgggactacgaggctcacgtcccgagctgggggtaaagccgtcgccgccccccgccgggcccgctgatccctgcccccgcccggccaccccctgcgaaccgcactcgggcccggtggtgtctcccgccgacccctccgcgggcccgcagggaggcagaggtcccgctctcgcacatgtcctcgtcttcctcttccctcccctttacccccgtttcgtccctttctccccgctttgcgcacccctttcccccaaggaatgcttttttactcggggagaagtgtggggtccagggatcgacgccgggtggaagtgagggagctgcccttcctcacacttctgggtttccactggggtgggaagtcaacagctgtcctttggagctattaaaatgccctgccttttaggttttctgagatgaggtggtgggaggaaatttcttaaagacgtccagatttttaaaacaggcattgtctaccttgaagatgtgaaacgagaagcaggtgctggggagccgcggggcacagggggcaccctctaggccttcaggacgggtgctttgctcgcccctctggattggctcagagcgttgccttcctgccccatcttcccaagttaggagagaccaattaggttaggagctctgcagagtgaagggagccaagattatgtcgtggctttcatttagggaatgagttgtgacgtgatgtatagacacttccaagtgtttgcctggtggaagcggctgaatgacgtgtacagtgggcataggcttggttaacccccagtcctggcatttatgtgtgtgtcttccttttacagtaatcaagatgattaccaactggttcgaaaacttggtcggggaaaatatagtgaagtatttgaggccattaatatcaccaacaatgagagagtggttgtaaaaatcctgaaggtgagtgtcctatgagtggtatgtaacattttcctccccacagggcaaaagtttgtaaggtaccccagtcac

SEQ ID NO: 28903 - DNA, 999 bp, Artificial sequence
  DNA replication origin
agcgttattactggttttatgctgtagaatctgtgacacagagaggttgagtaattgccctaaggtcacacagcttctaagtagcagtgctggatagatctgactccacagactgtgctcttagctgtgtcaagcaggaaggcccagggtttcatccagaaaacagaatgtgaaaagggactggaatgaaagcaacctgtactgggtgcagaggtgctgtcgataaaggatgagggatgggaaaggaagacagaagaaaggcctagaagatcaaaggagaagggtgttcaaggctgcaggcagcactggaagccaggccagctcagttgaccacctactctgggcacatccccaacccagcctgtcccttcaggtcggatttgcaattctcctgctctccctcctcctaaacacaaacaggagatttacactctcaaagtctctccccacaaatgacttattaatcacaaagggaaaaattgtaactttgcagtggcacaacctggtcaatgccagcttaaccaagtgaccaaagtggatattcagggaaggctctggaagggcatttgggggaagtgtagaaaggttttgtgaggagcactctgaatgacgggggtaggaagccttggggactgaggagtctaccctaacagggcagggtccagagggggaaggaggggtatgtctcgggggaagggagaagtattgaggtgggggaggttctgaggtttgagtgaggccctggggagggacttgacagtttgggtgacaggagggtcagaatagggtcagtatgggatgtgttgggtgggtaaaagctgggtgagtgcagggctggggatagggtctccaaggacagtgaaagggtcgggagtcgcgggcgagggctctagggcaacggccagtggaagggggggctcctgtggcgtgaagtcaagccagcccgagggtgaggcgatttggacagtccgacctgtggcggcgggagggcgagggtgg

SEQ ID NO: 28904 - DNA, 935 bp, Artificial sequence
  DNA replication origin
gcccggccgcccctactggtaagtgaggagcccctctgcccggccagccgccccgtccgggagggaggtgggggagtcagccccccacccggccagccgccccgtctgggaggtgaggggcgcctctgcccggccgcccctactggtaagtgaggagcccctctgcccggccagccgccccgtccaagagggaggtgggggggtcagccccccacccagccagccgccccgtccgggagggaggtgggggagtcagccccccgcccggccagccgccccgtccgggaggtgaggggcgcctctgcccggccgcccctactggaaagtgaggagcccctctgcccagccagccgccctgtccgggagggaggtgggggggccagccccccgcccagccagccgccccgtccgggaggtgaggggcacctctgcccggccgcccctactgggaagtgaggagcccctctgcccggccaccaccccgtctgggaggtgtactcaacagctcattgagaacgggccaggatgacaatggcggctttgtggaatagaaaggggggaaaggtggggaaaagattgagaaatcggatggttgctgtgtctgtgtagaaacaagtagacgtgggagacttttcattttgttctgtactaagaaaaattcttctgccttgggatcctgttgatctgtgaccttacccccaaccctgtgctctctgaaacatatgctgtgtccactcaggggttgaatggattaagggtggtgcaagatgtgctttgttaaacagatgcttgaaggcagcatgctcgttaagagtcatcaccactccctaatctcaagtacccagggacacaaacactgcggaaggccgcagggtcctctgcctaggaaaaccagagacctttgttcacttgtttatctgcttgaccttccctcc

SEQ ID NO: 28905 - DNA, 1187 bp, Artificial sequence
  DNA replication origin
cggctggccgggcggggggctgatccccccacctcccttcccggacggggcggctggccgggcggtgggctgaccccccgacctccctcccggacggggcggctggccgggcggggggctgacctccccacctccctcccggacggggcggctggccgggcggggggctgacccccccacctccttcccggacagggcggctggccgggcagaggggctcctcacttcccagtaggggcggccgggcagaggcgcccctcacctcccggacggggcggctggccgggcggggggctgacccccccacctccttcccggacggggcggctggccgggcagaggtgctcctcacatcccagtaggggtggccgggcagaggcgcccctcacctccaggagagggcggctggctgggcggggggctgacccccccacctcccttccggacagggcggctggccgggcggggggctgacccccacctccctcctggatggggtggctgccgggcggagacgctcctcacttcccagacggtgtagctgccgggcggaggggctcctcacttctcagacggggtggttgccaggcagagggtctcctcacttctcagacggggcggccgggcagagatgctcctcacatcccagacggggcagcagggcagaggcactccccacatctcagacgatgggcggccgggcagagacgctcctcacttcctagatgggatggcggccgggcagagacgctcctcactttccagactgggcagccaggcagagaggctcctcacttcccagacggggtggcagccgggcagaggctgcaatctcggcactttggggggccaaggcaggcagctgggaggtggaggttgtatcgagccgagatcacgccactgcactccagcctgggcaccattgagcactgagtgaacgtgactccgtctgccatcccggcacctcgggaggctgaggctggcggatcactcgcggttaggagctggagaccagcccggccaacacagcgaaaccccgtctccaccaaaaaaatacgaaaaccagtcaggcgtggcggcgcgcgcctgcaatcacaggcactcggcaggctgaggcaggagaatcaggcagggaggttgcagtgagccgagatggcagcagtacagtccagcttcggctcggcatc

SEQ ID NO: 28906 - DNA, 1091 bp, Artificial sequence
  DNA replication origin
actccttattttagagacaaggtctcagtctgttgcccaggctggagtgcagtggcatgaacatggctcactatagcctcaacctcctgggctcaaacgatcctcccgactcagtctctggagtagccaagatgacaggcatgacgccacgcctaattttttaatttttattttgtagagatggggtcttgctatgttacccaggctggtcttgaacttctggcctcaagctatcctcctgcctcaccctcctcaagtgctgagattacaggcctgagccactgtgtctggcccaagtgttgaaacttaatggccatgtgatagtattaagaggtggggcctttaaaaggtgatgaggcagtggggcgcggtggcttatgtctgcaatcccagcactttgggaggctgagtcgggtggatcacgtgagatcgggagtttgaaaccagcttgaccaacatggagaaaccccgtctctactaaaaatacaaaaaattagccgggtgtggtggtggggtcagggaatgggtgctggtcagggggatgggtgctgatcaggaggattcagtgcaggtcaagggagataggtgctgatcagggggatgggtgctggttgggggaaaggtggtagtctggagggatgggtgctggttcgggggatgggtgctgatcaaggaatgggtgctggtcagggggatgggtcctggttaggagggatggctgctggtcaggagggatgtgtgcttgtcagggggatgggtcctggtcaggagggtgggtgataattgggggggatgggtcctggtcaggagggatgggtgctgatcagtcaggggatggctgctggccaggagaatgggtgctgattcatggatgggtgctggaatggactgaatgcagcagtgagggtgagctgcgtgccagccccagtcttgcctgcctcgctcacttgcctgaggtcatgagaccagtaccatggaagaaccagaacctgagccggggctgatcgtggagccctgacctttagtcacccttacttcagaatagacagcccaggcttctgggcagcacagtaattatgggaactgccagt

SEQ ID NO: 28907 - DNA, 1587 bp, Artificial sequence
  DNA replication origin
cgcagcagccgcggcggcgagagaagctggccctgggctcaggggcgagggcgccgccgactcaccgcggagatgcggacgagacagacgcgcaggcggggagcggggcttcggcgccgccgacgcgcgggtgcaggtgcgggcagccaggagcccctccgcgtgcccgcggctgcaggggcggaggccgggctgggggcggtgcgccgcgggggcgtgcccgcgtgggtttggcgggtgtgggcgctcggcccgcggggcggtgccgggcctggggctagtcccggacggaccgcggtccctcgcgcgtggcttccgccttctgcgcggctggggtgcccggtgggcgggcgggagggcgagcggggaccgcgacgcggagcctgggggacaccccggtcgatccgcgcccccgccgacttctcacccgctccgccgcgcggactgtgctgggtgcgctgcgaggccctgcccgcccctccaggccccctgtggccgcgcggcgtcgggttcccgggggaggggacggcgctgccgtagtctttgtttagactcccaaggggaaccttagacctgcagagacatccccatcccagcgcccctgcgcctgctgcttcgcgctacccgccgtcgccgcctgggaaccgagggagaaaagcccttagggtcgggaagaaccaggggctcaggggcctctggggcgtcgtccccctccccccgttttcggagcccgagggtgtccttgaggaacttgtgcaggagtgaggagggacatcccctagcaaaggtgtcctggtccctcagggtcccaccctgaaggtggggaggtctctgctcccctcaattcacctccattatctgagcgggaaagggaacatggggacccgtctcttcctcaggctcatcctgctcggggccccgaggcactcctccctcctgccactcccctcaccagccctcctttggtcccagatgaagtcccactccagggagtacggaaatctgatggcctgaaaaattttatttggacaagacagctaaagacagggctcctggagaaccgggttctattcaggctcggccggtgaccttgggcggggctctgctcctccctgggttccagtcttttccatgcaggactctgttggaccaggtcatcttggaggtccaggatggcggtggggttgggggtgcagaggggcctgcaggcttccgggcccttccgcagacctctctctgggctggtttgcggagacgccctggttttcctttcccccagctccagggggctgtggccgtgaattaaccgatccaccagctgaggaagctggtaagattttggtggccccagatggggcatatgttcccgcttgggttacagctttgtccttgggttacccctacagcttggggtgcagtgtataaatcacaggaggcagcaatttgggttccttgctctgcggaaatccctgcctctcagtttcctcctttgcaaaggtgtggagggaggtcggtgatgacagaagtgaacctctatttctgacacctccaccaggcttagttctatatatagcagccaggagccag

SEQ ID NO: 28908 - DNA, 1617 bp, Artificial sequence
  DNA replication origin
cccccaccgcgacgcccggaggcggcggggtctctttgttcgggcggcgggcacgggggaccacctcccacggtgtcaccgcacccaccccgcgcccttcctccgcctcctggagttcaccgggaccaggtggcggcgggtgcctttttgggggtgcgcggccatgcaattggtggatttttttaaaccgttttggaggggggagcgcggcgttgggggcgggagagcgctcctggctgtgagctgctcctgccgcttcgctccgcgctctcctgccgctccgctccgggtctcccgcgctcctctccccggctcggccgagcgcgctgccccgacgccgccacccagagccgggccgcgccgggcgccgagatgaaggtgctgggacaccggctggagctgctcacaggtaccgcccgcctgccccgcagccggccgccactttccgagttggagcggactccgggcgcggcggccggggactggggcggctcgggtctgagcaggaaggggtgcggaccccaactaagtcctagttttgtgctacctgtttgtgtgcggagcccagccccgggagaggacttgaggttgtggcgagtccctggcgctggcgtccgggctgcgggagcaccggtcagggggtggccccatggggtctctgaccagcggagctcggattaggaccctgaaagctagctcagggctcctgccctccaatcagtgtcgcttgtcccctaagaaaggacccgtgggcttctggcaggacccgcgccatggacctcttatttctgcgccctgtgacaatctgagccgtctttctctgggggagaagtttcttgctgggagtggaggcgacgccaagtggcctgggaagtgggaagccagattggaccctactgactggggaccctcagccttggggctcctctggagaagtgatcagttgccctgctggaaactcacatccagggggcagtggctggagagcaagagcgaacggtcaggaagaggaggtgggaaagggagcagggacgggggggaggattcgaggagtgacttctgtgttctccccggtgtggagagacccagacaggaggaaaggaaagcaacccggtttcctccagctctgggacttataggtgctccatccgtgtatgtcagatgagcacagattccagtaagtgtcctccgacacctgggggagggggctgatcactgccttccaggaccttaatgtccgatgagggagcagagccccggagccctgttacaaggctggaaggggcagccgtctgtgggtgcgctcaggaaacggtggaatccgagtcgggggcagcttttgaagacctcgaaaaacaatttttgttaatgaagaaggaggtggcattatgggttcaggatcaagggaatggcccatgctctggggtgtgagagaggcttgttcggggagaggtatggaggctgaatggcctggaatgtgcgtgtgtgttgcgggggagggggctagaaggtgggggtggggtacgttgggtgaggttttattaaatcggcagtagcaggccaggcgcagtggctcatgcctgtaatcccagcactttgtgaggctgaggccagagg

SEQ ID NO: 28909 - DNA, 950 bp, Artificial sequence
  DNA replication origin
ggagggggctgatcactgccttccaggaccttaatgtccgatgagggagcagagccccggagccctgttacaaggctggaaggggcagccgtctgtgggtgcgctcaggaaacggtggaatccgagtcgggggcagcttttgaagacctcgaaaaacaatttttgttaatgaagaaggaggtggcattatgggttcaggatcaagggaatggcccatgctctggggtgtgagagaggcttgttcggggagaggtatggaggctgaatggcctggaatgtgcgtgtgtgttgcgggggagggggctagaaggtgggggtggggtacgttgggtgaggttttattaaatcggcagtagcaggccaggcgcagtggctcatgcctgtaatcccagcactttgtgaggctgaggccagaggatcgcttaaggccaggagttcaagaccagcctgggtaacatagcgagaccccatctttacaaaaaaataaataaataaatcagcaatagctcgtgacagacttgtagagaaggaaaggtggaagctgttcctgggacactggaaactgactgggtgctcagaagttccagcgctgagcccagttagccacggggctggcaccccctccaatcccttgccaactttttctttgtggagctcacttgaggcaggcccagctcacccaacttggaagggaaccgcgcaggccactgaacttgttaaccccctggagggaaggcttgcggttccatgggtgttttgtttgtttgttttgttttgagatggagtcccactctgtcgcccaggctggagtgcagtggcacagtctcggctccctgcagcgtccgtctcccaggatcaagggattctcgtgcctcagcttctcaagtagctgggattacaggcacgcgccaccatgcatgcctaatttttgtattcttagtagagatggg

SEQ ID NO: 28910 - DNA, 995 bp, Artificial sequence
  DNA replication origin
ggagaacaaattcagcagtggtaggagatggtgggggtgtttgaaaatacactggggggctgggcacggtggctcacacctgtaatcccagcactttgggaggccaaggcaggtggatcacttgaagccaggagttcgagaccagcctggccaacatggcgaaaccctgtctctactaaaaattcaaaaattagctgagctcacgtgatggcgggtgcctgtaatccaactacttgggaggctgaggcaggagaattacttgagcccgggaggtggaggttgcagtgagctgcactccactgggtgacatagcaagactctgtcaaaagaaagaaagagagaaagaaagagagagagagaaggaaggaaaaaaggaaggaaggaaagaaggaagggagggaggaaggaagggagggagggagggaggaaggaaaggagggagggaggaaggaagggagggaggaaggaagggagggatggaaagagagaaaagagagaaggaaggaaggaaaaagagaagagaagaggagaaaaaaaatgaaaatacatcggagaatttgggtggtctcagtgactgggggtcctacattcagtgcccagggaccacgggtgagaagggtcatgcgatgtggggacagtgctacacatgaaggatcactccccactctaccccccacagctgcacagtgagaaacgctagaactgaaagagaagagggcaagacttaaatggagtgaagttagagggctcaggagaagccagacagaggaaacaggcctgcgggacaggaagaggccaaacaagaaaagaggtagaactgtggaatggctggtgttccttcaaccacaggggtgaaggggacccacaggtcagggtcaaggtccggtccacactgccttgagtatgccacactcctgagttataaggtcccattattatgagaaatgccacaggcaaatgaaatgagccatacccaggcctagccagctctaccc

SEQ ID NO: 28911 - DNA, 1025 bp, Artificial sequence
  DNA replication origin
cacctcccgggttgaagtgattctcctgcctcagcctcccgagtagctgggattataggagctcaccaccacatctggctaattttgtatttttagtagagacagggtttcaccatgttggtcaggctggtctcgaactcctgacctcaagtgatccgctcgcctcggcctcccaaagtgctgggattataggtgtgagccaccatgcccggccggcttttattttgtttttgagacagagcctcgctctgtcgcccaggctggagtgtagtggtgtaatcttggctcactgcaacctccacctcccaggttcaagtgattctcctgcttcagcctcccgaatagctgggagtacaggcatgcgccaccatgcccagctaatttttataattttagtagagatggggtttcgccatgttggccaggctggtcttgaactccggatctcaggtgacccgcccaccttgggctcccaaagtgctgggattacaggcgtgagccaacatgtctggcgggaatggggcttttgaggtgcctttggaaaaagcagatgtgcccaggcccacagcatggggcctgtgctgactcatgaaagagggaagaagcctccacaggatctgaaacggagaccctcatgcaggggtgaggatgttatagtggcaaactctggtcctcgtgatgggtagatagagacaccacctgcagtagggccagggtgcccagagggcatgaggaggcaggagtgtgcccactgagtcagggagggaggggcagtgagggctgggccagggtaggcagagaagggtgcccagctgaggtgggcagtggaagagacaggcatggaagttaccaggccaagatgccctagttctccccattgtactggggggccctgctggaccacagaggcacactccataccagcaggcagcacctccgtgcggctgtcccgcaacctgcacacttcagcacttgcgatgggatgcaggggtccccaagggccaccatctgccctatcaaaacct

SEQ ID NO: 28912 - DNA, 1145 bp, Artificial sequence
  DNA replication origin
gggcagcccgcgccccgccgcgggtcctccgcccgccggctcgctcgctcaccttgggactcagctccagccccacccgccggcaccagctcaggaagcaggccacaggatccaggtcgccgccgtccacgggccccgccacctgagataagtgcgcgcagtgaccaggtccgacccccagagaggccgctgggaactgcaggagaccgcggcgcgagcgcagaacgggctttgggtggaggaggggacgagcggagaggggcgcgggacccgcgggagggagcggagggggcgcaggcggacggttctgcgaacggagaaggggtgaggcgcggaggaaaaggctggaccccgcgcccgccactcacccgtggacgcttcgcctgggtcgccatggtctaagagcgcgtttcctcgcgggccggcgcaccgcgcggtcacttccggcgtctctggccccgccccggcgccggaaccacgtggtgcctgttttgtcgtccacgctgcagactggccggagttaccgcgggctggaatcgttcctcatgaaaacatcttgagtccaggatctccaattgcactcacgcgctgcgagtgcagaaggagagtcccgtgccgcttggcgcctggttctgagccaggtacagccctggccttcggtctgtccccgagggctgaggcttcttgcggtctgggtgcaagaacaaaatacggtttctggatcggaagccgagggtctggtggccggccggtggtgagcgacgcaactgggcggcgagcgacctcctgatctcgaccccttgttgccgatggccatggaacccttttactggtggtattcgttcagagcagttttcgtgtgtgtttcagagtggcgtggcctagagggctcctggatctagaatagatcctctctgcccttatttgccagtacatcctcgtttttaatctgctgcatagcacgtggtgggttttattagctgacatagtagggactcaatatctacctattgggtaaataaatgaataaaacaaatggtggttaaacctggggaagtagcatgctgttaaatgtaagaaaatgaggctgtgaatatagaggttacaggaatgggttttgaagccaagcaacgccgcagctcaac

SEQ ID NO: 28913 - DNA, 1321 bp, Artificial sequence
  DNA replication origin
tctcctgcagttcccagcggcctctctgggggtcggacctggtcactgcgcgcacttatctcaggtggcggggcccgtggacggcggcgacctggatcctgtggcctgcttcctgagctggtgccggcgggtggggctggagctgagtcccaaggtgagcgagcgagccggcgggcggaggacccgcggcggggcgcgggctgccctgaccagccctcctgctcaggtggcggtcagccggcagggcacggtggccggctacggcatggtggcccgggagagcgtgcaggccggagagctgttgttcgtggtgccgcgggccgcgctcctgtcgcagcacacctgctccatcggcggcctgctggagcgaggtgggcacggcggcgggctagggccctggggcggggcggggcggggcggggcgggcccggcccgcgaggccgcgccggggcgctcacacctgtgtcttcctcagagcgagttgcgctgcagagccagtcgggctgggtgccactgctgctggcgctgctccacgagctgcaggccccggcctcacgctggaggccctactttgcgctctggcccgagctgggccgcttggagcacccgatgttctggtgagagccttgggaggggttggggagcgcctgcaccgtagcctgctgcaagaagtttccccgcccctgcaccagtcctacccagtaaagtgtgtgaaggaatgaagggaacctgggtgtgggtgtccctgcaggccagaggaggagcgccggtgcctgctccagggcacaggcgtacctgaggccgtggagaaggatttggccaacatccgcagcgagtaccagtccatcgtgctgcccttcatggaagcccaccccgatctcttcagcctcagggttcgctccctagaactctaccaccagctggtggcccttgtgatggcctataggtcagtgggtggggcctctgaggacggaacccttttctttacaactctatagagggacaaaagtggaaaaacagtgaaatccacccccagtccctcacccaagacagggccttagccaggttctgtcaatggcagctttcaggaaccactggaggaagaagaggatgaaaaggagcccaactcccccgtgatggtgcctgctgcagacatactaaaccacttagccaatcacaacgccaatctagaatactctgcggtgagtggagtttctcttggtgcactgattgagcatgattcaagccattgtgtcttaggctccattctcttactagtgctacaaaatgagtaggtgaaatcagctcctcctgtatgtcc

SEQ ID NO: 28914 - DNA, 1182 bp, Artificial sequence
  DNA replication origin
tcgcctgatcttcccaaagtgctgggattattggcctgagccactgtgcccagctgatgttgtctcttttttaaaaagagaaagaggcggaggggaggggaggcgaggggagggggaggggggagaggtgtgggggtgggggagggggaggggaggggaaggggaggagagggagaggggaaggggaggggagggggagggagggggaggggagggcagggggagggggagggagggcaggggagggaggggaggggagggcagggaggaggggaggggagggcagggaggaggggagggtgaggggaggggaggggggaatgcttttgtgatgtgtctgtggtcatccaagaaaaccacccactgtaggctacaaagactcccttacctctgcgcagcgtcttaagaaaagcgtctatctgttcttgtccaactccaaaggctcccttctgcccaaagaggagatgggagaggaggaggtgtaggacctctattgctatatcttggaagccaccttcttgatttccactgacgtctgcgtcaatgtaagaacgcagaagatctggaagcttctgtttgataaactgggcagctagaagtcaggtaaaccaaaaaccgcaagttacttttgcaccacaatgggttaaaaagtcatataccatcaaaatgcagataatcacccttctcattcaccagttcacccatctctctaatgctttctctagctgacaggtataaagaaaccaatggccagggactggcagtggggaggggaaaatagagagttgttgatgggcatagttctgtttggcaaaataaagttccagagagatgttacacaacctgaatacaattatccctatggaactgtacacttaaagtggttatgagggtaacatttatattacatgttttttaccacagataaagagaaattaatttcagattatcttactctctaagtctaaatcacagagcctcatgattaaaaacccacgtattttaaagtctcacttcgtgatatttttggaaaaagtaactcaccgaaacctctaagatctgagctggaagaattcaacagggcaaggccaaaaattacctgaaacaagaaggattagattaaccaaagagtcaaatggctgtttttaattctagttttgtctacatctcttttcataaatc

SEQ ID NO: 28915 - DNA, 853 bp, Artificial sequence
  DNA replication origin
accatttgtcattgtccttccctcgccttgttcacagttgtatcgttggcatctggtccagagcctggctctgagaaactgcagttacgaaatatttactgaatgaaagagcacagggagatggagaggaagattgatagcctccctgcaaccggacctccttaggggcaataaggaaaaaacaaaacaaaacaaaaaaagagacacactacacctcgaccctttcccaagcaaaggccaaacgggccccggggtcacagggacctcggggggtcgcaaggtcaggagaatgccgcacgccaaggtcgcaggtgcgggaaggaaagcgaggcccgaatgccggcgccccggaaaccttcctctcgcgctcttcccgcccagggcacacacgcggcagccagccgccgccggcccaccgactcgggcgggccgggggccaggacaggtgcgcccgccgcccccagggcaccctatcaagggcacggtcgttacccggcgccgctgccccagtactatccgcacccctcccactgaatgggagtccggcaaccgccgagggccacacttcctttccctagggattgcgttgcacgccttcctgcagggcccagtgcggggaccagagggatgtgggatcctgaggatcactgtggggcacggacgctcaatcctcagtccccagtaagggaaagccgagggggtggcagaaaagtgtgtgtgtgtgcgtgtgagtgacagtgtgtatttgggggccgggaggggtgaatgtcctggggtgctcgcagctcggcggggcagggccatcgccctggctccatctccgtttcccttggcttacctggctctggcagag

SEQ ID NO: 28916 - DNA, 976 bp, Artificial sequence
  DNA replication origin
actcgggcgggccgggggccaggacaggtgcgcccgccgcccccagggcaccctatcaagggcacggtcgttacccggcgccgctgccccagtactatccgcacccctcccactgaatgggagtccggcaaccgccgagggccacacttcctttccctagggattgcgttgcacgccttcctgcagggcccagtgcggggaccagagggatgtgggatcctgaggatcactgtggggcacggacgctcaatcctcagtccccagtaagggaaagccgagggggtggcagaaaagtgtgtgtgtgtgcgtgtgagtgacagtgtgtatttgggggccgggaggggtgaatgtcctggggtgctcgcagctcggcggggcagggccatcgccctggctccatctccgtttcccttggcttacctggctctggcagaggccgcggcggcgaggcccgggtggaaggcggcggcgatcccggggaggacgcggccggagtgcagcagggccatggtggaccgtaggagggcagtgggcagccgcaggacggagcagagggcgagcggacacacacacagggaaccggctcctgctgaaggtaaggacagggacttccctgggccagagcggccgcgtgctgggcccgagccacgtcacagcgatccctggcggccggcgggcggagcggcgtgggctcagcggaggtcgtggaagaggatgactgcacagtttacctacgcccagcccttgctgcgcttcattcatttaatccagctgggccaggcctggccggccgaagaggtggctgctgttatggcagtttgaaagatgagaaaatgtaggctgacatagttgacgtattttgtctgatgccttacagccattaggacccaaggtggccttactttcaaccctaatagtttccctaagcacaagtcatgtcacgtcgttcctgaatgtttccttatcccccaccctt

SEQ ID NO: 28917 - DNA, 1252 bp, Artificial sequence
  DNA replication origin
ttgggcggttgatgggaccaggcgccctggagcagggggtggtgctcgtcggggaggctcaggccgcgcaggagcccacggcggggtggggaggagactcaggcatggcccgctgtaggtcccgagccccgccccgcggggaggcagctaaggccaggcgagaaatcgagcgcagcaccggtgggccagcactgctggggaacccgcgcaccctccgcagctgctggcccgggtgctaaacccctcactgcccggggccggcgggctggctggccactccgagcgcagcgcggggcccgccaagcccacgcccacctggaactctagctggccggcaagcgccctgcgcagccccggttcccacctgtgcctctccctccacacctcctcacaggctgagggagccggctccggcgtcggtccatcccaggaaggggctcccacagtgcagcggcgggctgaagggctcctcaagcgtggccagagtgggcgcgaggccgaggaggcaccaagggtgagcgagggctgccagcatgctgtcatctctcaccaggaggcagaggttgcagtgagccaagatggcgccactgcactacagcctggacaacacagtgagactccgtctcaaaaaaaaaaagaccgggtgccatggctcacgcctgtaatcccagcactttgggcggccgaggcgggcggataatgaggtcaggagatcgagaccatcctggctaacacagtgaaaccccatcaatactaaaaatacaaaaaactagccgggcgtggtggcatgcgcctgtagtcccaccagctacttgggaggctgaggcaggagagtcactggaacccgggaggtggagtgagcctagatcgcgctactgcactccagcctgggcaacagaggagactccgtctccaaaaaaaaaaaaaaaaagattgagatgggagcatgaggcttttggttgaaaagtgttacttacttagcaggaaagccttgtccgtattgatccctggtgaccacagaacagctttcataatttcagcagaatgtccggctgtggtcaaagtaattttaaaacaacaatacagctggtcatagtggttcatgcctgtaatcccagcactttgggaggctgacatgggaggatcacttaaagccaggagttcaagaccagcctaggcaatacagtgcgaccccgtgtctacaaaaaattaaaataaaatattagccgggtatggtggtacatgcctatag

SEQ ID NO: 28918 - DNA, 1764 bp, Artificial sequence
  DNA replication origin
cgtctctgcccggctgcccatcgtctgagatgtggggagcgcctcagccccgccgccccatctgggatgtgaggagcgcctcggcccggccgcaaccccgtctgggaggtgaggagagtctctgcccggccgccccgtctgagaagtgaggagaccctccgcccggcagccgccccgtctgagaagtgaggagcccctccgcccggctgccaccccatctgggaagtgaggagcgtctccgcccggcagccaccccgtccgggaaggaggtggggggtcagcctcccgcccggccagccgcccgtccgggagggaggtgggggggtcagccccccacccggccagctgccccgtccgggagggaggtgggggggtcagccccccgcccggccagccgccccgtccgggaggtgaggggcgcctctgcctggccgcccctactgggaagtgaggagcccctctgcccggccaccaccccgtctgggaggtgtacccaacagctcattgaaaacgggccatgatgacagtggcggttttgtggaatagaaaagggggaaaggtggggaaaagattgagaaatcggatggttgctgtgtctgtgtagaaagaagtagacgtgggagacttttcattttgttctgtactaagaaaaattcttctgccttgggatcctgttgatctgtgaccttacctccaaccctgtgctctctgaaacatgtgctgtgtccactcagggttaaatggattaagggcggtgcaagatgtgctttgttaaacagatgcttgaaagcagcatgctcgttaagagtcatcaccactccctaatctcaagtacccagggacacaaacactctgcctaggaaaaccagagacctttgttcacttgtttatctgctgaccttccctccactattgtcctatgaccctgccaaatccccctctgcgagaaacacccaagaatgatcaataaaaaaaaaaaaaaaaaaaaaaagaggagttggaggtagagacaagttaagtaaagcttctcagttatgactgttaaagtggtacatgaaggatgaataggagttcataagttaatcaaagggaagagagggttctagggcacagcataaacaatagcaaggaaaagtatagcatcttcagggaactccaagtaaattagattagagccagaagaaatgggtaaaataaggaggagaaatgagaaaaaaaaacacaattctcataaatgttaggttgcaattttttgaaatgaccataatggagttataagcaaacttgaataaaatattaatgtcacataaggatagatcacttgttcatttttacctagtttgtggcaaaactaaacctagaagctgtctcccaactccaagtgtggtgctctatcctccagaccagtggttcataaacaagggtcccaggactaacagtttcagcactacccaggagattattagaaatacacattctcagacttcgttccagaactactgagcgagaaactctgaggatacagcccagaaatgtgggcctttaaaagccctccacctgattctgaattacactaaaatttgagaattgctgctctcgaccatgttgtgattttcacattcccaaggaattttcacgaaggaaactaaaggaaaagcaaagattgcctctttttttggtcaattgagaaaacagccttatgttcataataaaactctatcaatcaaggactttgtgaaaatggtatgaaaacgttctgcttga

SEQ ID NO: 28919 - DNA, 1092 bp, Artificial sequence
  DNA replication origin
tcccccttttctattccacaaaaccgccactgtcatcatggcccgttttcaatgagctgttgggtacacctcccagacggggtggtggccgggcagaggggctcctcacttcccagtaggggcggccaggcagaggcgcccctcacctcccggacggggcggctggccgggcggggggctgacccccccacctccctcccggacggggcagctggccgggtggggggctgacccccccacctccctcccggacgggcggctggccgggcgggaggctgaccccccacctccttcccggacggggtggctgccgggcggagacgctcctcacttcccagatggggtggcagccgggcggaggggctcctcacttctcagacggggcggctgccgggcggagggtctcctcacttctcagacggggcggccgggcagagactctcctcacctcccagacggggttgcggccgggccgaggcgctcctcacatcccagatggggcggcggggctgaggcgctccccacatctcagacgatgggcagccgggcagagacgctcctcacttcctagatgggatggcgaccaggaagaggcgctcctcacttcctaggtgggatggtggccgggcagagaggctcctcactttccagactgggcagccaggcagagacgctcctcacttcccagacggggtggcggccgggcagaggctgcaatttcggggctttggggggccaaggcaggcggctgggaggtggaggttgtagcgagccgagatcacgccactgcactccagcctgggcaccattgagcactgagttaatgagactctgtctgcaatcccggcaccttgggaggccgaggctggcggatcactcgcggttaggagctggagaccagcccggccaacacagcgaaaccccgtctccaccaaaaaaaatacgaaaatcagtcaggtgtggcggcgcacgcctgcaatcgcaggcactcggcaggctgaggcaggagaatcaggcagggaggttgcagtgagccgagatggcagcagcacagtccagcttcggctccgcatgagagggagaccgtggagg

SEQ ID NO: 28920 - DNA, 1744 bp, Artificial sequence
  DNA replication origin
tatgtaacagaggtacagtatccttctggcaattttatgagaagtgttttataatgaatcactttctcagcaatagaaaatgttaactgtaaaagattttaagtagaaaaatgatgttcagaattaatttaaagaattactggccagatgaggtagctcatgcctataatcacagcactttgggaggccgaggcgggcagatcacttgaacccaggagttcgagacaaacctgggcaacataatgagaccttgtctctgcaaaaaaaaatacaaaaaattagctgggcaaggtggtgcgtgtgtgtggtcccaactacttgggaggctaaggtaggaaatcatctgagtctgggaggctgaggctgcagtgagctgagatcacaccactgcactccagcctgggcaacagggtgagaccctgtctcaaaaaaagaagaaagaaaagaaataattacttttctggaatatttcttccagttggtttttacaagattttctaccaataacttgcactcttcctgaagaaaagaaagtgatagtggtggtggtattagcagaggtggtgagggcatggtggcagttgtgggtggtgggagtgacaggtgtgagtgattctggtaggtgatggtagttgtgcttggtgtggttgtagttgtaggttgtacggtggtagttgagggaggtggcagtggggatagttatgggtaacagtggtaaggaaggtggtagctgcaggtagaggtgatggcagtagaggtggtggttatgggagagataatggtgacatttgtgggtggcagtagctatgggtagcagtggtgatgacagtttgaggtaatcgtggatacggtggtgatggaggattgtgatagttatgagaggtgatgatgatggagatagcaattcgggaagatagtggtgacagttgtgagtggtagttactgtaggtggtaatggtgatgatgtgggggctagctgtgagtgggagtggtggtggtcatgatagctgtgtggggtgtggttgtagttgagggttgtgtgggagatgatgatggtagttgtcagcggtggtggtggtggtggtggtggcagctgtgtggggtgtggttgtaattgaacattgtgcagaagatgacagtagttgtaagtgggagtggtggtggtggtggtggtggtggtggtggtagctgtgtggggtatggttgtagttgagagttgtgtgggaaatggtgatgggagtgatgagtggtagtggtggtggtggtggtggtggtggtggtagctgtgtgggttgtggttgttactgagggttgtgtgggagatgggggaggtagtggtggtggtaggaaatggtgatggcagtggtgagtggtagtggtggtggtggtggtggtagttctgtggggtgtggttgtaattgagggttgtgtgggaaatggtgatggcagtggtgagtggtagtagtgggggtgatggtggtggtagctgtgtggggtgtggctgtcattgaacattgtgcaggagatgatggtagttgtgagtgggagtggtagtggtggtagttgtgtggggtgttgtagttgaaggttgtgtgggagacggtgatggtagtgatgagtggtagtagtaatgggggatcatagttgtatatatttggttgaggtgtgggaaaaatatgaacagaggtaattattcttaatgggaaattttagggatcatattgtatgattgactacgttgctt

SEQ ID NO: 28921 - DNA, 1226 bp, Artificial sequence
  DNA replication origin
ttaaccttgactatgcctttagctccagccacctttttaagaggaaattgctgggcaggagggggagggctagtcatggaatgaaactgtaagcctgaccaggtgtgaggaggggaggtgataaaaggattgtagggtggaggagcagaggctgaggaagaattgggacctagctcggcctggggaggagcagcctggggaggaagggagaggtcagatgggtctgtagaaaaggaagattagaaagactcagggacacttggggttggtactgaggggacaggcgggagggaaaggaggaagatttgggacgagttgcactgggcacagagactaggaagggattgatgtgtaaaagaatgcctggacgtcaggcacctaagaccgtttgcctattttacaacaagaattatttagatcttgcaggatggaaaaattcaaagtgccattttctggctatttggaactgctgtcgagtttgtattggggtcaagcggcattgcagaagaaaataaggcatttaggttttaagtcaggtgtgagttgaagaggttttaagtttttgagaacacaggccaagggagtagaaggaggaatggagggtggaaggttcccatagtgaaggaagcaagcctagagaaaagagagagtagagaaatggagggaagtggttcgggggttcttaccttccagaaaagtgggaaaaggggttggggcacagagataagaggtcggggcatggaaataagggatggggtgcagaaataagaggtcggggctcagaaataagaggtcggggctcagaaataagggattggggcgcagagatatgacgttggggcgtggaattaagggattggggtgcagagatataagaggttggggtgcggaaataagggattggggtgcagagatatgaggttggggtacttgcccctctagaaaagtgggacttgctgctaagagtgaaggagaaggggttgaggggtacttgcccctctcccagaaaagcagagaaggggtagagacaagtagagaaggggttggggtacttgccctgtccccggaaaagcagagaaggggtagagacaaggagagaagggcttggggtacttgctctgtccctggaaaagcagagaaggggtagagacaaggagagaagggcttggggtacttgccctgtccccgaaaaagcagagaaggggtagagacaaagagagatgggg

SEQ ID NO: 28922 - DNA, 1214 bp, Artificial sequence
  DNA replication origin
agagctgtggcctttcagggagcatagtcccaggggctccctgagccagggctgtgaaaccctcttccgggcactgcagttcctggcatctccaaacttctgagtgccaccgcattccccgcgtccggatgcaggtaagaggtgacaacgtgctcgcagccctcgatcgctctcggcgcctccttggcctcggcgtccgctctggccgcgctcaaggtgcccttcagcccgccgctgcgctgtgggggcacctctctggggctggccaagaccggagccggctccctctgctcgcggggaggtgtggagagggaggcgcgggcgggaggcggggctgcgcgcggcgctcgcgggccggcacgggttccgggtgggcgcaggctgggcgggccccgcactccgccagctggctggccccagctgggcttgttgtggcggggtaggggggtggcgagctccctctgggctgcgggagtgcccgggctaggtgctgcaaagtcccgcggtgagtgccactgggaggtgaagccggctgggcttctgggtccggtggggacttggagattttctgtctagctaaaggattgtaaacgtaccaatcagcactctgtgtctagctaaaggtttgtaagcacaccaatcagcgctttgtgtctagctaatctgatggggacttggagaacttttctgtctagctaaaggtttgtaaacgcagcaatcagcaatctgtcaaaacggaccaatgagctctgggtaaagtggaccaagcagctctctgtaaaatgggccaatcagtaggatgtggctggggctagttaagggaattaaagcaggccacgggagccaacagctgcaatgcgctccggttcccttccacgctatggaagccttgttcttttgctccttgcgataaatcttgctgctgctcactctttgggtctgcgccgtctttatgagctgtaacactcacgggggaaggtctgcagcttcactcctgaagccggcgagaccacgaacccaccaaaaggaggaaactctggacacatctgaacatctgaaggaacaaactccagacacaccatctttaagaactgtaacaccgtgagggtctgcagcttcattcttgaagtcagcaagaccaaaaacccaccaattccgggcactcaggtacctccagcagaagctgcatgtagtacatctgctctagccacagc

SEQ ID NO: 28923 - DNA, 1201 bp, Artificial sequence
  DNA replication origin
acacaaagcgctgattggtgtgcttacaaacctttagctagacacagagtgctgattggtacgtttacaatcctttagctagacagaaaatctccaagtccccaccggacccagaagcccagccggcttcacctcccagtggcactcaccgcgggactttgcagcacctagcccgggcactcccgcagcccagagggagctcgccacccccctaccccgccacaacaagcccagctggggccagccagctggcggagtgcggggcccgcccagcctgcgcccacccggaacccgtgccggcccgcgagcgccgcgcgcagccccgcctcccgcccgcgcctccctctccacacctccccgcgagcagagggagccggctccggtcttggccagccccagagaggtgcccccacagcgcagcggcgggctgaagggcaccttgagcgcggccagagcggacgccgaggccaaggaggcgccgagagcgatcgagggctgcgagcacgttgtcacctcttacctgcatccggacgcggggaatgcggtggcactcagaagtttggagatgccaggaactgcagtgcccggaagagggtttcacagccctggctcagggagcccctgggactatgctccctgaaaggccacagctcttctctccttctcatcacctccaatgtggcaagtgggtggggcggtggggagcagggggaggagagtgcgtgttttagccctgtttgtgttacagcttcttcagtcccatcattctgcaggtcccgagttcaggcaggtcattctgtcaagtgtccagctgtcagcaaagaggagacccacagcgggtagctccttcatgcagctagcagcccagatgtctgtgagtttgggtgagtctggagttttatggacttcagaagacaggaagtgcgtgttgattggtccatgggtggccatgggcgggcctggaaaaagcacctataagttctcactccaagccatggactccaccccaactgacagcccagcccccaggcttcaggctgtccctggcttgaagttggggcttcactaggtacccacccctttctgcccgggagcctctctgcctcctgccaccatcaatcatgcccacagcgcccaagctgtttgatccaagggacgcctgcaggcctgcgccaagccactctcagcctcaccgcggcct

SEQ ID NO: 28924 - DNA, 1169 bp, Artificial sequence
  DNA replication origin
ggagagagagggagaaagagaggaaaaagacaggctgctatggttaggatgttcccccctacctcgcactccaaacctgatgttgaaatttgatcttcaatgttggaagtggggcctattagaatgtgtttggatcatgggggtggatccctcaagaatggcttggtgctatggtggtaatgatagagagacttcccattattggttcctggagagctgatggttaaatatagccttgtgcctccccctgctctccaccttcctctctcgccacgtgatctctgcacaggctggcttcccttcaccttctgccatgagtggaagcagcctgtggtccttaccacatgcagatccccaattcagaacttttccaaacatcagaattgtaagccaaataagcttttttttctttataaattacccagcctcaggtgttgctttgtagcaacacaaaatgaagtgagatggagcgatagagggtgggtgggagatacacaggatgaggggagagagacggaagagagggaaagagagagggagaaagaagcagcgagaaaaagagaggaaagcagggagggagggaagggaagggaaggaaggagatggaggcagaggggaaaaggagagagggagataagagaggagggagagaacaggagagggggaaagaaaagggtgggagaaagagagggagagagaaggaaaaggaggaaggggaaaagagggaaaagtagagacagaaaggaagagagggagggaagagaaaggaaagggagatggaggagagagagggggatgagggagaaaaagacagaaaaagagagagactgagagaagaaggaacagggaaagaaaggaagctgggaaagggagaggactgggaaagaaagagcaacagagagaggggagaaaaagagaccgagggaaagagatagagaaatattaagtgagataacggtgagagatgagatgaaagaaaagaaaggataaggtatgaaaagtaatagaagagaggagacaagaggaaaggaggctagagaaacaggaagaggagaagagaagaagacagagaaagaaaattgaaatcgggggtaggtgggaaagggtaaggggtttcaaggctggactattcagaccattttaagccatgttcagatgttgcacattct

SEQ ID NO: 28925 - DNA, 1011 bp, Artificial sequence
  DNA replication origin
ctgcatctgcagataggaaatgccccagtactggaacgattaggccaccaaacatattttttaatcttaaaactcagatagtcttacaatgaaaatcacttcctcctctatcagcttaaccagtagatgtaagaatttttgcatatttttacaaaaacttttatgtggatgagggaaggaaggagggagggaaggagggagggaaggaaggagggagggaaggaaggagggagggaaggaaggaaggagggaaggaaggaaggaaggaaggaaggaaggaaggaaggaaggagggaaggaaggaaggagggaaggaaggagggaaggagggaaggaaggagggagggaaggaaggagggaaggaaggaaggaaggagggaaggaaggaaggaaggagggaaggaaggaaggaaggagggaaggaaggagggaaggaaggagggaaggtaggagggaaggaaggagggaaggaaggagggagggaaggaaggagggaaggaaggagggaaggaaggagggagggaaggaaggagggaaggaaggagggaaggaaggagggagggaaggaagaagggaaggaaggagggaaggaaggaaggagggaaggaaggagggagggaaggagggaaggaaggagggaaggaaggaagaaaaataagggaaggagaaaaggaagaagtagggagggagggagggaggaaaagagggaagaaaagttggcccgttatatatgtgttttcccacttcagatctcaaatcattaacctgttggcagcacttatttgtcatggtctggccttaggtaagcttgagactcacgatttgatggaagaatatatttaatggtaagcatgtctcaaacgtcagctgtgtgttagatctgagttacacaatatgcaacatgttctctcctctcctatagttctaatattgttcatttattcagcaaatgtttgtagagaacccctctaaaaatgtcttctcccagaggcataaatttacctcctaaag

SEQ ID NO: 28926 - DNA, 1522 bp, Artificial sequence
  DNA replication origin
aatcctttgaatttttacagaacctcattctgaacagatgtatatgtttagatatgggcagatgcatacaaccacagacagatgacaaggcatagatagaacacatacacaatgtaagtagagcacacatttggcagtgggggtacaagagtgtgaaagaaagaggtattaaaatagtagcgaagtatgctttcgagggaagcagaagtctttctagccccaccattctctcaagaattttctcttctttgttgctcattcattcattcattgtttttcctttgaaattgtgctcattgatttattgttttgtcttctttattgctcattcattcattctttttactttgaaatggagctcattcattgtttttactttttaaataattgtatatcaagtatttctatgcacactgacacatagaattgggacctatgtaaaggtgagacagagaaagagaaggagggagggaagaagggagaagagaagaagaagggaagaaagggaggaagggagggaggaagaaaggaagggagggaagggagggagagagagaggaaggaaagaaggaaggatgaagggagagagaaaggaacagagggaggatgaattggagaaagggagggagaaaggaagggaggaagggagggagagaggaaggaaggaagaaaggaagggaaggagggagggagggagaaatgaacggagggagggaggaaggaagggagggaggaaggaaccaaggaagggagggagggaagaagggagggagagagagaagagggaaagcagggagggagggaagaagggaggaagggagggagggggcagggagagaaggagagagagaagaaagaaaggcgggaaggagggatgaaaggagggagggagggggcagggagagagggagagacaaaggaagagagaaaaaaggaaaggaagaaaggaaggaaatgagagaagaagggaaagaggaagggaaagagggaaggagggaggaagggaaactgcaagataaagtaatcaggtgagtgaggggcctgaaatgccctgtctttcctctcttcttcagcacacaaggaggcagtgtcttaaacaaagtaatcacagggttccagaggaggcaggtgggtgagaagaatgaagggagctcccgaaataagatatgactacagaaaaaaaaaaaaaaaaaaaaaaaaaagagggagagagatgatgacatgattggatctatgagactgtctatttttagtggcctaaagaagactctctcccgtgaccttgccaaattatgatgcaaacacagttaatgaaagctctctcaagcttctcttcgaagtcagctcattaccagatcatttctgcacactcatcgcccaaaaccctgtaacctcattaaagaactaatcctaacaggtttgacctgaaagttagcagatggatttacttgaacagttttctgcttttctagtggtttttcccgaagaaacattaaagaccaggttagcacttctaagccat

SEQ ID NO: 28927 - DNA, 1136 bp, Artificial sequence
  DNA replication origin
gcaggctgcggtgcgctacagccctccagcccgagtctctgcgggagctctggcgcccgtttgtaagctcccaccagcgcaggagtaggtccatgagcggcccagactcgggctcgcctctggcttgggattggcgaaagctgccagggtcaacgttaactttgagaaccacaccttcccgaaacctgcgccgcttctcggagcgcgccaagcctctctagctcccggcacgcacggcctccctccctgcgctctgccccggaacgcgagccgggaggtgggaagcactgagaagctggccagatggggaggacggcgaggagagctcccttctcccccctccccaacccagaggaactgtaggagggcccgcctcacgctgtgaagcggagtccccagagaaagtggggtcgggggaggcttgcgggtccggcttccttgtccgtttttttgccgaggccctgctttcgcccggggctcgccgcgcctgcctctcccgggtgaaaggttttctaggtgctagaagaagccctgttgcttttgctgataatgcagtaggaatttcatgggccatcacactgctattaagaaatcgcatcttttaattatttaataccatccctgcctgacgacgggttatccctaagggatgggagtggggggttgttcttgaaacccggctgtatgagggtatagatttcactaaagtcttcccccttcgtctccccctaaagaaatcgtgctacgatcgctctgaaatcttttcttattttcttcttctaatcatggctatcggtttaatatgaggcagtaagttttcgttttaatcacagggaggctaccataattaatctggctagaggacggatcaatttcctcatcacttgggcttgcagcagacgtcgatggttttgcggggtgtctggatttcctggggatggggatgcagatgtgttctcaggagcgaggatcctgtagcatcgcatgagcacatttgccaggctgggctctgagcgctagagcctaatatgttggcagagaagagaagggactgaccttcttttcgttaatcctggaattgtttttcctacaaatacgtaggtgcagacaccagaacagaaatattaactgcccaa

SEQ ID NO: 28928 - DNA, 1593 bp, Artificial sequence
  DNA replication origin
tccctgattggctgtgcgtccctggagcccaacttcagtcgctccagactccatctgagccctgagggagtcggagcgccgcgccacggggcgggaggggcggccacgaatccaggggttagcatctctgggcccctggggggaggggcgcggacggggtcggcccccgcagcctctgcgaggcccatctcgctgcctctcgcagcctcggcttctctcagcccccgccctttccttccctcacagcggcagcctccctcctcccgccccccccgccccgcacccgcctgcccgcccgccacctccccccggtttctcattcctgccactagcgcgctcggcggctcattccgcggccgccgccagctgaggggagcgtcgcgggccgaggagcagatgccgcgggggccgctcgcagccgccgctgacttgtgaatgggaccgggactggggccgggactgacaccgcagcgcttgccctgcgccagggactggcggctcggaggttgcgtccaccctcaagggccccaggtgaggtgcgccgccagtcccttcctctcgcctggttggggcttcttggaatggggggcaggattttctcaggaagagaatgtcttggcggggcggggtggtgagggggacggtggtatctgagtcgagaaggcttcactaacgcaaagcaaaagggagggagagatttgtttaaaaatcagaaagggagaagggagccagctgtgggcgcgggcaaagcaggggacggaggcttcagatgtgcgctccacgactctccctggctccggcctcctgtggggtctgcgccgaggccacagcagagggggtttgtacctggctggggcaagagactgcagagcagacctccggacacgccgactgtccccggtcatatctctggggaaagtcgcccacggcgcggtgcccgccagccctgcgccgcttccccaaagcggcgacatgaccgcgctctgcggggttcttactccatcctcccggatccctgccgaaagctccccggggcttagtccctgcagtcgagactgccgggtaagcccgggaaaacggaaagaccccagctccggaaggagattgcccgcactttaatagcgtgggtttggggccgccgactgtggttctggggcagcaggctgcggtgcgctacagccctccagcccgagtctctgcgggagctctggcgcccgtttgtaagctcccaccagcgcaggagtaggtccatgagcggcccagactcgggctcgcctctggcttgggattggcgaaagctgccagggtcaacgttaactttgagaaccacaccttcccgaaacctgcgccgcttctcggagcgcgccaagcctctctagctcccggcacgcacggcctccctccctgcgctctgccccggaacgcgagccgggaggtgggaagcactgagaagctggccagatggggaggacggcgaggagagctcccttctcccccctccccaacccagaggaactgtaggagggcccgcctcacgctgtgaagcggagtccccagagaaagtggggtcgggggaggcttgcgggtccggct

SEQ ID NO: 28929 - DNA, 919 bp, Artificial sequence
  DNA replication origin
ccttgagggtggacgcaacctccgagccgccagtccctggcgcagggcaagcgctgcggtgtcagtcccggccccagtcccggtcccattcacaagtcagcggcggctgcgagcggcccccgcggcatctgctcctcggcccgcgacgctcccctcagctggcggcggccgcggaatgagccgccgagcgcgctagtggcaggaatgagaaaccggggggaggtggcgggcgggcaggcgggtgcggggcggggggggcgggaggagggaggctgccgctgtgagggaaggaaagggcgggggctgagagaagccgaggctgcgagaggcagcgagatgggcctcgcagaggctgcgggggccgaccccgtccgcgcccctccccccaggggcccagagatgctaacccctggattcgtggccgcccctcccgccccgtggcgcggcgctccgactccctcagggctcagatggagtctggagcgactgaagttgggctccagggacgcacagccaatcagggagggcggcggagggaagctggagaggggttgggagcccccattttcctccttcccccaaatccgctccagctggccaggctgggctctcgcctggcgggccgggatggtggttgggggaaggtatcgtccaagtgagggaagcaattgggaattcgggagcgcgttctattctttctcactccaccaccccaccttccaaaaatccctcaacgttggcggctcctgcccagcccccacccctctcaatctcccatcccttgcaaactcttctggtggctctggtggtgaagtcgggcggggagggagacttaggacttgggaagagcccagtctccgttctctctcagctctcctctcgtctagtgccccccacgcaacgcctcggagaggggtgc

SEQ ID NO: 28930 - DNA, 916 bp, Artificial sequence
  DNA replication origin
ccacccctctcaatctcccatcccttgcaaactcttctggtggctctggtggtgaagtcgggcggggagggagacttaggacttgggaagagcccagtctccgttctctctcagctctcctctcgtctagtgccccccacgcaacgcctcggagaggggtgcgcggggagcgcttcgccggggtcggcctcgctccagcttttgggagggtgccttggcccctaccccagccaggtatcagtggcccccgccggtagtgtcacttgttgccactccctcgctacagacccgccagggcccggtggagtgtgcgtttctacgggagaaagggcctaatggggcgcagcgccggagtcctagctccttcctccgctgttcccctcactgacgactcgctaccgtgagggttccccgggcctgcttcctgccctccctccccgagtcgccgggagaaagggctggcagggccggggcttaggaatcacgccaaggactgggcggggcgctcgcggtaccgggaacggcgtggggatccgcacacccagcagggaacaaccatgcctgtgtggggacccctggcttgaacaagtttgcagggtgggaggtggaggcaagagaggaggcggaggaaggtggagacgccagtgggtgaaggctaaaaaggaaccgcctagggggacggggatgaggctgggaaaggagaagagatggacccgcgaaaaagacggggaaggaggctgcggagggaaagctgggcgccacagccaagcagtttgaaagggctagaggggaggagacgggcccaggagttaacggaaaaagaggccgaaaacggaagagaaagcttgggatcctgagcgcatggggaaggaaccccagtgcggggctaaggcaagagcggccgagccctgccctc

SEQ ID NO: 28931 - DNA, 1006 bp, Artificial sequence
  DNA replication origin
aagtttgcagggtgggaggtggaggcaagagaggaggcggaggaaggtggagacgccagtgggtgaaggctaaaaaggaaccgcctagggggacggggatgaggctgggaaaggagaagagatggacccgcgaaaaagacggggaaggaggctgcggagggaaagctgggcgccacagccaagcagtttgaaagggctagaggggaggagacgggcccaggagttaacggaaaaagaggccgaaaacggaagagaaagcttgggatcctgagcgcatggggaaggaaccccagtgcggggctaaggcaagagcggccgagccctgccctccagctcctggtcaccagcccgcgggtcccgagcgcccgcagccgcccgggtttccacacggcttggggagacgcccgcgggggcgggtgccggcgaggctgccccgggacctaccctcttcggcctgcgcgcccgcgtttttcttgacgactccaggatccgggtggcgctgcgtgcctgcccccagtccgcgtcctgcgcggagaggatgcctctgtcaccctctgtgtggacgtggcctttgaactcctcattcctccactgcgggggaagagctgtaagtttccagctgcccggttatcttactcctcagccttccccccaccataggtgtccaaggtgatagccccctgggtctccagtaaccccccaacctcgcaccacactctgcgcaagggacgcgcgaggacattgactcccggtgctttcctgtagagcgccagagagcagatcgtggtgcctgccactcctgcctccccctgtgggtccctggccctgaaccttttcagagctctaccctgcttcctctgtctgcctttttggcctctgctgtaacccctaaaactttgggtacttcccaagccaccgccgaaagtccccactctaatgaggcatggtgatggtaataggatgatctggtggcgtcatttcagcttataaatgaagttacttacac

SEQ ID NO: 28932 - DNA, 930 bp, Artificial sequence
  DNA replication origin
tcccacagaataaacctgttgtaggagacaaaatgaaatcaattagagtcctcacccaaggagtgatgcaatgtaagtagagtttgaggaccatttatcttgttcagagtgaaggagaaaaggaagaaagggggagcgggagagaatagagaaaagaagggtggaaaatggtaagaagcataaactaaactcctagctctgtgaaggcaaagttgtattctgtattatccagtcttagtctgtctgttcaccagtgtccccagcacccagaatagcacctggccatagcaaaggcttaagaaatatttatgggatggcatgagatgatatggaatgggataggatggggtgtgtagggtgggatgaaatggaatggaataggatggggtgggatgagatgagatggaataggaagagatgggatggggtgagatggaatgggatgggataaaatgaaatggggtgggatgggatgggataagatgggatgagatggaatgggatgggatggggtagagtgggatggggtgggatggtatgggatgggataagatgaagtgagatgagatgggatgggatgggatggagtggatggagtgagtggggtggagtggattgagatgagatgagataagatgggatgggaggggatggaatggggtgttatggggtgcaatggaattgggtgacattagatgggatggaattaaatgggatggggtgtggtggggtgggatggagtgggatgagattgcagttaattgagggaaagcagtagatgatccttgggctgggtgtcatggtctctggtgttccatccttcctgactctgccattgaccagcctagtgaccatgaactttgagtagctttttttcccttcattttcctgtctgtttaaatgatggaattccaacttgtacacttgttt

SEQ ID NO: 28933 - DNA, 850 bp, Artificial sequence
  DNA replication origin
agaatcacttcagctggggaggcggaggttgcagtgagccgagatcacaccactgcactccagcctgggcaacaagagcgagactccgtctcaaaacaaaaagaaaaaataaagtaaacaaggtgggatcctaataaccaacatttattgagcatgtgccatgtgccaggccctgtgcagaatgtttatgtccttgaatgctcacaatgacctcaagaaatacatagtattaatatttttaatgaggaaacagaagcacagaagggttaggtaatttgctcagggtcaccagccaggaagagaaggacccaagttcaagctcaggtagtgctcccagagacatcctcttcaccactcagctagagatagatcaacctcatattgtgatattgaacagtctctaagatacatttttaaaatatattttaagtcaaaagcaaggtatagagcagcctgtctacggtgctatattttctaaaggagacatatggcctgacacgtttttctctgcacagagtatctggaaagctatgtaggaagcttgtaccaattgctgcctgcaggaagaggaactgggaggctggggtcaaggaggcagagagatgcagcacttttagaccctttccatattttatccctgcctttaaaaggatgaatgtgtagcgtccctttcagaaagaaatgattttcactccttggtcagtttcatggagacatggtgttagctggtatttccagagggtactccctgctcaggactcgggttacggggaggcccgaatttctgtgtgatctgtcaccctccagttggaaatgaccctctcattgttgacagcacactagaacaagt

SEQ ID NO: 28934 - DNA, 1033 bp, Artificial sequence
  DNA replication origin
ccttctctggtgctgagatcagagggatctcagccgggatctggctgagtgcggcaccgagttcagggcccagtgactgagaagagaaacctgaaggcctcgagctgaggagctgccacgcgggcggcaggcggtgccactttgcagaagcgcaaactgaggccagaggggcagcggatctcagctgggtccccacgctcggcaggagaccgggtgctccccgcggggcctgtgagcgggccgccagggctgggctgggggtggcagcgccgaaccgggagcgcagcgcagggtccgggttcgctgggaggccggcggcggccgcgtggccacagcgccccctggcggctacgggagtcctgcacgcagcggccgcgtctccacgccttcctggagcagaaggttgcctgcccgctgcgtggcccccgggttcccagacagcccgccccgtccctagcgctccgaaatggctgccacctggcgtctggcctgggcaaacgaggtatcccatctgtatgtatttaaaagcggacagcagggtgcccgctgctgtcaccccaccgcctaaagaggatagacacttatcttcccctaaatgtgtaattagcaattccagtgtgacccctctcctcatcggactttagttcaaactcaggcagcggaagccatgtcctttttctgtgtgaaatttaggattccaaaaggacagcccctgccgtctgcactgcccaccctagtaacagctcacaccttcccatcctggcttccctggatctaagcacttctcaggcgttagtcctcacctcagaccgattattatcccctcctgggcgaggtaactgagacacagagagagattaaggaactcacccaaaaccacacaggtagaggggaagctaggattttaacccaggcagccttgattgcaaaagagaaaaggggagaaaaggaatgagagggggcagaaagagaaaatttacttctaagacaaggcagtgctggagcgcgtctgcctccattttgtgtgaggggt

SEQ ID NO: 28935 - DNA, 1923 bp, Artificial sequence
  DNA replication origin
tatcttaaatgcgcttgtttactcatgttgtcctaaaaccgacctttcatccgagtgcatgactgctccctgaaagggggaacaataatgttaattacccgcagattgtgtttgccccaggcttttggcattatatctagctgctcttatgtgaaatacctgtgtctaagtactcctttcatcgtcactggccagagtctgaatgtgtctcctctttccccagatctgttcctcctgggaagatgcagaggctcatgatgctcctcgccacatcgggcgcctgcctgggcctgctggcagtggcagcagtggcagcagcaggtgctaaccctgcccaacgggacacccacagcctgctgcccacccaccggcgccaaaagagagattggatttggaaccagatgcacattgatgaagagaaaaacacctcacttccccatcatgtaggcaaggtaaggctcaagccccaggacaggagaagccatcagcagctggcccatagtgacaagtggtggtggtgatggcgatggtggcaaaggtggtaatagatattgtggtggttgtaggagtggagatgataagggtgaaggtggtagcaatagtggtagaggtcgtggtggtagaagtagtggtggtaatggtagcaatggtggtggtagtgatagtgatggtggtgaggatgggaaaggccaaggtggtggtgggagtggtgagaatggtggtgatggtagtgatgataaaggggtaggtggtggttgtgatggtggtgatggtggtggtggctgtgatggtggtgatcacggtgatggtggtgatgataaaggggtaggtgttggtggtgatcacggtgatggtggtgatgataaaggggtaggtgttggtggtgatcacggtgatggtggtgatgataaaggggtaggtggtggtggtgatcatggtgatggtggtgatgataaaggggtaggtgttggtggtgatcacggtgatggtggtgatgataaaggggtaggtggtggtggtgatcatggtgatggtggtgatgataaaggggtaggtgttggtggtgatcacggtgatggtggtgatgataaaggggtaggtggtggtggtgatcatggtgatggtggtgatgataaaggggtaggtggtggtggtgatcacggtgatggtggtgatgataaaggggtaggtggtgattgtgataatggtgatgacagtgatgataaaggggtaggtggtgattgtgatggtgggtgatggtggtgatgataaaggggtaggcggtggtctgacgatggtgatgatggtggtgctgataaagggtaggtggtcgttgtgatgatggtgatgatggtgatgataaagggatgggtagtggttgtgatggtggtgatcacgatgatggcggtgatgataaaggggtaggtggtggcagtgatggtggtgatcatggtgatggtggtcatgataaaggggtaggtggtggttgtaatggtgatgatgatggtggtgatgaaagataaatgatgatgatggtgatgaaagataaatgttgatggtggtgatgatggaagtgatgatgatagtgatggtgatggtggtgaggttggggaaggacaaggtggtggtggtggtggtagtgatggtaaaggggaaggtggtggttgtgatagtggttgtgatggtggtgatgatggtggtggtaatggtgaaggataagtgttgatggagatggtggtagtgatgatggtagtgatgaaagataagtgttgatagtggtgataatggaggtgatgatgatggtggtggaggtggtggtgaactctatggttcaatttctcccagaccttggtctgtaaactagatatcactaacagaagggccatccagtgcccaagctgatgaggctcacctggcctgggg

SEQ ID NO: 28936 - DNA, 1325 bp, Artificial sequence
  DNA replication origin
gtatgcgggggagcggcagggacggggtgtggggtgtagggggatggcggggatgggggtatgggggaacggcggggatggggttgcaggggaaggggggccaaaaggatggggttgcaggggaagggggggccaaagggatgggcatgctgggagggcgtgggggtggggttgcagggggcagtggggatgggggcatggggggccgcccaggcccccagccttgtctgactctgctgctcggctccctggctgcagtgatcaccctgctcatcttcctgcggcggcggctccggaagcaggcccgcgcgcacggcaagagcgtgccggagatccacgagcagctggtcacctacgacgaggagggcggcggcgagatggacaccaccagctacgatgtgtcggtgctcaactcggtgcgccgcggcggggccaagcccccgcggcccgcgctggacgcccggccttccctctatgcgcaggtgcagaagccaccgaggcacgcgcctggggcacacggagggcccggggagatggcagccatgatcgaggtgaagaaggacgaggcggaccacgacggcgacggccccccctacgacacgctgcacatctacggctacgagggctccgagtccatagccgagtccctcagctccctgggcaccgactcatccgactctgacgtggattacgacttccttaacgactggggacccaggtttaagatgctggctgagctgtacggctcggacccccgggaggagctgctgtattaggcggccgaggtcactctgggcctggggacccaaaccccctgcagcccaggccagtcagacgccaggcaccacagcctccaaaaatggcagtgactccccagcccagcaccccttcctcgtgggtcccagagacctcatcagccttgggatagcaaactccaggttcctgaaatatccaggaatatatgtcagtgatgactattctcaaatgctggcaaatccaggctggtgttctgtctgggctcagacatccacataaccctgtcacccacagaccgccgtctaactcaaagacttcctctggctccccaaggctgcaaagcaaaacagactgtgtttaactgctgcagggtctttttctagggtccctgaacgccctggtaaggctggtgaggtcctggtgcctatctgcctggaggcaaaggcctggacagcttgacttgtggggcaggattctctgcagcccattcccaagggagactgaccatcatgccctctctcgggagccctagccctgctccaactccatactccactccaagtgcccca

SEQ ID NO: 28937 - DNA, 1693 bp, Artificial sequence
  DNA replication origin
ctccgtgcgccgcagtgccggctccagcttcggctccagctccggttcccgccccggctccggctcccagtccggttcccgctcggaggccactgcgctcgggctcgggcgtcgcggggggcgcgccgctacgcttcggcctgctgggcgcgcaggggcggggcggggcgggccaggcggggccaggcgagccgggccgaccagccgcccgcgatcccgggccgaggcagcggcggcggcggcttcccaggccccggccctggccctggccctgccctgccgcagccccgcccggccgcccgtcgtccccgcgccgccgcccacgccaccgtcaccggccccggcccccctcggcggcggcgcggctcccgggcctcagcaccgcggcgccgcggcccgggtcactccgagatgcggggcggggggcgcgggtgcgggggagggccgagccgcgcccctttgcgcacagccagcccgacacccacacagcagcaggcggggcagggcggcgaggaggccgggaaatgcgggaggccgacgctccagtcagacgtgtgaagaggacacacaggcgtgtgtagggaatgacacacggacgcgagcggggagccactgacacgtgcagagaagggtagacaaacgaggtgtcagggaaggacagccagacaggttggaccgaggctaggctgggcatttgagcaggggacccctgtcgcgggcaaagagcaaagtgcgggatggagagggggacccagcgtggctgggccgctggcaggggcaggcgagcctggcagggcttcccgctcgcggttgctggcaggtgagttttgggattccagctaggcctggcccaaaccttccttcggagccaccagcaggcctgtttccttcaccccgtcaccctccctgtgcccccgttccccgctgcccaaacgtcagggcatagggctcagccctggcaggtggaagccggccccgaggggatgcctggctcaggccggggttccaggcttccaggacctgctctgtccccaccctgctttggggccttggacgaatcccagcccatctctcaggcctccctgtcctcattaggatattgctcccaatgattgcacccctactgtgttggggtgctcgccagcgtggaggagttatttatttaacctccgccacttgcctgggagcgccaggagggcagcgtctgggtagggctgcaggggtctgcacagagtgggcactcagtgaatttgctgcaggaattgatgaaatgtgttgttgctaacactctctgaaccactactgttgatgaggaaactggggcttaggaggcaaggggagtcaaaagctgggttcgtttcaaaacccaaaggcttgtcactggcgggaaagtggttctcaaaaataaagcatggtgacaaagggctgaacatgttgatgctaaaccttggggaagcagtgaagccatggggatgttgtggaagggaaagttggccagggactggccttgcagggaggatggggcagagcaggctccggtggagaaaacaaaccccagccctgccagtcatcacgtcttgggcttccctggggccaggcaggggaagctgcgtggtctagggcttgggtgcttgaggacatctcccagcctcctctggtaactgttcattctgggctctgctccctgcactat

SEQ ID NO: 28938 - DNA, 886 bp, Artificial sequence
  DNA replication origin
ccgccgctgcctcggcccgggatcgcgggcggctggtcggcccggctcgcctggccccgcctggcccgccccgccccgcccctgcgcgcccagcaggccgaagcgtagcggcgcgccccccgcgacgcccgagcccgagcgcagtggcctccgagcgggaaccggactgggagccggagccggggcgggaaccggagctggagccgaagctggagccggcactgcggcgcacggagcggagcgctgcagccaagccgagtaaggggcgtggggctgggcggcgcgggggaggggcgggcggggggtcccggccccattcccccgcgctctgcggtggtaccggcgaacgacacacccgggggcgcgccgcgcggagcctcggtgcgcggggcgggcggatgcgcggtccggaacggaaccgcagcgcgctcggaacggagcgggatcccgggtctcccgcggaccctcgaccccgggctggccactgggatctgcgcgagccgaggctgaccctgatcgcgccctcgggcctcggggaaggggaggtatccaggttttctgcctgactcgagtccccgacgagcatcaaccgcatttggggaacccaagacagcctccccagcagcttgccctcggtttcggggacccctgaacaacccaaccaagaagggaaaactagggcgcactctcggtcggggtgggagaggaaaggggctggggcttcacggagtttggagtttgaacccacccgcacccctttgagctaggaagtttgacccttcgacgagcaggtcgcctggggtatgcccctgtctccgtgcctctgtctcagcaccgagcgtcggagagagagcgcgccctccgcaccttctcccactttgggaca

SEQ ID NO: 28939 - DNA, 1282 bp, Artificial sequence
  DNA replication origin
tcaaccgcatttggggaacccaagacagcctccccagcagcttgccctcggtttcggggacccctgaacaacccaaccaagaagggaaaactagggcgcactctcggtcggggtgggagaggaaaggggctggggcttcacggagtttggagtttgaacccacccgcacccctttgagctaggaagtttgacccttcgacgagcaggtcgcctggggtatgcccctgtctccgtgcctctgtctcagcaccgagcgtcggagagagagcgcgccctccgcaccttctcccactttgggacagactttcccttgcgctgtcagagggacccgaggctgagtacgaggcgaggcggcaggcagctcaggctggctgcgcagcgctgagtggcaccgccgccgctccccaggggcagggcccaccccacacccggctgactctcgctgcccttcctccttccctatcgggctctgcggtctggaggctggagagcggtgaggaccagggactgccctgtccatctcgggcgggtgccggcgtgggtggcggggcgcaggctgggaaagggagggcgcaagtaactggtgtgagaggcaggggttcagggatccttgctcttgagccacgatttccgatgagcccctgccgagagcatgccgctctggactcactcctcaaacataactgctctgctggaacgagagacttcaccaccctgtgcctcagtttcctcatctgaaagtaagcaggagtctgttgtgagcgggatgtttaagggatttggaaccagaaggtgggcttggctgacttcctggctgtacaaccttaagcaagacacaaacctctctgagccttagtttccccatctggaacatggggaaggtgagttgggaggattaaatgagatgatgctggtgagggtatgtagcctggtgcctggcacgcagccagtggccaattgtggtgggctacaggtgtcctgaggtgtccagcaccagtagatgctgagattcagtgcctctgaatctgaagtggtgctcccagccccctccaaggaggcctttgaattccccaagctgttgacatttaattgcaaagcaaaactttctccttagggcccaccctttctcagacgctccctcctccaaggctctctaccgcccagcccagttctcccctgctacctcccatctctctccagggtgaaaaggctgcatctgactgtaaggtgcacccttttcctccttgcccttagctgatgtccgctgccccagagaggggca

SEQ ID NO: 28940 - DNA, 1169 bp, Artificial sequence
  DNA replication origin
tccgtgggcctgagcccagaccctcctccatttatttagggagcaacagctcacagggcagcacgggcagagaaggaaggggtgtggcaggcctgggctccagctcagtgtcctctctctctgtccacagtagcacgatacaaccgcaccagctacttctaccccacattctcagagagctcggagcacagccatctgctcgtgtcccccgtgctggtggcgagtgccgtcataggtgtggtcatcatcctctcctgcatcaccatcattgtgggcagcatccgcagggacaggcaggcccggcttcagcggcaccgccaccgccaccaccgccaccaccaccaccatcatcaccaccgccggcgtcgacaccgagagtacgagcacggctacggtgagccgccgcccaccctggggccctgggacctcatctgactgggattgcaacacaggaggcatcaaggagttggcaactctgccctgggtggagcagggtggtcgggaaagcatcctagaagtcttgggtggtcaggaagagctcacaggcgcccaccataatgttctcggtgacatgagaggcccggatgactgctaagagagaaactcagagtgaggctgaaggtcagagggagagtgtgtcactcctcccctgccactgttggtccaggctgcaccaagggctggtccatctggtgtctcgatggatggatggatggatggatggatggatggatggatggatggatggttgggtggagagatgagtggatgaatgaagagaggaatggatgggtgagaagggagaaggactcgtaggaaaatggatgggtgaggagtgaggtgatggatagatggaggttgagtggaagagtcagtggatgggtggagagatggatgggtggagagtatgaatggataaatgggtagatgaaaggatggatgaatgagaaaatggagggatggatagatgggtggattgagtgttatgcctgagtggagagatggaagggagggttgagtggaggaatggaaagataaataggtgggcagtgggatgggttgatgggggtgaatatatgaataagtgaatgggtgaatttatggaatgaatgatgagtgaataaaactatccctggtgagagtcagcagagtgcaaatagaactgatct

SEQ ID NO: 28941 - DNA, 1170 bp, Artificial sequence
  DNA replication origin
tgccagccaccagcctggcacctccaaggcattctccacaaggcaaccaaagtgacaggactgtgaccacttcccaatggctccccatcaccctcaggacagagttggccctctgcctgcccacagagcctttctgtagtctagccagacacagagaggagccacaaatctttgagaatgagatgggggtgggggaggaagaagaaagagggagggagagagggagggagagagggagggagagagggagggagggagggagggagagagggagggaggaagggagggagggagggagggagggagggaggggaaatagagaagagagaaagaaagaagaaagagaagagaagaaagaagagagagaaaaaaaggagagaaagaaaaaggaaaaagaaaggaaagagaaagaaagaaagaaagaagaaagaaaggagagagaaggaaagaaaagaaaattctgtcattctgttccatcttgagctttaagagagatctggtggctgactctgtctcctgtcacttctgcaggtttagagcaagtgacttcactctcggtctcttcatctggtggaaggggtaaccactgctctcctcccacagtggggtgtgaggtagatgagatcatagagattgagcacagcaggtgctcatgagtgccagttcctcttcctccctctcccagagcctgtcaaggggcagtgaacttggagtgatgttaaataatgaaccaaggtatcggggtaaacaggaggtttcagcttatgtgaagtgggaagcagggcttccggagtcctggactatttggatctgtgccgacagggaagtcaggagagaagggaaaagaagggatttgggaagttcaaatgggagtggcgggtgcaggtttctttccagctgtctctcaggagctctgcccagctggatgtctcaggtttggggtctgagcaccttagggcagcctcagttttcccaagatgctcccctctgggaagtccaagaaaaagcagcccaagaagaaagggtagatagcagtttgctccagctctaacagccctcagcgctgcccacccagtcactcctctcaggtccaggaagcagccctgactttccccagggatccctgtgtgacaggcacacctgctgccctgcaggtggaaccctccctga

SEQ ID NO: 28942 - DNA, 1179 bp, Artificial sequence
  DNA replication origin
ttggctcatgcttggtgcgctgcacccactgtcctgcacccactttccaacactccccagtgagatgaacccggtacctcagttggaaatgcagaaatcacccgtcttctgcgtcgctcatgctgggagctgtagactggagctgttcctattcggccatcttggctccacctcctaattttttttttttaatagagacaaggtcttactatgttgtccaggctggtctcaaactcctgggctcaagtgatcctcccatcttggcctcccaaagtgctgggattataggtatgagccaccgcatctggcctcacttgtttttgatgttcctgatggaggcttgtggctggggtgtggctccctcactttcccgataatgctccacaccctgacagctctccagcttggctgtgggctgccagatgctgtgctaagtgattaggatgggtggatggatggatggttggatggatgaatggctggatggatagaaggaaggaagggaggaaggtgggaggtggggatggatggatggaaggatggatggatggatggatggttggatggagggaaggaaggaaagaaggacggaaggatcaagggcaggagggaggtgggaggcagggatggatggatggttggatggagggaaggaaggaaagaaggaaggaaggaaggaaggatcaagggcaggagggaggtgggaggcagggatggatggacggttggatggagggaaggaaggaaagaaggaaggaaggatccagggtgggagggaggtgggaggcagggatggatggatggttggatggagggaaggaaggaaggaaggatcaagggaaggagggagggtgggaggcagggagggatggatggttggatggatgagtgggtgataaccagcgtgccctgtgctgcccagtgcatactgcttcctgatttgtgtctcagaaagcctgtgtaggggctgttttaggactgctgtctgacttggatgcaggtggagccaaagcttttaaaatccttccagcctgaggcccccccttggtcttaaggactgaaagtggtgtggttatatgctcagtttcagggagagcaaaggcaggtaccaacaattattaaacacctgctttgcaccctgaagggaccttcacctatttaatttttcccatttcacag

SEQ ID NO: 28943 - DNA, 1109 bp, Artificial sequence
  DNA replication origin
attaggagaaggatatgccagcgggtgccatagaaggggagggaaatgcaaagttgagctggatggtaattaatgtatttttgtttgtttatacatttaagagacggcgtcttgctgtgttgcccaggctggcctccaactcctgggctcaagtgatcctctggcatcagcctcctgagtagctgtgatgacaagtgtgagccactgtgcctggctatttattagttattgagctagcattgatgtgagctgggcctgttctttgtgctttttgggtgtggtttgatgtgcccccagacacacaatagctagttcatagaaagtggtatggagcctgcattcaggctcaggactgtttgtaaacattcaagtcctgtgagctcctgtgtgggatgcactgggctaggacctgggcacctggcaaacagccctgacatttgggagtctgcggtctgtctgatgggggaggtttgtctgatgggggaggtctgtctgatgggggagacagcagtaactaggagaatggtggaactagaacagcagtgagtatggtggctgtgagtaggggggctgatgactgagaggagctttgggaagccttattgcctgctgggagatggagcagagtttgaggcaggagtgttggaacaggtacaagtcacagaagaatgagaacctgcaggcctgggcttgtggccagtccctagagaggtggctggggagggctgggggataggtgcagagggactgagaataggtcctaaaacccagagtcactgaagggcctcacccccacccagcacgatccgggttgcctctcagggagcgatgtggggaaccatgagtggagggcctaactgggtgagactggaaggggagagaccttaactaaactagagatggcacagagcccgcagctgagtgggaaagcagggcccaggggagttgctggttggttgactggtgttggtgggtgaggagagatgtccagagtgttaaaggtgtctgggtggatggtgcagccattacatggcacagtttacaatattagataattgagtatcacaacaaagttttttaataaaataactggacagaacttaacatcc

SEQ ID NO: 28944 - DNA, 977 bp, Artificial sequence
  DNA replication origin
gttcagagcgtgtccgtcctgctctttaaaggccctctctccatcccagaaccaaagccgagcgcccccagcgctcgctgcggtctcgcgcccgggtaacggccgatggccgcccccgtcccagccgcagccggggaggaaatcccgcgcctcggaagaggcgcttcgggctcgggcgggttccggaagccgaggggccgggagtaggtgggcgcataggggctcctgggaggcgggaccaagacgcgcgttaccgggaggccaggcccggcgctgcaccctccgcggcccggggcctgaggccgggctcccgcgacttcccggcccaaagcagcgcagcgcccgggcggcccagccccgcagcggccacagcagcatagccgggcgagcggatccagaggcccggggttccttcttgtgcgagtcggcgcggacgactgctagtccagccgttgggcgccgcctggatcccggcgcctggcccttaaagagacccggtcgcatttcatctcagcaagaggagaaatactcgaagggagaggttcgccgctggcagccagaagccttaccactgctaggacgctggcagaacgcacccataacttggcaacactcggaggatggatggcaaataataccagcgactgaagggttaattaatgattgcagattaattgaacaccttctgtaatcagacacctggcacacactcatgatgtcacttattcctcccaacaaccctgcaaatagataactgtctctcccattctccgagcttgtcctcagagaattaggtaacttgttcaaaatggtcagaagcaacagatataactccttgctctactctttccccccttctcactactgcacttgactagtctttttaaaacataaattttttggccaggcacggtggctcacgcctgtaatcccagcactttgggaggccaaggaaggcagatcacctgaggccagaa

SEQ ID NO: 28945 - DNA, 1277 bp, Artificial sequence
  DNA replication origin
agctttcccccgccaaggacgcctaccccgaaaccggccccgacgccccgcagaggcccgcctgaagccagcccggcgccctagcagatgcacgtgtctgtcgaatcgctgcctccgagcccacccccgagctcgcatgctgtcacccattccagcctaaatgtgaccataaaattagggctgctgcttttatcgagaacacctgcttcctctcgttgccttgtgtgaaagtcgcgttgtattttcctgcgcttggcgctgcgcccgcggagctcagggccgtgacccggtgctcgcagccccccgaccccgcagcggagcggcggcttacagacctggggccacctggagacgccgggatgggaccgcgagggcagctccgcgcggaggtgggaccggcgggttgggaacggagttggggcccgtcgggggccggcgcgtggagggtgggaggatccggccgctgccgggcggatgggagctgcgcgaggagacgggcgcgcgtggagagggcgcgggagttggcattcggtggtcctggcagttagctgagcacgccctctgagccgctcggtggacaccaggcactctagtaggcctggcctacccagaaacagcaggagagagaagaaacaggccagctgtgagaagccaaggacaccgagtcagtcatggcacctaaggcggcaaagggggccaagccagagccagcaccagctccacctccacccggggccaaacccgaggaagacaagaaggacggtaaggagccatcggacaaacctcaaaaggcggtgcaggaccataaggagccatcggacaaacctcaaaaggcggtgcagcccaagcacgaagtgggcacgaggagggggtgtcgccgctaccggtgggaattaaaagacagcaataaagagttctggctcttggggcacgctgagatcaagattcggagtttggtgagctaaactggtatccctgggtggggggccttggccgagggtggggggaaggaggagtaggctccaggggtcctcagagagatggtgaaaggcccttgctgctggctcaggtgtctatgtctcactgcagggctgcctaatagctgcaatgatactgttgtcctcactcaccgtgcaccccatcttgaggcttatcatcaccatggagatatccttcttcagcttcttcatcttactgtacagctttgccattcatagatacatacccttcatcctgtggcccatttctgtaagtaaggggtgatggggagtgcctgc

SEQ ID NO: 28946 - DNA, 1387 bp, Artificial sequence
  DNA replication origin
gctgttttgtagtcacagagtgctctggtgagaaatggtagaggaacagtgtgcttctttgtgtccttatgtggttggacgcagtctttatttatttttttttttattttttgagacagagtcttgctctgtcgcccaggctggggtgcagtggtgtgattttggctcactgcaacctatgcctcccgggttcaagcgattcttgtgcctcagcctcctgagtagctgagattataggcacggtgccaccacgcccagctaatttttgtatttttagtagacacggggtttcactatattggccaggctggtctcgaactcctgacctcgtgatccacccacctcagcctcccaacgtgctgggattacaggcatgagccacagcgcctgaccttctattttttattaaacaaaacatcttgcccttgttggcaaagcaccctatgaaatataaaatgaagtctttttctaagatggagttagttatgtcaagggtgcgcagtactgtgccataagctctcccccggctgcccagagagaaaacctaagggcctcttaaagacaccatcacagcagttcagcggggagcaggcaggaatggtttcggatctagtggtggtgagaagtagacagagatcagagaaagttataggaggtgaaagtgggaggaccttggttacagactgccggtgaagagggacaaggacaacccgcaggtctccgctagtcaggtggaaggaaaggagggggcagtgcccttcgcagaggcacaggaagctgggtcttgatcacgctgaactccagacgctctctagatgtgcacgcatgtgcgtgtggagtgtgtgtgtgtgtgtgtgtgagagagagagatgtgttggggtggggggactgcaggtcaggaagtcctgcagatgtgcgtgcctgtgtgtgtttgcgcgcgcgcgcgcgtgtgtgtgtgtctgtgtgtgtgcctggagctgcgcttgcaggtctgagagtcctctgagaatgggttgggggaggcgggtgcaggaccgaggcctggaacagccaacaaagaggccctggaggagggtggggctggccggggacaggaggggtggccaagaaagtcgcaagaaaactccggcccccaagaaaaagagagggcatgggttgcggagccgacatcacggccggggtctttgctgtttagacgcctgggttcccggatcccagacacgcgcacgggcaggaagttagaccggagacagcgagtatagacagcccttctggataggggcagacgggtgggagctccgaaggggtgccggggcggtgatcgggaggtctccagcggcccgaaccagggtgaagaagaaggtggagtctgcggaggccccaggcc

SEQ ID NO: 28947 - DNA, 1274 bp, Artificial sequence
  DNA replication origin
cgggcgcctggcgaagttgggtcgaggtccccaaactttggacggcggggcggggcccgagcccaggccatccgcggcgctgtccccgcgagtccagagctgggggccgtgggaagtgggtggggcccggggatgtgggtcctgctgtgtgagccaggcgcccccgccctctctgggccccggggactcgggcaactcggacctccgggactcccgggccgcagcggggtccgctttcctgcgagcgggtagtgcgggccggggcctcgacctgcggggccgagccggcggggggccgtgcggagcgggagggatcccccacccccgggactgggtgaggcggccccgcggtgacttcatcgccctcctcccctccgcggccgggctccttcctactccgccctcgcccccaccccggccggtggggcttctttgtcctctggacaccggaggcgcccgcactgtccgctgtggggtaggggtggcgctgggccgttggggatggggagggagaggccgggccggagaccgggggaggcgggaggagagagcggcgcacggcggcggccacttgttgcttagatcccaggaacttggcgcttcctgcccttgtccccactttacagatgagagcgctcaggcgcctgatttgacaggtggctcaactgaggggcccagtgagagcggccaggagggtgggggcaggaggaagggggattctgctccgggacctctccctggtcactcagggcagagggcagaaggtggtcctgcagcctctcccacggtcagcccagaggccacctgcccaacgcccaagtgagacaccaatgccacactccgagcccacactcccagccccaccctggagaccactgggagccacttgaggggagaagcctcgaatccaccgtccccagagtggcttgaacccccccatccccacccaagaccacctcataagagggaggcatatgtccagcaggagcatagaggccaccctgggcccagcagatgtcaggaatccaggtcagggaggataaggaagggtgaacggtcagcactcagggttcacaggagccgctgagggcactcctgcctccctagtcccctcactcccacccccaggccaagcaagtgcagaggctgagatggacagaaacagagagaggaagtggccccagaaatcgcgggatgaaaaaacaggaattgagaggggaatccccagaattaggctttggggtgcaggcataggagacaggaaggggagggcc

SEQ ID NO: 28948 - DNA, 1176 bp, Artificial sequence
  DNA replication origin
agcaaccatccgatttctcagtcttttccccacctttcccccttttctattccacaacactgccattgtcatcatggcccgttctcaatgagctgttgggtacacctccctgacggggtggtggccgggcagaggggctcctcacttcccagtaggggcggccgggcagaggcgcccctcacctcccggacggggcggctggccgggcgggggctgaccccccacctccctcccggaccgggcggctggccgggcggggggctgaccccccacctccctcctggacggggcggctggccgggcggggggctgaccccccacctccctcccggacagggcggctggccgggcgggggctgacccccacctccctcccggacggggtggctgccgggcagagacgctcctcacttcccagatggggtggctgctgggtggaggggctcctcacttctcagatggggtggccgccgggcggaggggctcctcacttctcagatggggcggccgccgggcggagggtctcctcacttctcagacggggcagctgggcagagacgctcctcacctcccagatggggtcgcggccaggcagaggcgctcctcacatcccagacggggcggcggggcagaggcgctccccacatctcagacgatgggcggccgggcagagacgctcctcacttcctagatgggatggcggccgggcagagatgctcctcactttccagactgggcagccaggcagaggggctcctcacatcccagacgatgggcggccgggcagaggctgcaatctcagcactttgggaggccaaggctggcggctgggaggtggaggttgtagcgagccgagatcacgccactgcactccagcctgggcaccattgagcactgagtgaacgagactccgtctgcaatcccggcacctcgggaggccgaggctggcggatcactcgcggttaggagctggagaccagcccggccaacacagcaaaaccccgtctccaccaaaaaatacgaaaaccagtcaggcgtggcggcgcgcgcctgcaatcccaggcactcggcaggctgaggcaggagaatcaggcagggaggttgcattgagcccagatggcagcagtacagtccagcttcggctcggcatcagagggagaccgtggaaagagaggg

SEQ ID NO: 28949 - DNA, 962 bp, Artificial sequence
  DNA replication origin
gggatgtgaggagcgcctctgcctggccgcgaccccatctgggaggtgaggagcgtctctgcccagctgccccgtctgagaagtgaggagaccctccgcccggcggccgccccatctgagaagtgaggagcccctccgcccggcggccaccccatctgagaagtgaggagcccctccacccagcagccaccccatctgggaagtgaggagcgtctctgcccggcagccaccccgtccgggagggaggtgggggtcagcccccgcccggccagccgccctgtccgggagggaggtggggggtcagccccccgcccggccagccgccccgtccaggagggaggtggggggtcagccccccgcccggccagccgcccggtccgggagggaggtggggggtcagcccccgcccggccagccgccccgtccgggaggtgaggggcgcctctgcccggccgcccctactgggaagtgaggagcccctctgcccggccaccaccccgtcagggaggtgtacccaacagctcattgagaacgggccatgatgacaatggcagtgttgtggaatagaaaagggggaaaggtggggaaaagactgagaaatcggatggttgctgtgtctgtgtagaaagaagtagacttgggagacttttcattttgttctgtactaagaaaaattcttctgccttgggatcctgttgatctatgaccttacccccaaccctgtgctctctgaaacatgtgctgtgtccactcagggttaaatggattaagggcggtgcaagatgtgctttgttaaacagatgcttgaaggcaacatgctccttaagagtcatcaccactccctaatctcaagtacccagggacacaaacactgcggaaggccacagggtcctctgcgtaggaaaaccagagacctttgttcacttgtgtatctgctgaccttccctccactattgtcctat

SEQ ID NO: 28950 - DNA, 1364 bp, Artificial sequence
  DNA replication origin
cgggagccagccgcgcgaggcggcccgggccgggcggcagcatgcggagcggcgaggagctggacggcttcgagggcgaggcctcgagcacctccatgatctcgggcgccagcagcccgtaccagcccaccaccgagccggtgagccagcgccgcgggctggccggcctgcgctgcgaccccgactacctgcgcggcgcgctcggccgcctcaaggtcgcccaagtggtaggtgccgggcggggccccaggtgcccgagggcggcctagccgcacgcctccctccccgccccgctgcggggcctccgccgcgtacccgcttgcccaggccggagcccgctcctcgcgccccctctccctcgtggggtcccgggaccactctgcagccttctctggggaccccgccttcggccagagcctgcccttcccaggccggcagcctcaggtgtgcgcctcctacctgagcacctgccttcgggcctacctgtccgctccgccctcgctcccgggagtctgtggcgttactgggctgggtgctgctgggaatcctgctgtctcctgggtacagctggtcttagcaacctgtggcaggttttcccggcccgcgcaacctccggacggtgcctgtttctgcctgcggagacgagggactgtggtttggttcccacttgatgtctagctgggtgccaggcgtatatggtaggcgcttagtaagtatttgctggatggaggcaggtagccctgatgcagtggaggagcccagatatgcccacaattctctacactgcagaggtttgtgtccttctaaccaagaagacagacttggcatcccggaatccaccgcccagcacggtggctggcactgcccaattggtacccagagttaaatctgggagggcagccagttttggaggtagcagaaacagagaactttctgttggacttgtctgtagtagagctcatttctcagggtcctgtgttttagcttccagggtgttctgggcaggggcctctcagctctgttcctgctttgtggttttgtaacatgcctctgcgggcaattgcttagctctgttgtgggcatgctctaattcagaaaaacccgtgtgtccccccaacattctctgtcacaggtaggccttctgaggccaccggcctcaaaactttatagacttctcatagccagagaagccacttgttcttgttctctctctctctcttttttgagaccgggtctctgtcgcccagggtggagtgcactggtgcgatcgtggctcactgcaggttcgacctcccaggctcaagcgatcttctcacctcagcttcccgagtagctgggactacaagcacgttccaccatgccgg

SEQ ID NO: 28951 - DNA, 1204 bp, Artificial sequence
  DNA replication origin
tcgaggcctcgccctcgaagccgtccagctcctcgccgctccgcatgctgccgcccggcccgggccgcctcgcgcggctggctcccggcgccaggagcgggcggactcagcggggccgccgcatcgccgccgccgccgccgccgccgccgcccgactgactgcccgcggcccgcccgccgccgccgcctctcgcccgccgcccggctgcggctgcggctcggtccgctcgggctcggctcccgccgcctcggcagcggaaagggagggaggtgggagccaggagagggaaggaggcgggagcgggcgcgccgggccgggagaggcggagccaggccgcagccggccgctcggaggcgctccgcggctcgagcgaggtggaggcggcggcgccgcgggcctcggggaggggcggggcgaggcggggcgccggctcctcaggccccgccctggccccgcccccacctgcgcctagagccggggcgggagccgctggtgggcgctggcgatcccggcacgcggggcgatggggttcaggcagcggggtcttggggctgaggaaagggtcgaggtggacctggaggccatggagttgctttcccagacgctgcctcaggttctcctttgaagaaagtggggtcctcgacgcatagggtggggagcttctcggtaaagacagagacgggctgcgccacccgggtgccgggaacggtgcgtggccagggtgggcttgactcagactattgggccgacgagaggtgggtaagtgcctgtgttctcacgctgggcgcctggaacaaaccggttccgaggccaggggcgggcggggcagggtgaggagccgccccactgcaggttgtccccgccggcctgacccaggcgactgacatgttcctctcctctcagctgaaaagctttgctagctctgtctacgcataaagtaaggttaaacacagattttgccccgaagggcattaattagggaccaatttacaattcaagtgtgaaggctaattttaagctaagtaaaacactgactaagaagtgtcgctttgatattgaacccttccacaaccacaaataccgagagcttgccatgttctaggcactgagcaaggcgcttgaagaacgtatcgttgttatttctattttacagaagaagagactaaggctgcagactggaagtagcttgtccaaggtcacaca

SEQ ID NO: 28952 - DNA, 819 bp, Artificial sequence
  DNA replication origin
gagagtggtcaagcctccagcgcctgagggtgggatgctgccctctttggagagcgtagtggtgctttggggttgtcggcatattgtttcagtcacttggccctctatgccttcattgcctcgacggttaccaaattgaggtcgtggagaggggaagctagtagatgagattaggtggagaaggtgggagaacgaggtgacctgggctcggagctgtggggaaatgaccacgggagccttctttgagcctcatcagtagtgcatagtccgaggttttagggactttgcagaggacagagagtcagcactggggacgtttcctccattatgctagccctcactgctaggttacctgagtcaggtcccttactccctctggcctcactctcctcaagtgagggagtttgggtacattcacacagcaagtccatttgttgcttgggacctgtgggctgggcacaggctcagcataggcgactcttaaacactatagaagaatctcagtctggtggaagacagatgtattggtgattgcattgcaccatgccgattattgtggaagcattacactgcttagagctggtgaaggaggatgattcgggggttgagtattttgcagaaaagtgtcagtatgcagggacacagatgacaagagggtgtggggtttggaaactgctagaagcgccttgtggttggtggctgctaaggtaagttgggggcagattgtgggaaggctgaagagttagtgctgtttcctgaagttctctgatttttcaaatggcttttatctcacctccatcccccaattcccatgggaat

SEQ ID NO: 28953 - DNA, 918 bp, Artificial sequence
  DNA replication origin
cccgggtcctcgcgggtcctcggcgggcccgggggagggccctctttgtggctgcagttggcaagatggcgccggtgggggtggagaagaagctgctgctaggtcccaacgggcccgcggtggcggccgccggcgacctgaccagtgaggaggaggaaggccagagcctatggtgaggccgcgggcggtcgggccgggccgtggggggcgcggcctctgggccggaccgtcggacacactgaggggccgacgcgagccgggccatcccagcccggcccggggctgaccactcttgccattgtcgccacaggtcctccattctgagcgaagtgtccacccgcgccaggtccaagctgccgtccggcaagaacatcctggtcttcggtgagcgccggcggcggggcgttgccccaggtcgctggggtgggcgaggcgggcgcccctccctcaggtccccgccttccccgttccagccgcctgcccgcagcctggcgggaaagggaccgtcggccctggccggtcagctggagagtggtcaagcctccagcgcctgagggtgggatgctgccctctttggagagcgtagtggtgctttggggttgtcggcatattgtttcagtcacttggccctctatgccttcattgcctcgacggttaccaaattgaggtcgtggagaggggaagctagtagatgagattaggtggagaaggtgggagaacgaggtgacctgggctcggagctgtggggaaatgaccacgggagccttctttgagcctcatcagtagtgcatagtccgaggttttagggactttgcagaggacagagagtcagcactggggacgtttcctccattatgctagccctcactgctaggttacctgagtcaggtcccttactccctctggcctcactctcct

SEQ ID NO: 28954 - DNA, 1941 bp, Artificial sequence
  DNA replication origin
tgcacaccgcgtggcgggggaaggggtcccagccctcgcggagcacctttggcccagggcgggagctccgagcgccggcttcccgcgccccgcacggcccggcccagcctggaagaaggcctgaggaaggcccgaccgcgccgcccgcgcccttaggcccggcccgaatgctggaaagcccgccggcccgccctcggctcggtgagcctcggctcacctcagctgccggtcgtacttctgctccttgagcagctttcccagctgcgccatggccgcgcctgccgcgcggaaaacagccgagcccctgcggagcgccgccaccagctccacaagcgcgcaggcgcactgagcgccccttcgccgctaccgtctcctgcgcgctgcctgcagggggcgccgcactgcactgcgcacgcgtcgccggtacgccggggcctaagcggccctggtacccgagcgggtctggggctcttggtccccatcggccagaaaggcagacccgctagcctgccaatttgccctctgtccatgcagtaattgggggcgactggggcattggaatcaggcatacttgtatttcgaccacttaactggctgtgagatctactctttacctctcaaatcctcagtgtgctcacctgtgcagtggggataaatgggtcccaagtgtcttttgaccttaaatgagattttgaatacaggaggccagactccccccaaatcttgcatgaataataactttcattttgatgatcattatttttcacccatttcttcctctcatgaaaagcccacaagcctattttgaatcacaaagctaggggctccctgctgcagatgcagacaagtccagggctctgttcttggagagtttagtctcatgaaggaagagggacagcaaacaagcacttaccagacaatgtggccttcctctagatagagggaagcagggtgctcaggggtgcacagaagaacctccccagtccccctctccaagaatgtttcatgtggtttggagatggaggagtgttttgttttgttttgttttgttttgtttgagacagggtctctctctattgctcagactggagttcggtggtgtgatctcaattcactgcagcttcaacctcccaggcagcaatcctctcacctcagcctcccaagtagctgggactacaggcatgcaccaccacacctggctaatttttgtacattttttgtagagatggggtttcgtcatggcccaggctggtctcaaactcctgggctcaagcgatctgcccgccttggcctcccaatgtgctgagattataggcatgatccactgtgcccagctggaagggtgttttaagcataaggaacagcaggtgccatctctaggaagcaaagaaggcatagcaagctgtaggtgctagagtaagtttggtcaggtgaaggatagggagtggttgagaaggtttgagagacagttgggacaggctgggttctgaagactgtgaacatagatccaaggaggaatttaaagtcctccacttcctgaaaagaccctcctttcaggaagagaacggctgtcctgtggggatgggaggccaaggaaggaggttaccccatgagaacaattgggaggggggtggtggtgctgaagacaaggtgaccatctgtgagggagacgaagactccttccctgctatctcgcagaccctacaggcaccttcaggttaataactgcctgaaataaggtgaaaatgaacacagatccccacccccaatcccctaggatggggaccagagagatggcacagtttgatggtaatgatgcagtgatgatgaattgcactttgccctgggcatggtctcctggactagggtgagagtacaccttcccataccttcccttgcccttacccagctcccatggaacacactgatgggaaacagagg

SEQ ID NO: 28955 - DNA, 1168 bp, Artificial sequence
  DNA replication origin
caggggcttcgcggaggaggcggcaggacacagccgccaggtcgcttgctggcggcggggccacccggggcgcagcgcggactttgcgtctggcgcgggggaccaaggcttgggccaagttcgggggccgggatgggaagaggggtcccgcccagcctggagtgtgggagctttccggtctgggaaaccagctgggcaagagggttggggcgagtgcagttgggtcgggggtccgagccagaggcggtgggggaggtctgtgcctaccgtcgtcctggccgtagccccagccgtggtggccggtcatgccgctgccgtccccgcagccgtgcacctgcccggtcggctcggtccgctcgttcgggctgcggctccggccccgctcgctaccgcggagcagcctcttaaagcagcggctggcgggaggagcagttcccgggggacccgccccccaccccccagcagggccagagaggccggcctgccccgccctcgcccgccggcgagccagttgaaccccgagcggagattcagggcaggaggaagtaaccctctccccccaactcccacccctgccctggctgggcgactatccctctttttcccccagcaacccgtgcggactctgggacactagatgcccgtgccgcacatggcgtcccttccctaggcttgccccagacctgcaaatgccaccaccagagacctgagctctgggtcctgaatcttttggggttggaaagtcccctttaaactgcaaactacactgaccatcaagtgtccaaaactggagcttccactgtttgccagaggctgttgcaggcgctggaccaagctttgggtccttcctatggtataaccctctctgttaccctacaaggttgggtgcttccatcagccctatctgacagaggaggggagtgaggcccagagaagtgaagtgacttgcccaaggtcatctagccagggggtaaagggttcattagctggggttcttactccagacactgggggttttgtgggatttgtttgtttgtttgtttgtttgcttgtttgtttttagacagagtcttgctctgtcacccaggctggtgctatatcagctcactgcaacctccacctccttgattcaagtgattcttctgcttcagccttccaagtagctggg

SEQ ID NO: 28956 - DNA, 1881 bp, Artificial sequence
  DNA replication origin
caccacggctggggctacggccaggacgacggtaggcacagacctcccccaccgcctctggctcggacccccgacccaactgcactcgccccaaccctcttgcccagctggtttcccagaccggaaagctcccacactccaggctgggcgggacccctcttcccatcccggcccccgaacttggcccaagccttggtcccccgcgccagacgcaaagtccgcgctgcgccccgggtggccccgccgccagcaagcgacctggcggctgtgtcctgccgcctcctccgcgaagcccctgattgcccagcccgctcagacccaggcccagactctcactcactcgccccgggcgtgcgcagcgcgtgggggtggcccagggcagcggggggcgggcgccgcggagcgctgtgcgcgggtgtctgcggggagcgcgcacggcaagtgagcggggacctcgggggagcggggctccgcgtggcaagggcgcagtgtcccccggagagaatttccccgcagaagtggccgagctgccttctcggccggtacgtgagggaagggggcacttgggggcgcaagcatgtgtctgggtgtctacaccgagcagggtgtttgcgcacgtccgggtgtgagtcgtgggagcccgtggcccacaccagcctcctgggctgacgcggaagagagctccttcatcctgcctcagtttccttaggactcagagaaagggagaagaggcagaaggtgagagccagacggctggagtgtgggtctggggcagtcaattccctttggggccatttcttaccaagcaggggtgggggtgtggggtaaggggttccctatttccctggggagccagtgcaagacaggtggggtgcggagaagaaaaagtaatgatgggaggaacatcccccagccccactcctctgcggagaggcagtcactttgtgaggttgggtgggggaccacagtctgggaagccagaaagttgcagtagaccagagggagggtgctgtggagtctttggctccctctggggccccaagaacaaaggagcatattttggaagagaacccccagatctgggtatgcaagagctggaaagagacattcagaaaaagatgatatagacaagcagagagggagagacaggcagacatggggcagatggacaggacccatagggatcatcttctcccagcacctgctctgagccaccttttgggtgcttcccccagagccagagtcccctgcctccagctcttcttgctagtcatgcccaccagctctgagcacccagtgtcctgtgtagcctgctccatgggcctgctcccccaaagcagccaccccatcacccaggcagagctggattgtccagtcgaggaagggaaggacagaggacagaggtgccggcatgcagcagtgttcacagggcttcaaaaataacccagaggggccgggccacgattctgagtcatccattggggacacggctctgtcggcacctgctgctgttttctcaggaaaacttaagaagccaaaaagggggagaagcaccagccggcagtagctctaaaaataggctgcatctcaggatgttccccagggagatgctgagcctctcggctgcagatggatcctctgggaggcaggtggtgggcgcctgtgggtgtgtatgcaggtgtgtgtgtgtgtgtgtgtgtgtgtgtgcatgggcatgtgttttgctgtggtcctttatgcaaacttgggtctccaacagaggggtttgtgtgtgagagagcatatgcgtgtgtcagatgtagtctgcagggctgtgtgtgtgtttgtacacatgaatgttctgggcctggctgctctgtgtgcacaatggaagatcataga

SEQ ID NO: 28957 - DNA, 1297 bp, Artificial sequence
  DNA replication origin
gccactgcactccagcctgggcgacagagcgagactccgtctcaaaaaaaaaaaaaaaaaaaaaaaaaaaagactttagggcaggaatttgagggtttttttggtttgtttttgtttctgtttttgttttttttgagacagactctcactctgtctcccaggctggcgtgcagtggcatgatctcacctcagtgcaacttccacctccctggttcaaatgattctcatgcctcagcctcccaggtagctgggactacaggcgcgcaccaccactcccagctaatttttgtatttttagtagagacggtttcgtgatgttggccaggctggtctcaaactcctgacctcaggagatccccccgcctcggcctcccaaagtgctgggattacaggcaggagccaccgcactcggccttggaatttgagttttagaagtgtcattctgccaggcgtgatggctcacgtctgtaatcccagcactttggggaggctgaggtgggaggattgcttgagcccggcagtttgagaccagcctgggcaacatagaaagaccttgtctctacccaccaaccacgagaaaaggtgggaggggcgtcattctggctgctctgctctgtggttaggaccaagtcaaaggtggaggagggaaaaccgtaaaatcaagtgagaggcttggaatagggtggctgcgtcgccggatggatgagtggagagagatttaggagataggatttacagcattagataactggaaagagagggtgagggagaggaaggagtcaagatgcctcccagggttttggcttgggtctctgggcagatggtggggccattactgggttaggagagaagagaaaaagcaagtttggcagaaagctgagtttggggtaagttatgtttgaggcgcctgggggcctccagaggcaggtgtccaggtggctggacatcagggtgtggcgctcaagagagggttctggagtggtcgacaccgaagtggagaggaagcagtgaggtgttctaacaacggtgaggaattggggaggccgctgggttcggggtatgcagagtgtagcggccacgtagctggcgatctcaggcacgtgactgcctggtcctgtggccccgcgctcgaacactttcagcacccaggcagggggtaaggggcggtgttgccccctcccgggtcccgcctttctgcccgcctctcatcctctttagccattgggcaatacctctgtccatcaagggcccgcctccgcaattgagccaaccagggctggcgggagggcgcttcctt

SEQ ID NO: 28958 - DNA, 1714 bp, Artificial sequence
  DNA replication origin
tcaaggaatttgtggttatccttaaaaccataacagggccagctggagcaacatggcgaaacctcatctccacaaaaaatacaaaaattagccaggtgatggtgcacgcctgtagccccagctactcggaaggctgaggtgggaggatcacctgagccaggggaagtttgtctcacgtgtccgtgtgaagagaccaccaaacaggctttgtgtgagcaacaaggctgtttatttcacctgggtgcaagtgggctgagtccgaaaagagagtcagcaaagaaagggtggtggattaatcattagttcttacaggttttgggataggcggtggagttaggagcaacgtttggcaggcagggagtggatctcacaaagtaccttctcaagggtggggagaattacaaagaacattcttaagggtggggcagattacaaagtacattgatcagttagggtggggcagaaacaaatcacaatggtggaatgtcatcagttaaggctattttcacttcttctgtggatcttcagttgcttcaggtgatctggatgtatacgtgcaggtcacaagggatatgatggcttagcttgggcttagaggccggacattgttgaggctacagtgagccatgatcctgccactgcactccagtctgggcaacagagtgagactctgtctcaaaacaaaaagcccatagcaagaagcaaaagttggagggttctcggctccatcccagggataaccagggcacaggcccaatgcttgcaagaggtgacttcagcttgtgaggaaagacaaggatctctttctcttttcccactctttcctccctaacattttaaatgcatgtgcaagtgcctacttcataccaggcactgggctgatccctggggactcagaggagagtcagaggaggtccctggtgccgccaagagggcagacagactgacagacattggcaagctatctgaggagatgtgatggaggtcccagtgccatgggaactggagacaggagctggtactgcctggaaagccaggaagtcttcccagggcaggggatgcttcagcagagtcatgctgagtcgcaggaacaagacaggtggaggtggatggtgcagtggtaggtgttccagcggagggaacagcaaggccaaaggcctggcatgttctaggaacatgtgacagccatgcccaccctgctgggaacagatggaggaggctggagaggccaccctggggagagggagtctgagctttcctccttagggtgagggggagccatggttcggagcaaaggagtgacatggtcacgatgactgtggtgtagtgggtggaactgactagacggacagccgtcatttggggcagtggaagataaaggtggtgtagtccattattggaactgggacaggggaggacagatgggaatggccccccgggctgctggaagagtggttgtggggactggctgtagggaatggggtagggaggatgggggtcagaggcatggggtggtccacagaggagaacagccatgcgggggaagatggtcaaggtggcagccactcccccaccatctggagctcactgcctggctctggcttctcctgggaccccagcagttccttccctacaagacagggctgggtgaccacaggaccggcccttcctccacccacacttgttcccagccccaaagacatcccaagtccca

SEQ ID NO: 28959 - DNA, 1484 bp, Artificial sequence
  DNA replication origin
agtagctaggattacaggcgcctgctaccacgcccggctaatatttgtgtttttagtagagttggggtttcaccatgttggccaggctggtctggaatttctgacctcgtgatccgcccaccttggcttcccaaagtgctgggattacaggcgtgagccaccgcacctggccaatactgtggaattctattggcgctttcagaatcatgcctctacctacccacttcataaatggggaaaggaaaggagaagggacaccccccagcctttggtagggaagaaatgcccagagtagaaggccagggcatagatatggctactctgtgggatgggactggacatccctccctgcctatcagggacaggtcagagtttctaaccagagggatttctaagagaggagccctaggtggccaaggtccccagggggggcatgtgggtggaggtcaggcacaccatgccctccagcccccacttccctgcctggcactgctgttgccacataccagcatctgcaagtggagtggagggtaaggagggctctggggaagagttggagggtgtggccagaacaggaaacctggcagcagcggctttgacaaccagctggtaacctgtctactggccttctgcctagggcacacctatgatcgctccattgtagtggacggagaagaggcatcactcatggtctacgacatttgggagcaggtagggtgcaagcagagacccagggcaggggagggaggagtgagttgggttagaggtctgggagtgccaggctcgtgtcgggggcatgaggactgttgggcagatgtgtgttgtgtgttctccaggacgggggccgctggttgcccggccactgcatggccatgggggatgcctatgtcattgtgtactcagtgacggacaagggcagcttcgagaaggcctcagaactgcgggtccagctgcggcgtgcacggcaaacagatgatgtgcccatcatcctcgtgggcaacaagagcgacctggtgcgctctcgtgaggtctcggtggatggtgagtaggcggcaggttgcagggggagggagagcccagctgggccctgatccaggcagtcttggctcagcttgagtccctggggatcatcagaggctaaaaatgttcagaaagaaaactggcggggagggaaatgggagagagctggtgcctgctcacagggctccggaaggccccagagggctggggaaagaaccaaatctgataggggagctgggcaccgcagggccctcctctcctgcccctcttggtcctggcctggctggttgggggggtaaatgggtggaagagagtgtaggggaacaggccaggaggtcagagcctgtgtgctaggtctgggccattcttagagtagacttggccctggggaagacccttcccacttggcctcagcatccttttctgtggaccccagtactgagcccctcagaggaacccagcag

SEQ ID NO: 28960 - DNA, 1209 bp, Artificial sequence
  DNA replication origin
tttatgccccttttgggtgggggcctgaacctccaggccctggatgtgccctgggtggctggctcagcctacagctagagggaagaagggagaccttgacgactcgaagtggctggctcctgctggcattcaacacccattggcctggatttccccaactctgggcaacttccagtccaggagcagaataaccagagccacggccagggccagggctggggcagattatttatttttagcagagttgctggcagctgcctggtgggtgctgggaggtgggatggggactgagtttaatcccttccctcttctgggctggggtatcctccccagggttcaagcaggcatctccacctgcaactctgtcagagctgcccccacccccaacagccctctcagggcccccaggggctcatggggtgacaccaaccctcacactgaaggttaggctcattagggagaatcttcaactccaggatggggagtggaaaggattttgtgtgaatttaggacaccccctaaattctagctcagacctgagcctatggggagtgggtgtcatgggcagagaagggggatctctgtccagcctgtaactagcttacttgctaaaaggacgagccgggacttggggagaggaaagggagaattcagtctcacggggccagaccgaattcttctccagagggcagttgctgcttttggctgattgggtttaccccgctgcctgcctccccatcacgtactccccccgcaacctcgctctctctctccttctcacacacaccctcagctccggacctcgcctaccggtcagcccctctattcccagacagctaccgctactcccctggcgggtagggcggggtgtcggggatgtaaggtccgaggaagagggtgggggattcccctggtgggggtggacagacacgtcagcccccgcagcagcgtggaccgggggcgggagcgggggcgggtggaggcttaaataggcggctctggagccagagcccagtgcgggctgagaaggcggtggctgcagcagcagcggcggcggaaaccctaaagtccgagtccggactacgagtgcgtggcctcctaatccggatcctagtcctgagcgtgtctgtgtgcgagtgggtgagtgtcctggcggagcggggtcggggcggctgcagatggatgcgccaggtccggaggggtcccggg

SEQ ID NO: 28961 - DNA, 1789 bp, Artificial sequence
  DNA replication origin
ctcttcctcggaccttacatccccgacaccccgccctacccgccaggggagtagcggtagctgtctgggaatagaggggctgaccggtaggcgaggtccggagctgagggtgtgtgtgagaaggagagagagagcgaggttgcggggggagtacgtgatggggaggcaggcagcggggtaaacccaatcagccaaaagcagcaactgccctctggagaagaattcggtctggccccgtgagactgaattctccctttcctctccccaagtcccggctcgtccttttagcaagtaagctagttacaggctggacagagatcccccttctctgcccatgacacccactccccataggctcaggtctgagctagaatttagggggtgtcctaaattcacacaaaatcctttccactccccatcctggagttgaagattctccctaatgagcctaaccttcagtgtgagggttggtgtcaccccatgagcccctgggggccctgagagggctgttgggggtgggggcagctctgacagagttgcaggtggagatgcctgcttgaaccctggggaggataccccagcccagaagagggaagggattaaactcagtccccatcccacctcccagcacccaccaggcagctgccagcaactctgctaaaaataaataatctgccccagccctggccctggccgtggctctggttattctgctcctggactggaagttgcccagagttggggaaatccaggccaatgggtgttgaatgccagcaggagccagccacttcgagtcgtcaaggtctcccttcttccctctagctgtaggctgagccagccacccagggcacatccagggcctggaggttcaggcccccacccaaaaggggcataaacacagggtgtggtcaaggcatgaggagtgtcttagctccctgctcatctctcaggggtctgagggttgcaggtcaggctgtgaggtattttgtgacagggacctgctatcagactgtgacatctgattgtgacaagtgtggtgggggtgggagggcatccatttggggctcaggtgacatcacagatggatggaccctggtgggctgtggtaggttgtcatggagacctgggccaggctctttggctgctgcatcagtttccttggcaacgcctaagaaggccttggattgaggagggcctggctcggtaagattagggccctcttgtccttgaggtcttcaaagtaggcaaaagctgggctgaggggtggcctgcccatggtcctaggggatcttggaggcctgagcatccccatgctggttctggcttcctgaacgaactccagtgggaagaggaagttatgggcagagcctcccgttagcaggcaagtctaaagagccaccacacacttcccatgaggaatcctggctgggctgcctgtgccccctccaaccccatgactgtgccactggaaagagcctcctctgggtgtctggcagagggcgagggtggggggtagctgtggcccttcccagcagggggccatgcaaagaaggagggctgggtttcccctctggcaatctgagctcttgacctcagcagtgtttcttcattgccaagggaactgcaaccacaaagggccactcaagccccaggcattccagtggctgctccaacaggccagagacactcaccacaagctagatatggccaggggccccagggattaacaccaggacacaaccttgagacacccccactcccaccacctggttctcccagctctctgggc

SEQ ID NO: 28962 - DNA, 796 bp, Artificial sequence
  DNA replication origin
acccgggaggcagaggttgcagtgagccgagatcacgccactgcactccagcctgggtgacagagtgagaccttgtctcaaaaacaaaacaaaacaaaacaggccccaataatacagtgtgtaactgggacacgaagggctgtgaggacacagagacgtagaccagcccagacttgggagacagggaaggagggacatctcagctgagacccgaggaataaacagaggttactcaaccgtgcagaccagcgtagaagactggaagggtggggagcgggggaagggcgtgcctggcagagggaacaacagcagcaaaggcctgaaggatgcaatgtgtggaggaatcgcggctctgcagggctggagaggtcagcaaagagcagacgtgagaggacttgtgggctgcgacaggggtcggcatggacttgacgctcatggaagccctgttgtatggaggagggtggctgggaggggggagaggagggggagagcagggagaacagggaggggaccagggtgggctgccaggtggatggagaggcactggtgggctctagatttagagtccgcagacaagaccgggcgactgaccagacacagaggttggggaaaagaagccccgatagggcagccttaaggcaagcaggagtggacccggaaatcaggggtctggtgtgggccacactggatgtacaaagaggcctcttcctctgggcctgatggtggcccccacagggcagccatgggagtgtagcgggggggtgttaccaggttgggtatcgccaacaccagcagg

SEQ ID NO: 28963 - DNA, 1331 bp, Artificial sequence
  DNA replication origin
ccaggaatttaagaccagcctgggcaacatcgcaaggccccatctgtacaaaaagttttaaaaattagccagatgttgtgtctcacacctgtagtagtgtgaggcaggaggatggcttgagcccaggagttcgaggttacagtgagctgattgagccacaacactccaggctgggcaacagagtgagactctgtctctaagtaaataaataacttctgagcctgtagctgcccaaaagaattggtcggtggacccctgggaggctctgaatggcaggttgagtgtcatatagagtctgtgtccctccctggggacttcagggaagccatgttcaagttcctccccagtctgtctatagccccacctcctgggttttagccaccccccatctccacttctgcacgcccccgcagcctccaccccagttcccagtccagcctgcccaggctccgggaaggctattccaagaacaggaaggaacttggcaggggaacgccagctctggttcttgcagtggcacccacatggccttctttccctgccctagcctgcctgccttccttcccatcacccccagacctcccacactttggggcatcgttgccactggagcctctcttcgggtgacgttgcccctccctgctgcccccaagctggccccttcccactcttcagaccttgaccaggaccccaggaaacaaggcaatcgctggcggtgcgggtaggggtgaggtccaggcttctcccggccacccactgagctctcctctgagctcaagcttactcacacccggcctctcccgcaggcctctgggccgtcctctggggttccgagaggaccccaccttacagatgaggaaattagaatcagagaggggcagtaccgtgcctgaggccacacagtgagaacaaaggcaggactcacacccaagtttactggccttcaaactgcaagtccttcccctccagaatgtgcccttgtgtctagggtggccttccaggtgctggagttggggtctagtgggctgacttgggtggggggactgggattctagttaggccagcaagggaggcccagaggaggggttttgcaaggcagtggcttcagactggggctggacagcccgcagggagatgacaggggccagccctgctctccctcagatgccttcatgagtcccctctgtcttttgggcctggactgtggctcctggagtttgtcagaggccaaggtgggcaggtcagctgaggccaggagttcaagaccagcctgggcaacatggcaaaataaagctgggaaacaaaaatacaaaaattagcctggcatggtg

SEQ ID NO: 28964 - DNA, 1037 bp, Artificial sequence
  DNA replication origin
aggcccagctgttatgagaatagccacctaggggttgggccagcaaggagaaaaggtgaggtggccggagagcccatgctacaaaaataccccaaatatccacacagtataaggcactgggctgggtgccagtactcagatgaatctacctctattcctgcctttgggaagtgcatggtcacttggggagaaaaacagccaactgaaataactccaaccaggacatggtcaacagcggacaggaggccaggcatggtggctcatgcctataatcccagcactttgggaggccgaggtgggcagatcacttaaggccaggagttcgagaccagcctggccaacatggtgaaaccccgactctactaaaaatacaaaaattagctgggtgtgatggcgcgtgcctgtagtcccagctacttgcaagattgaggtaggagaattgcttgaacctagaggcagaggtagcagtgagccaagatcgtgccactacactccagcctgggcaacagagcaagactctgtctcaaaaaaataagtggacaggatgtcgggaggcacagaagaggaagtgaccaggagaggagacaccacttaagctgggccttaaacacgaataggagtttgctgggcagggcagaaggcatttgcttgagaggactgaggcccacgggcttggaggtgggaggcaaggggccacatgtatctacagcaaagggtggctgggacagagatgactggatggaaaggagggcctgggtactccgcgtatcttaactttatcctgagggcagtggagagccagggaagatttttgttgatttgtttgtttttattgatatatcatagttgtacatattagggaagatatgaagaagaggagtgacatagtccgccagagtgtggccgaggagtaggaggagtgtgaagaggctggggtactgtccagaccagagacggtggtggccttgacatctccccagagatggggatggaggggagggaccatattccagagctgtttgggaggcagaagggag

SEQ ID NO: 28965 - DNA, 1342 bp, Artificial sequence
  DNA replication origin
ctgcgcttcagcgaggactgtctgtacctgaacgtgtacgcgccggcgcgcgcgcccggggatccccagctgccagtgagtgccaggtctcccgcgcccgcggtcccaccgccgcccaccgccccgctcagatcccggccttcttcgtccaggtgatggtctggttcccgggaggcgccttcatcgtgggcgctgcttcttcgtacgagggctctgacttggccgcccgcgagaaagtggtgctggtgtttctgcagcacaggctcggcatcttcggcttcctgaggtggcggggccggtaccctttgggaccgcagctgtggccagagcggcggggactgggtgggaagggaggggcggggcctggggcggggatggggggggtggggccgcgaggcgggggcggggcctggcgctcggtggaaggggcgggcgctccataccatctggatggggcgagctaactccaaggaagggggtgtggtcgcaggactgggtcttagaggggcaaggctgggctgggtgggggaagcccaggagggcagcccaacgcgccccgactgtcgaggcccgggaccctgacagtgaaccccacacgcccagcacggacgacagccacgcgcgcgggaactgggggctgctggaccagatggcggctctgcgctgggtgcaggagaacatcgcagccttcgggggagacccaggaaatgtgaccctgttcggccagtcggcgggggccatgagcatctcaggactggtgagagcaatgcccagacggaccgagcacagacttaggctcctgcgttcccacaaatgtatgctccactgcacaggccatgtgcagatttgcgtgtacaggaacgtgcctgccacagaaatgctctcgcccctgccaagggtacagcccctcatagccaaggatgtctcctctgttgagggatagcactgatgagaaaactgagccccaggaagggtagtgctgaggcttggggtaatcagtgaatccaggtgctacccagcaccttctgcctctccacattcccccagaactctatcccctgaacagagcccaccatctgccccctgggcaaggctaggacctcacaccaggcctgcaagccaggggcatgagttgacgggctttgcccctgactcctgtgtgactgctgacctgggatgtgcctggaatgtgggtgtactgtaaggtgccctgtgaggggcatatggctgggaagtgaacacatcacacaggacattgctggccacagtcataataatactcaacagctgagcacttcctgtgtgccaggcattcttctaagcaccttatgtgtcgtcatcc

SEQ ID NO: 28966 - DNA, 1302 bp, Artificial sequence
  DNA replication origin
cccactagcccccaccacccagcggaggcgagattcagctcccggcgcccgcacgtccgccccggctctgggctggcgccaggcggctggatccgtgactgcagttggcgggaggccggacggcgcgtcccccgggactcccaggcagccagcgctgtcggcccggcagggagggctgtggcaggcgggcgagcggcgggaggctgggggcccgcggcggaggcagcgctgcgtgggctgcggtcagcaggggccccgcagaggggccgcgtctcctgcgctaattggccctttcccagccgcctgggcgggtaattgctgcttcgcgggtggaaggtgggggcgtggcgagggagaagctggggcgctgcatccggagccaggagccaggctcagccccaggtgggcggcccggcccggcccggctggcagggggctcctgtgtgcactatgcctgcatgagcttagcgcccgcactctttcgtacccgcggtggcgcgggcgggtggatgaaacccggcggtggggagggcggctggggcaagactcagaagtgtcctcgggctttcaccaagatccagtctgttctgcgcaccgatccacgcgggatggggcctggcagcagcttcaggagagactccaagtggccgtgggaggacctgagtgggggcaggaagacaaggtgggacgatggggcagtagtaggtagccctcccgcctctgtcatccagcaatgtaacccagggaggagctgacgagaagagggacaccttcctgggtgtatggggagggtgtggagccggggctgtggaaggcaggggccaacccagcattcaggctgcccactggggttctcccaggcttggattcctatggaggatcctagggtttcctcagagccctttatgattgtcgcatctgccacagccagcttggacccgactaagccctggctcctgctcagctgcacttcctccagttgggggaggagggccctgggcaggtggccattagaggcagctgccctccccacagacccatgtgagaaagcatgaggaggggcgttcaagaaaaatcattcatggtccttattaaagctcagtaaagcagactttattcaggagcatcgaaataggcataggggccgagcagttagcttgtgcctgtaattccagcacttatggaggccaaggcggtagagagggtctcactctgtcacccaggctggagtgcagtggtgtgatgatcatagctcactgaagcctcggccttctgggctcaagcgattctcccacctcagcc

SEQ ID NO: 28967 - DNA, 1407 bp, Artificial sequence
  DNA replication origin
ctgcgctccactgagagggcttccgcgcccccgacagcctgcgctttggcgcccgccagcagtctccaggcgggggcggcccggcccaagccttcttgccttctcatggccctccttgcttcttccggccctccaaggcccggttctgggctggccgagctggagcagttccccactggtggttacggcagagccaggctttggaaacccacggccggtgctggatcgtgccccgcgacaggcacgtaggcaggatacggggtgggcagcacagggacacaagcactcattactgacagtgaatgcatgaacttcctcccctgggtccctcccctgcacaacctgacttacccacctagaggctttgggagacccaagagggatgggtcctaccctccaggagcctgcaggctgcatgggcagaagatccaggagcttggctaggaccccaagctaaagaaagccccgaggtccagggagggaggcatcgggtgaaaaaaaaaggaggggggcgctggaagagggagttgtaggggacagatgccacccgtcaaggctttcccttcccccaaagaacccccttccagctgaaactggtcacactggggcccaggagtaagggataaagtgggcctgagcccagtacatcctctgcaggaggctgaagtttctgaaacaagaagtgggagagggttcagtaggaaggtccacaagtgaggtcgaccaaagagatcctgctgtttccccatgagtgccacaagggactggggtggaagggctgaggctggaccagtcctggatgcagtggccttttctgtgtgttcttcctctgctccctcaggtctggagggctgggagcctgctgcgtgctctggaactttactcaggtcttgttgagccactttctttgggaaagtgtggaccatgtctcttaaagaaccagaattgcttctttccaccaaggtcattaactgtgtggagagggagagagcccctgtcagaaattgggggatgcagactgaacaatgaaggaacatagcaacaatgaaggaacatagggacaatgacaccaccttgagtccagtggaatgaggtgcggctgcattaaagaatgaggaaagggacagagacaggtgtaagagacgatggaacaatcagccaagaaagtcagggggttggctgggcgcggtggctcacacctgtaatcgccgcactttgggaggctgtggcgggcagatggcttaagcccaggagttcgagaccagcctgaacaacatggcaaaaccccatctctacgaaaaatgcaaaaattagccaggcatggtggcatgcccatgcagtctcagctacttgggaagctgaggtgggaggatggcttgagcctggcaggcagaagttgcagtgaga

SEQ ID NO: 28968 - DNA, 965 bp, Artificial sequence
  DNA replication origin
gcgcggcatcttcccgccctgaggccgcgccggccggccgcgctcggggcttgcgcgggcacccgctggctggctccgcgctgaccgactgaccgcccacccgcggcgcccggacgcccgcttccctttgtttcaggcgcccgcccgcgtgggctcccgttccggggagtctgaggcgccgccgcccgctcgagcccaacccacgccgccgccgccgccgccgccgcctcagccgttgcctgccgcccgcgcagccccagcgctcaccgcccccggccgccgccgccgccgccgccgccacttcctctcaccgcccaccccgcccccgccggccccacccctcctcctcgcgcgcccgcccgcctccaactccggcaaacaagacgcaccattcacaactccgcggcccacgccgcgcatgcgccacccgcccgctggcggagcggcctggctgtggcgccccggggctccttccgcatcagggcccttttccccctgctcgcccgcggccactcggcgtggagctgtcgttgggggatccgcctggcctttagcagacgggagtagccagcgcaggccttttctaccgcccttcctcggtcatctggaacttctgggttccccaggtgcgcggagtaaccccagattgtcacttgaacgcgaggaaacctaagtccttggggacttttcgtccctaaaccgaccggcaggggtgtaggctctgcacgttgaagactgaggtggaaacggaccaaagaatccaaccgagtcatggtggaaaggtcgtggcttttggagtcagatgggtcttagatgggatcccactcagctacactacctgctggctggggccttagataagaattggaccactaaacctcagtttccttatttccaaaatgcagacactcctaggtttgcagtgttagcgtgagaacctttatgtgggtctagcacacagtggg

SEQ ID NO: 28969 - DNA, 868 bp, Artificial sequence
  DNA replication origin
ggagaaaagtttgggcggcacggtccccgggagtcccggtcggtgcgcccgcggaggggcaatctcgccggggcggccatcgcccgcagcctctgcttgcccttatcggcgctgcgctgggagggcgggcgcgcgggcggcgccgcggatttggctcctgatttcgggccgtcttgccttgcagattaagtacacgggcttcagggaccggccccacgaggaacgccaggcacgcttccagaacgcctgccgcgacggccgctcggaaatcgtaagtcggctggcccggggcgcgcgcgggtcacttgttgcgcggggccgcggcggcccaggccggttccggacggcggcgcggctgctgcggctcccggaactgagtgggcgccgtctcacttcctactcgggattcaaaatgcgaaaccagatgccgcgggccggtactcgcggggagacgcttttcctggggctcgccgcggtggcgcgtgtcggccaacggagcaccgcgagtggagctcgaacccgagccagactaaacaagcgaagggcattgtttaggcggcgacaccgaagaagggttcagggtatttgtagcaagcaaacccccattcggaaaaagaagtggagcttcattcaaggtcggcgatagtttgtttcttagaaggtagatctgtcggtaattctctgtgtcaagcggtctcactaccagatcgccgagtagaaatctttcctccagttatttattctaatagagaggggaggggggggaaaaggccctaaaaatgtcattttcttagaatgttaagcttcaggagaatcagaaagaaaccattatccccatgtcctgagtagggctgctgttcctaaaaac

SEQ ID NO: 28970 - DNA, 1879 bp, Artificial sequence
  DNA replication origin
ccttttgaaaagaactgagaagaaaaatgtataattttatcccatttttaatattttggtctagcaacttgtgatacatagatgacaattttgtgagtttttcaaatgtgtgtacagatttttgtaaatatgactcttttgtaattaactcatgtacagcctcatcctgtatagtttaatgatgaatgtgcaggggacctgtctcaggctcctatatggttcctgggccttatagccaggtttgtgtggcgctcccgacttttgtgactgactggtgtcttcccatttggactgtggcctggccagagccccttgcatatccccactgtcaggggcagccaggactgttcccatcctcctggaatgggggaaccttccttatcccctgcccacatcccctctccaataaagcacctgtgccctcagcaatggcctgccatgtgctgttgctgggatgtttgtattaaggtaagtgtgggtattggttttttgagcaagggggtggttgaagcatatggggaaattaatagtggtggcatctcaggggaagacattccttggctcctctgaggggatacagcctccagtgggagactggcattgttgtgtgagttcaggaggtgaggaaagactaggtaggaccgtgcactcatttgtcccttatgtgtggctccatccctggtgctcagccacacctgggcccaggagaggttgtgggaagcataatatctgttttcagatgagctatggcaaagtgcctgccaggttcatgaattcaggctgtggcggccggagcccctccacctccctgtggggcctggccttgagagcctctgcatacgtccgcgtcagcctagggggttccaaatccagcagagtggtaggattccctaagtccctgccaccacaccagaacacacctctgtgctactaggaggaccagacatatccactgctctgggacctgttggacaagagatggtcatctaccacccagccttggctcgctcaaagggtcaccattacacgggtttcaactggttccagcagggtggaccgccaggagccaagcttaacccccatcccctgggatcctgtggagacaggcacctggtgatcagggaagaaccacatacacggcaataatctgggaaaccggctccattctgggtctgagttaggagcttggggctgtagtggggagctaggagtcccattggaaggggcctgcagcgacaggctgtggatgcgcacaggctggcccatgcggcccgtgcagcaggcgccacataagccagatgtcagcggccgagagcccgtgcactacaaccagctcacggtaaaagcaggggtcgaaggtgctcaaatgcggcgcggctgaaggctgggggatgccaaaggtgcggaaggcagggtgaggctcgggcgtgagccgcaggcgctgcagacacatgcccagaaagacgtcgtcgatggggaagagctcgacctgcgcacaggcgccagccaggcggtgcagcgtggccccggaaagcacaaagccaccgccgcccgcgtaggccggataggcgggcaggccgtacacggcctcggggatgtagtacttgctagcccgcgtgcggatgggccgcgcatgcacaattacgtcaccagcaagcaggtcttgcgccgggtcccgcggcgccaggaactccaggagatttcccacgttcacgaacacatctgcgtcgcccttaaaaacgaagcgcacgtcggggcagaaagctgaggcccaggctagaaagtggatctccttgagcgttaggttaaaaaaggtgtcgtcgaaggcccagagcaggatgtccgcatacgcaaggctctcggcccgcagcagggcgcg

SEQ ID NO: 28971 - DNA, 1622 bp, Artificial sequence
  DNA replication origin
ggcgggaggccacgccccggggggggctccagcgaccgacggttgagccccttgcgttgttctcctcctcccggccgtgtcgcaccgccgggaccggcagcctgaagggacaagaagttcacccatgtagccaactcccccgcggcctcagctccggcccaggactgcgacccagggccgggcagggagactgggagcctcggcccctcccccgcccgcctccctcgcgctgaggccgaatcccttccaccctgccatcccctcaatgtcgggccctggggtcccgacactcacgctcggccctcggaagtggcgcagccccggacgccctggcctccggggctcagcgcagggtccgaggggccgccatggaccgggcccgagccaaatgcagcgttggcaggaagggggaccggtgccgtgccacgtgaccctccagctgtgcgcgcccagacttctggagctcagctccgccccggcgccaggagcactccggcctcagagtggggactaatccctgagagggagcctcctcactctcagtccctctgggaagggctggtctgggtgctcacaccccaaattcgcctttctggggattgggaagaagcatcaactcccctggttagctcccccaactatccactccccactcccgcgtctctggagtggggcggagcctgggctgctaggagcccctgagcaggccggttccaaatgcgcatgaacctggccaccatcccgggcgggcctctcctcagcagccctgattccatcaggcagggtgcatacgctgcccccgagacacatggctgtcttcttactcctggttctgccatgctccccacccccagtaaacacacgcacgggacaaacaaggcagcccacccaatcctcagggcaactctgccagcagctctcattcatgcccagatggggacactggggggctcttcggggagttaagtgacttgcccaggatccaaaggccagaaagctctgcccccaggtcttctgaaattcaggccaggattattttatctgtccttgccccgctcattcatccactgggatacagaacagggggccaacccagtctgctttaatttcacaggcaagcacttcagcctgtctccccgggggctaatggacctgagcccaagccaggtgcagttctgagtcccctggtccccagcatagcctactgcaggtagaaatgatcaggcctgtgcagctgcaggtcagacagggctggcaaggatggggacagcttgggaagactcctggcggaggccttggctaaaggattgctctgggatgcaggtggacagaggtgctctgcaatggagagctaagtccttgcgcagctcagctgccagctctctctttcttggtcccagcccatgtggtggagcctggaatagacagcctctactggtctcttaagaacccagccccatcctctgtccaagggctatatctgctcctgacggcttcttcccaccaatgttcaatcttaaaaagccacctctctggctgggtgtggtggcttatgcctgtaacctcaacactttgggaggctgaggtgagtggatcacttgaggtcaggaagtcaagaccag

SEQ ID NO: 28972 - DNA, 1222 bp, Artificial sequence
  DNA replication origin
tggaggagatgagtgtgagtaggcataggggtgggctatcgagagaagggcagtgttcggggcacagtctcaggcaagggcttgaggaaggcttgtgggtttttcaatgaggccagtaggaagcctttgaagagtttcgggagttaagactgggaggtggttgttttttttttttttttaattttaattttttttcagatggagcttcactcttatttcccaggctgtagtgtaatggcacgtttttggctcactgcaacctccacctcctgggttcaagcaattctcctgtttcagcctcccaagtagctgggattacaggcgcccaccaccatgcccagctaattttgtatttttagtagagatggggtttctccatgttggtcaggctggtctcaaactcctgacctcaggtgatccacccaccttggtctcccaaagtgctgggattacaggcatgtgccaccgcacctggccaagactgggaggttgatgaggatgggggtgggggaaatggtggccccaggctggggcagtagcagcagagatggagggaaggggatgaccaccaaagagctgtgtgggtggaagagtaacaggcctggtgacactgggtgaggaatggctgagagagggccccaagtttctgcctttgccagttggatggtgggtgggactgcttgctgggatggggccctggggggaaatgaaatgcttgctctgtttgggacaagttgagcatgatgttcctgcagtgcatccggggagagagtatgagggtagttgggtctgtagttctgagttcaggatgagggttcaatctaaagattgatgaatagacaggtggggagtgggtggggtggccccaggggatgtcctgaaggacaccaaccagaatgggaacagccaaagaggaaggaggaaaaccaggagatttggaaaccaggggattacccacccactataatggagcgggtagtcaagaccgaggagtgtctgttggactcagttaaaaggagcttaccagtcaggggtctttctgagtcatggtggaggcagcccgaagctttatcacaggagggaatggaaggtgaggccgcggagaaagctggagcagaggactcctgattactttgtgaccaaaaagagtaaggctcagggtggagatttggcttttttttttttttttttttttggagagagtctcactctgttgccaggt

SEQ ID NO: 28973 - DNA, 1636 bp, Artificial sequence
  DNA replication origin
cccggggtggcgacggggaggtcgcttcggcccccttgcagcccccggtgccctctctgtcggaggtgaagccgccgccgccgccgccacctgcccagacttttctgttccagggtcagcctgtaggtgaggcgcaggtggagaggcggggtcaccaggaggttggagtctggggaggggcaggggtcgttgccgggtggggatgggtgggaccggcgctgggggtccccgccctcaccccgtttccccactccctctgcagtgaatcggccgctgagcctgaaggaccaacagacgttcgcgcgctctgtgggtctcaaatggcgcaaggtggggcgctcactgcagcgaggctgccgggcgctgcgggacccggcgctggactcgctggcctacgagtacgagcgcgagggactgtacgagcaggccttccagctgctgcggcgcttcgtgcaggccgagggccgccgcgccacgctgcagcgcctggtggaggcactcgaggagaacgagctcaccagcctggcagaggacttgctgggcctgaccgatcccaatggcggcctggcctagaccaggggtgcagccagcttttggagaacctggatggccttagggttccttctgcggctattgctgaacccctgtccatccacgggaccctgaaactccacttggcctatctgctggacctgctggggcagagttgattgccttccccaggagccagaccactgggggtgcatcattggggattctgcctcaggtactttgatagagtgtggggtgggggggacctgctttggagatcagcctcaccttctcccatcccagaagcggggcttacagccagcccttacagtttcactcatgaagcaccttgatctttggtgtcctggacttcatcctgggtgctgcagatactgcagtgaagtaaaacaggaatcaatcttgcctgcccccagctcacactcagcgtgggaccccgaatgttaagcaatgataataaagtataacacggattttgatgtgagaaatacaagtagtagtggcttacacctgtaatcccaacaatttgggagacagagataggaggattgcttgagctcaggagtttgagaccagcctgggtagtcccagccacttaggaggctgaggtgggaggatccctggagcatggaaggttgaggctgcagtgagatgtcactgagctactgcactccagcctgggtgacagagtgagaccctgtctcaaaaaaaaaaaaaaaaaaagaaagaaaaaaaaagagaagttgtggaggatggaggaaggggcctaacctgggcaggggacagggggtaggcttcctggaggagatgagtgtgagtaggcataggggtgggctatcgagagaagggcagtgttcggggcacagtctcaggcaagggcttgaggaaggcttgtgggtttttcaatgaggccagtaggaagcctttgaagagtttcgggagttaagactgggaggtggttgttttttttttttttttaattttaattttttttcagatggagcttcactcttatttcccaggctgtagtgtaatggcacgtttttggctcactgcaacctccacctcctgggttcaagcaattctc

SEQ ID NO: 28974 - DNA, 1561 bp, Artificial sequence
  DNA replication origin
actaatcactgcagaaatgtgaatggaatatgcagattggccaggtctggtacacaagcccgacctggaactagggagtgggacacaggcacatggattgagaagagggaggagggaagtccccaaaggtaagtcaggcttggggagagaatctgggtagatgcaaactacaggtgcccttcgaagtgaagacaggaggtttagtcttaggctgaggtcctccagaaatgctgggctcaagtctactcagaaggcaaggccaggatatgggtctggttggctttggggcatgggcaccatccagaatgaagatgtctcttgtccgcattggtaagagagacacacaggcctgagaaggaagcagagaagccccattgcaggatctgcctctgctccccctccactgtgaccttgggctctttctccaagaaggcagtggagggacagtcctcactgcaagcctggggcgggtgggactctgtacagagccaggagctcaaggggcttcctgtgagatggtgaactcctgtcccaagtatgccaaccagtggtggggacaactgaaccatgtgggacttgaggctactgtggtggggacagctgaaccacgtggggctgggtagttgtctccagggtggagggaggggggatgaactggatacctgactgtctgcatctccaggaggtgagatggcagctgggcaaaatgggcacgaagagtgggtgggcagcgcatacctgtttgtggagtcctcgctggacaaggtggtcctgtcggatgcctacgcgcacccccagcagaaggtggcagtgtacagggctctgcaggctgccttggcaggtgcgtggatgggcgggcatgtggagaggaaggggtggcctggagcattttgtgggtgggcctgggtttagccacctttaagaagaagatttggggtgggaggagcaagacggaggacccctggctgtgcagactctcttctttgcttgtggcatgaccttgaggataggcgtgtgttctcgagtctgtgtatgatttaccaatttgtgcactaacgtcctttgctccatccccgcccccctccaccagccggctcactcctttctactaattgtggatgtctctctcctcttttcctctcttactgcagcactccttgctcaagacccctccccagtacctacccttccaggcccccctttcccatctcagggcagaggccacaggaggctgaagcgggttgggggatctgttcgtggcctcagagcggcgagagcccctcttcttcccgagcagtgggagtcgcgcttggtggaggccgaagacctgagacctctcgccctcctctgccctgctggccgcctacccagacggcttgtttgcccagggcacacgcccccttttctgtgcttcgaagtccctctcttttgccaaccctcatttggggcgtgagagcgggggttaggtggcacccactctgtcttagggtgctccctgtgacagatcctggtcttctttctgggttattgctgtttgtatcccaattttgcttcccagctg

SEQ ID NO: 28975 - DNA, 1472 bp, Artificial sequence
  DNA replication origin
gcagcgatcttgaagccggatccccaggggtaccagaaaattctggtctccagggggcgcccccttgatttaccgaagtctggcagctgtagctcttacgagccccccgcctcgtaagaatcgcaaacccccaaagtcgggtcttcctgccgtctaaccttgggcgctggtgtcttacctgctcggcggaccagatgggctttgcccggggcaggggactggcagcagaggacagcggacgggaagcagccaccgggagcccgcggggcgggacgcgcgggcggacggggcggctcgggctagggcaccgccccagcgcctccgcgcacacccggaagcggcggagtagagcggagcctggcgggcgtgggaacccaggccccgccgaggcggccaggttagtgcagcaggtgggtgggtgggctccccggtgcgggcgggagaggaggtggatcttggctccgaagcgtgggcgcggcgcagatgtcaccggcggctgctccagccagctggtggcggcggtctactgagctgttcgaacaccgtgggaggcgggggacggtacggaatttggcccccgcaggctcctcgtccctgccagcactttcgaggtgcagtagggccctgcaggagagagggtgggggagaaggggctggttctgaatactttccttgagcggagacccccttgcccaccccagccgatcgcacgtgcgaaaccccagcttgagggtgggctagtgggagcctgggaagctcccctcaagcgctcgggagctgcgtagctgagtagggggtgtgcccggcgggtcgcaaggagtcacaggctttcagttctgggccacgcccacaggctgtctctgtccacccagccagaggtggggctgcccccgggactgttaggtgttcagggggcaccgtgcgtggctcgtccctggaaacaggcgcagaagttgttaggtcggtacctaagcgccccacagtctccggccaccaaactttctcaggacccagcctggaagcctcagccccgcccaaaaagggacgactcctggtgggtggggcgcggggcttcccaaggaggggcttccgtgaaagaacacgtaagaagagctgccagtcggcggatgcgaaactagggccctggcctctttaccctgttaactcgacctccagcctggttcaccttccccatcttctagtactagtgagtgtgagaaagcatccccagtctccaggttcccagtactccccacctccccctcgacccccacagacctgatgggcagacaatggtcctgttcggtccccacttccaccccttggggtgggaccataaccaagtcaagcactctcaagtcaaggggccagaaagacatgaaagagggaatgtttccaggggaagttcccactctctcctactccccaggccactttcgaaggactccccccttatctcacctccgtggctg

SEQ ID NO: 28976 - DNA, 2375 bp, Artificial sequence
  DNA replication origin
acccaggcttcgttgggcagcggggacgcgcgtgcatcttcggggcacgcgcaccgcagagccaagagcgcgaaaggcgctcggtctggcgccgccagtgcttcgaggatggcgtgcgacaaactggctaggtgcaggccgagagcgcgcaggcgcgggcaggcctccagtagctcgagcactgagccgggacccacgctgcccactagggtactgttgtccagaaaaaggctgtggagctcgggacagctgcgcgccgcctgcagcaccagcgcgtcgtccagtgtgaaggacaagcgccgcaggtcgaggtggcgtagctggctggccgccccgcatacagcgtgcacagcctccaggacgtcgcggcccgcgtcgaagagcggtttttctccgcggcactccaggcgcaggcctcgcagccccggggcacggcccgccagaaccatcagcagctcgatggccgcccggcggctcggcttcctcgatggctcaaattccagccgtaggttgtgaatgtggtcgaggcaggcggacagataaggtggcagcatgccttccagctcacattcgcaacttgggttagagccgtgcagaaaaggcctcagctgagtccctgcgaccagcggagaagcctctacccaccccttagctggggttccagctgccatcccatttcctgcctccctccccacgtctctgttcagaccacgactgttgccccaaaggagggaactcgcatcctatccttttagaagatttcagtggcgtctgccacaggatgaaacctggacatggagagccaatgatattttaggaactgggctttctcagctgtctctaaggagtcttggcatggcctccggactgctaggttcgaattctgcctctgccattccctagctgagtgacccgtgggaagtgattaagtctctttgcctcagtttcctatctgggcaatggaggtaatgataatacctatctaccacacaaggttttcataaggattaaattagttaatatatgtaaggcacttaaaaacaatggttggtatatactaggcagtcaatacgtcagcaattattattattattttgagataaactgttactctgtcgccaagctggagtgcagtggtgccatctcggctcactgcaacctttgcctcccgggttcaagcgattcttgtgcctcagcctcccgagtagctagaattataggcgcccaccaccatgcccggctagtttttgtattttagtagagacggggtttcagcatggtggccaggctggtctcaaactcctgacctcaggtgatccacccgcctcggcctgccaaagtgctgggattacaggcatgagccaccacgcccggccagcaattattttttaatatgggggagtcaacctgaatatctacctagcccacgactccacggagaaggtgagtgggcggtggggagaggagtgtggaggagcaggctcacctgatttttgtgtcgtgccacacggcgctgcaggtagcagcggcggcccaggccctgcagaccctggcggcggcagcacggtctctcagggacaggtggcggaagatgagtgccagcacctcctctggcagtccctctccaggctcggccatggcccagatccggctggggtgggaggatccgccactcccaatagctccggcctggagagagacggacgtctctgaggtcgggaaggcgcaaagtgttgcaggaagaccgagcttaggtgtacaaatgcttgtggcctgaggaactgagggcctctcagacagcgtggggcatcagataaccccgaaacttgttcacaaagcagatttcaccgcctcacctactaaatcaggctctccggaaagggtaaggcccaggaatctgcatttcaacaagcccctgtgactccacaggttccacgttgagaactcccctcccacttttttttttttttttctttttttttgagacagggtctcgctctttacccaggctggagtgcagtggcgcaatcacaactcactgcaccctcagtctcccgggctcaagcaatcctcccacctcagcctcccgagtagctgggactacaggggcacgccaccacgcctggctaatttttgtaattttgttgcagagacgaggtctcgctttgttgcccagactgacctcgaactcctaggctcaagcgatcggcccgcctgggcctcccaaagtgctgggattacgggcatgagccaccgcgcccggcctgagaaaccccatcttaaccccgccggttagtagaaagtgactacagggttaataaggcgggagcgttaatgtaggcttttctttgtcagggaccatgagccaatcagga

SEQ ID NO: 28977 - DNA, 1264 bp, Artificial sequence
  DNA replication origin
cccctccaaggtgaacttctctgaatggccaaatccggggatccacggcccagtctcaggagggggttgggcgggcatgggtgttcactgacgtggagggaccccgggaccacagggggaatcgaggggccccggccctcaccgggctccagcggatcaggtggtctgtgcctgggtcccccaccagcgcccatagcttgccgaggaaggcaggcacggggctggggcctggctccgtgggcagcgcagctggcgcttcctgcatggtgcagtctcggcccggctctgcgctcgggcccggccgctgcgggctcgtcaaagccgcggaaagtgctgcgtttgccgcccgctccgccctactccgccccggggcgccgggtcaggcgggggccacgtgcaagcccgcggggcggggctcggacagcggccgaggcaccagcaggcagaaaaggctggctggatgggatgtgtggagtggagtggagtggaggggtggggtggggtggagtggggtggggtggggtgagatgagtgggagacttgggttcgagtcccacccctctcggtccctctatttccttctttgttctacaggagaaatcgccggtgcgcgacctggtgtgggctgggcaagtcctagaaggtaatggccagaggcacagtgaagccccaggcagggcaagcagataggaagggggggcagggaagcacgccccctcccgccgaaccccgggacgtagtcattccaagggtgtgagtgccccgaccctgaccccccgcagctgtgtcgtccagaggctcttgaggaaacccaacctctgccgggatggctcctccggtaccccgcgcgttccctgtccttccctttcagatccgaccccgcctttaataggacgcagaaacactgcaggatttgtttatttcacactcacccttgaggcccggcccgcgcccgtgccctccctctccctgcgccggggccgcggagctgcagagtccgcagaggggtggaggcaagagaggggggcagtgtgtccaggaccgagcgggtggggcgtctgcagagggtgagagcagcgagtggtctcagggcgcccaggactggtcccgatgccatcacagttcccaactcggtaaagacccggggggcaacaatcccaaaagaaggcactagcactcggggcgcgcctggacaccccccccgttccctctcagagcgcttacgtccacggggacgggggagagaagtcgcccaatcacgcca

SEQ ID NO: 28978 - DNA, 1281 bp, Artificial sequence
  DNA replication origin
gcccccccttcctatctgcttgccctgcctggggcttcactgtgcctctggccattaccttctaggacttgcccagcccacaccaggtcgcgcaccggcgatttctcctgtagaacaaagaaggaaatagagggaccgagaggggtgggactcgaacccaagtctcccactcatctcaccccaccccaccccactccaccccaccccacccctccactccactccactccacacatcccatccagccagccttttctgcctgctggtgcctcggccgctgtccgagccccgccccgcgggcttgcacgtggcccccgcctgacccggcgccccggggcggagtagggcggagcgggcggcaaacgcagcactttccgcggctttgacgagcccgcagcggccgggcccgagcgcagagccgggccgagactgcaccatgcaggaagcgccagctgcgctgcccacggagccaggccccagccccgtgcctgccttcctcggcaagctatgggcgctggtgggggacccaggcacagaccacctgatccgctggagcccggtgagggccggggcccctcgattccccctgtggtcccggggtccctccacgtcagtgaacacccatgcccgcccaaccccctcctgagactgggccgtggatccccggatttggccattcagagaagttcaccttggagggggtgtgcgagaggggggtttcctctgcggccgaagaagggttaggagcctgccttctgaagacctagagtccgagggaccttcgaggccatttagttcccaccctaccccatccgacagatgggaaaacagaggccgggagatgggaagggctggtctagctcagggtcacattgcggggctgggaaccccgtcagcctctcctttctgagaactgagtatggagtcagggtctggctgggggtagggactcactgtggtcgctccaggctaggcctcggagcccgttctggcctggcctcgacccatatccccgtaagcggcaggcctggacccaagagtgagcatgagtgtgtgcgcgcgctggagcgcaggactggccgtgagcgggcaccgctcaccctcctggtctccgcccgcacggtgggcgggcggcgttcttggtagagcgggaccagtttcctcgtaagcgaccagagccgtttcgccaaggaagtgctgccccagtatttcaagcatagcaacatggcgagcttcgtgcgccaactcaacatgtgtgagtccctacggccgggcggggag

SEQ ID NO: 28979 - DNA, 1398 bp, Artificial sequence
  DNA replication origin
gtaagtagaaggctaggcccagcccttggcctgtaggcacagggagagccagaaccccaccaacacccacctgggccaggtctaagggagaaggtttgagggaggaggctcagtccatgctggagggcctgggtctggttggggggaaggctggcttccatcttctcttccttttaggggatggggagaaggaacaggctctccataagcccagccatgcccttgggaagggggaagaagacaaacctaccgactggatgaagtaggggtcctgcagaagggcaccaggtagagggcaggtgttgaacttggcaggtgttgggcatgagctcccctcatccagcatcagggacctgtgtggtcgatcagggcacaggcaggggtggggcagggtcagcccccatgcacctcggcctgcacttccctccctccctcaggccccagcagccaagtcagcagagctgaggcctgttgctagggtgtcagtcacatgctggaggtggaaggggctccccctagagatgggggccctttgtgggtagagaggggagggagggaacctggtttgagccccagggtctcagctgttgggaagccttgccggagggggaaggggctgctggggtaggaatttgggaataaggtcctggaatgggaggatctgggagtggggataccaggtggcagagttggggggaagtggatcctagatggggtgaggaagcctgtagcgcagggggaggaatgaggattcccggtgaaggagtttccagaggagaaggggtccttgcaaggggacttctggggggtcttggaagtgggtgtgggccttcttggctttctcactcacagctttctcttgcctcctgcattgctcggccccgcctgaagtggcccaaagagacactggatcagctgaagagaaagcaaaggtttaattcatactttggacacagcccccccacccccgcacttccaggtgagggaggaaggcttaacaggggcgccgggggactgggcggtggaatggggtgtcgaggagtgggagggagaagcgaggcttggggagaggaacaccttgccaatgacccggtgctgctgaccgtggctctgccgaagtgtcaccacctcccgccacaagatctcgttctgcctgaggaaggggtgggagggtgctgaggcatctgagagttcgcccagtcaccaccccccacagaatggcgaggctggggacccaggagaccaccccgctgactggccatcccagagatcgcccataagtctagatggaggcgccaaggcaggagagaggaaggggctgcccagaactgctggccggccagttatggtctcatcccgaaccccccacccctgtcccctctttccccgcccgccccc

SEQ ID NO: 28980 - DNA, 717 bp, Artificial sequence
  DNA replication origin
ctcaccctccctattcccagcagccctggccgccccgcccccgccgcagctgctgcacccacccccaccctgcccggccctttctgcaccgtcatctcctgccccgccgaggcttgacccgtgagtggggacgcccaaaacgggccagaccgggagccccactcccggctgtgggagggaagggaaaccgagattgggcagaatcagcgccccaccacccgctgcggcgctcgggggtcgggggggcggggtgggtaggactgtgggccccgccctgccgcaggactctcaagctctgggactgggtggagggaggtaaggggcggggggggaaaatccgtgcagtcgcacatgcgcaaaggctcttcactgtcccaagaccctggcttcctggccaaagagcccgcgcagcgaggtggggttgggggctgggacccagctccgtgccccgccacctggctctctgggaagaatcggacctgtcaccctcgaaggactggccgctaaataacttcggtattgagagctgtgtgagcctcaaagggagggcccagaccagctggagtctctacccccagacaggataaagggcaggacttggggtcataggaggaggcggctaacatgaaaacaacttaggttggagagaaggaggggccaatccaatctgcaccctccctgtgtctgtcccgagtaggtgctgtccccctctccctt

SEQ ID NO: 28981 - DNA, 1589 bp, Artificial sequence
  DNA replication origin
ccgccctgccgcaggactctcaagctctgggactgggtggagggaggtaaggggcggggggggaaaatccgtgcagtcgcacatgcgcaaaggctcttcactgtcccaagaccctggcttcctggccaaagagcccgcgcagcgaggtggggttgggggctgggacccagctccgtgccccgccacctggctctctgggaagaatcggacctgtcaccctcgaaggactggccgctaaataacttcggtattgagagctgtgtgagcctcaaagggagggcccagaccagctggagtctctacccccagacaggataaagggcaggacttggggtcataggaggaggcggctaacatgaaaacaacttaggttggagagaaggaggggccaatccaatctgcaccctccctgtgtctgtcccgagtaggtgctgtccccctctcccttcctttgcccaccgattggagggacactctggaaaactcagttgaagaaagcggagagtctgcgtgtacacagtgcaatgatgtcagttaatgcactagtgagggcatgtgttgttcacggtacacagaagaaggaaccaccagcccttgggacacttaggcattggtgtagacaagggaacatttgagtcctggacgatggataggtccacggagcggagggaggagaaaaggattccagtcttagcgatcagcatcagcaaaggctccgaggtgccagaggcatagtgagttctccgatccctggctggtggagggaagctgggaagggcctggctgtccagggtggtgggaggaggctagagtagccagaccagatattttgggttgtctctgatgggcagtggggtgtgggggggaggtagataggtatttaggatggaattctgctagacaggaaaatatagttcagttcctcatagttcaggctggagcaagtaagattccagttttaccactgaatctctgagcctgtctcctcatctgtaaaatgggaacagcaatcctagcccagagggttgtcaaagtcactgtgctatcgggcctggcagaatgggagtgagaggggctcagagggactgttacaggacatgaggtgacgatggtggggtggcaaggcaggagctgatggagactcactgagaagtggagaagcaagattcatcacatacgggacataaagggagatggaggggcagggggtagtcctggtctcggcctggtggggaagggcttcaatgggaggaagccagggtgtgaagtgacgggggaggtatagtgtgacaccagagggtactgagaaagacctgggaggcaggatggcggctaggactaaatcctctctcccagagaaggccgagcctcctagagccagagaaggaggcagaggagggacagcaaagggaagaagagatgggaggatgccgtgtgaacaaagccaaggcggggaggagaagaagttattatcagggtgggggtgggctgagggcatggttcaaggcctgatgtctttgcctcctaatgccgggggtcttgctggctgggtcaggccactcacaggaatgggccataatccttggttg

SEQ ID NO: 28982 - DNA, 1438 bp, Artificial sequence
  DNA replication origin
ttggtagagatagtctctcaagagccaggcatggtggttcacatggtggttcacaaagtgctggtaatcccagcactttggaaggctgagatgggaggattgcttgaggccagcagttcgagaccagcctgatcaatatagcaagaccaggacaggcgcggtggctcacgcctgtaatcccagcactttgggaggccaaggcaggtggatcacgaggtcaggagttcaagaccagcctggccaacatagtgaaaccccgtctccactaaaataaataaatacaaaaaatatatatagcaagaccccacctctaaaaaaaaaaaaaaaaaaaaaggctgggcacgagaatcacttgagcctgggaggcggaggttgcagtgagccaagattgcgccactgcactccagcttgggcaacagcgagactccatctcaaaaaaaaaaaaaaaaaagtctctcaaaatagtgcgatccatggaggaaaatcagtccaagttcggcaagtatttgtcggtatcctgtatgagctaggccttgggtacttcaagatcaaacaacaaatgtctgtaggtaattcccaggtcagcagggagccaggtgggtcagcagagagacagtcacattaggagttagggcttcagtagggagacaggtgggtctcaggtgatgtcaagagatcttggtcagagctaggcctgaagaagattctggtatctctgctcaggaatcaggggaccaggaagggccaggagactacattggggttgcactatggtggtggtgttggtgggagggtgtagaggcggggcttgtcctggaaagttggatatcagggtcaaggtaaggggagaggggcagggaggctctcagcactttgtgctctgggttcagaggggactggaggatagagtatggaagcagggagctctgatcctgggttctgcagggccaaagcaggaggcagaaggctggacttagtaagtggtgaggatggtgagagaaatattcagcagtcagactggaaaggacttgtctgcaagctgggtgtggagtatcagcatcaatcctaggtttttctgcctggttaggtggggaagcagatttgagagaaagaccttagtttggataaacggggtctgaactcgcctcggatttgccgggggtggagctcaggacgtcctggttggggagggcattcagagagtagatgccagtcctgggaaaggcaggggaggagaggagagccacggctgacgcttggggacagaaggaggagcctgaggaggagacaggacagagcgtctggagaggcaggaggacaccgagttccccgtgttggcctccaggtcctgtgcttgcggagccgtccggcggctgggatcgaggtgaacttaaaccccagcctgggtgttcactgggggcattgagggagtggtcag

SEQ ID NO: 28983 - DNA, 683 bp, Artificial sequence
  DNA replication origin
ttccccgtgttggcctccaggtcctgtgcttgcggagccgtccggcggctgggatcgaggtgaacttaaaccccagcctgggtgttcactgggggcattgagggagtggtcagaggcggcgagggcagcggggagggcaaccccccattacttctctcccctttccccatgcagccccgacaatgggcaacgcgcaggagcggccgtcagagactatcgaccgcgagcggaaacgcctggtcgagacgctgcaggcggactcgggactgctgttggacgcgctgctggcgcggggcgtgctcaccgggccagagtacgaggcattggatgcactgcctgatgccgagcgcagggtgcgccgcctactgctgctggtgcagggcaagggcgaggccgcctgccaggagctgctacgctgtgcccagcgtaccgcgggcgcgccggaccccgcttgggactggcagcacgtgggtccgggtgagcgcgcggggcggggcctagggcagagcagggacggggctggggcagacaaaaggcccggggagggcagggttgtcgtctccgctagaagtaggcgagtgtgaaaccgcacaggggtaaattgagcctcagtcactcccacttccgccccaggctaccgggaccgcagctatgaccctccatgcccaggccactggacgccg

SEQ ID NO: 28984 - DNA, 1351 bp, Artificial sequence
  DNA replication origin
gggccagagtacgaggcattggatgcactgcctgatgccgagcgcagggtgcgccgcctactgctgctggtgcagggcaagggcgaggccgcctgccaggagctgctacgctgtgcccagcgtaccgcgggcgcgccggaccccgcttgggactggcagcacgtgggtccgggtgagcgcgcggggcggggcctagggcagagcagggacggggctggggcagacaaaaggcccggggagggcagggttgtcgtctccgctagaagtaggcgagtgtgaaaccgcacaggggtaaattgagcctcagtcactcccacttccgccccaggctaccgggaccgcagctatgaccctccatgcccaggccactggacgccggaggcacccggctcggggaccacatgccccgggttgcccagagcttcagaccctgacgaggccgggggccctgagggctccgaggcggtgcaatccgggaccccggaggagccagagccagagctggaagctgaggcctctaaagaggctgaaccggagccggagccagagccagagctggaacccgaggctgaagcagaaccagagccggaactggagccagaaccggacccagagcccgagcccgacttcgaggaaagggacgagtccgaaggtgtgagtccgcccaaaccctgagccggcttggcgggagggcatggcctgggaagcggatgccggaccccacctctttgaccactgttcccgtcatctctagattcctgaaggccagagctctgacaggcggtgccccgcccatgctggataggacctgggatgctgctggagctgaatcggatgccaccaaggctcggtccagcccagtaccgctggaagtgaataaactccggagggtcggacgggacctgggctctctccacgattctggctgtttgcccaggaacttagggtgggtacctctgagtcccagggacctgggcaggcccaagcccaccacgagcatcatccagtcctcagccctaatctgcccttaggagtccaggctgcaccctggagatcccaaacctagccccctagtgggacaaggacctgaccctcctgcccgcatacacaacccatttcccctggtgagccacttggcagcatatgtaggtaccagctcaaccccacgcaagttcctgagctgaacatggagcaaggggagggtgacttctctccacatagggagggcttagagctcacagccttgggaagtgagactagaagaggggagcagaaagggaccttgagtagacaaaggccacacacatcattgtcattactgttttaattgtctggcttctctctggactgg

SEQ ID NO: 28985 - DNA, 853 bp, Artificial sequence
  DNA replication origin
attaaggaggcagttggatgcccatgtttggaggtgagggtctgagaggctgggctggagagagaagtggggttgtagggcatctatgacaaaaagaaactgttgagagaaagggcaaagatgaaggattgagtctagaggtataaaacgttgtagctaattgtggatcaggaggggagaggaagaagtcccggagcaaaggctgtgagctgtaagcagtgggctgggaccagctacctgaaagccaggggccactgcctatgcctgatgcccggcttcctcctgcaggtgtcctatgaggatgtggaccacctgcggccccatggggtgctggataatacccgggtgccccacttcatgcaggacttggcacgctaccggcagcagctggagcacatcatggccaccaaccggctggatgaggcggagctgggtcgcctgctacccgactgatgtccgttgagggctgcagtcagaggccctggacagaagctccagataggcccctagaacatgaagcagtttgctctgtgcgtccacggcctaggtgtttcttgggggtgttgggagggcaggagcattccttgaggaggagtggcaacatcaaagtgtttgtgtcccttgccagcctccctggggtctggggacctgcagcagcatgtctggcaaactgagtcgccctcctgcctccagctctctgttgagcagagggaaggcatgggggcaggaagagagctgagcattgatggggatgggggtggtttgggaatagaaacttgttcttgcatgagatggctttggttgtcccagtactccagtctctcccttcccttacctggccccttggtgctcc

SEQ ID NO: 28986 - DNA, 1631 bp, Artificial sequence
  DNA replication origin
cggccagatggaacagggccagggctgggctcgcaggcgggtccccgaacgccccgcccagcgccgcctcccctcgccttccccgcaggcacccactacctgcggggcgtgaacaacgcgcgccagccgtggcacaacgcggagggccggctgcggtacgggctgcggccggcgaaccccacggaggagggcctggccagcctgcacagcgtgctgttccgcaagcagccgttcctgtggcgcgctgcactgctctactacaccatccaccgcgccgcgcgcatgtccttccgtcagctcttccaggacctggagcgctacgtgcaggacgccgatgtgcgctgggagtactgcgtgcgcgccaagcgcggccagaccgacacctcgctgccaggtgtgcgccagcgcgggggaggtgcctagagccggggtgggggcggggcttcgggcgaggggcggggctcaccgccctcctgccctcccaggttgtttcagcaaggaccaggtgtacctggacggcatcgtgcgcattctgcgacatcgccagaccatcgatttcccgttgctgacctcactgggcaaggtgaggggctgtggaccttcagaggtcccagccagctccctgccttgctgtagaattccctgagcctcggattggtgctagaccgagggctgggtgtcaggcctgtggtggtaggggggagcgtgggtggaagtgagaacaggagatgaaatgactctggcagcaaaaccaggtgcttaacggaggctgcaggtgtatgtagatactgcatctcaaaggagatgagcattccaggccaagggagtgatcaggaaggccaggggaagaaggctgcagaaatggccagggaccaactccctggcactggcatttgtgccaggccgaggaaagtagatttcatctgaagcaacggggagtgagaggagctttaagcagaggagtgactctgatatttgcttcagaaggctccttctggacatcatatgggaggtggattggagagaggactagggaagggagtgcaggggcacggaggaggccttgcctgtcactcctgcagaagggatggtggtctggcctaaccaggcagtggccgctgggttggagatgaagggacaagctggagagctcttcagagaggggaatacttttaactcagcggctaccctgatgggagggtgagagtccaagccccctcccgggaatctgacctgggtgactgtaaagagggtggagctggcataagctggcactcaggagttgacttttggacatggggccatcctgagggttatccaggggaagacattaaggaggcagttggatgcccatgtttggaggtgagggtctgagaggctgggctggagagagaagtggggttgtagggcatctatgacaaaaagaaactgttgagagaaagggcaaagatgaaggattgagtctagaggtataaaacgttgtagctaattgtggatcaggaggggagaggaagaagtcccggagcaaaggctgtgagctgtaagcagtgggctgggaccagctacctgaaagccaggggccactgcctatgcctgatgcccggcttcctcctgcaggtgtcctatgagga

SEQ ID NO: 28987 - DNA, 963 bp, Artificial sequence
  DNA replication origin
atgccgtccaggtacacctggtccttgctgaaacaacctgggagggcaggagggcggtgagccccgcccctcgcccgaagccccgcccccaccccggctctaggcacctcccccgcgctggcgcacacctggcagcgaggtgtcggtctggccgcgcttggcgcgcacgcagtactcccagcgcacatcggcgtcctgcacgtagcgctccaggtcctggaagagctgacggaaggacatgcgcgcggcgcggtggatggtgtagtagagcagtgcagcgcgccacaggaacggctgcttgcggaacagcacgctgtgcaggctggccaggccctcctccgtggggttcgccggccgcagcccgtaccgcagccggccctccgcgttgtgccacggctggcgcgcgttgttcacgccccgcaggtagtgggtgcctgcggggaaggcgaggggaggcggcgctgggcggggcgttcggggacccgcctgcgagcccagccctggccctgttccatctggccggggctctggccgcgacacttccatcctcatgctcctgaactcaggctcgcacacaggctctcccagccccaggcagcgtgaagctcctcctcctgtggactcgcacccaaggatccacagaggctcacatacatgaatcctctcccacccatccgccccccaccctacacccacgcacccacacacgtgcacgaactctcccaaactgacattgcccccagccctcctgggcacaagaatacatataccaccctgcccaacatcctgggtgcccatatcatcttgaacagtcatgctgatgcccccggtaaaaatcactcttgcccagagcaacaggattctcgaggaagagggacagacagataggaatagtggttagtgccctgcacccccctgcccaaactggccagtcccctcctaaaccaggtgccatgtgtcctc

SEQ ID NO: 28988 - DNA, 1701 bp, Artificial sequence
  DNA replication origin
gtgtgtgttggggaaggtgggatggaataaaagtgcccacgagggttgagggaattcttgcagagtgacacgcttaaagtatcctggctcccgtcctggtacacgggctgcgccccgcctatgcaggcatctgccctctgtgcagactgcgttcccgaggccgcgggctacgcccccacgtctccgcgcccaggccgtgagcaagagtctccgccgccctggccgcctggagcccctgaagcccagcaactcgctgtggccttgggaagggggcgggcccaggaccacgaacaccgccccctcaaccctgcctggcttcgctcccagtggcctcgggggcgcgccgccgcggagactgacgcgaagccccacgctttcgtaagagcgtgcgcgcgcccgaggacgtacgtcatcggcgacggctcccgccggctgggcgtccggtggccggtgtagcagagcgggagcggcgggcggcgagcagaggagctaacaggtgggggcacggcacgcggacggacccccccaaaggccgggaggaggcgcgcgacgcgacctttcctgatctcccggagaagcctccactccattgtctcctggccccaccctccattgggcacgcccttcaccttatcccccaccacttattggctgcaggtcacgcccctcctctatttctggttccccattggctcttcaccttgtcctctccggggcttctctccgcacaggccacaccctctcatttgtcactagaccccgccttaatagtggggggctcctcccccatccatccttcattcattatgcacccagtgctgggtgcttggtacacgggggtgaatcagaccccattcctgccttcggggagttcaggggattgtgggaggacacggacctagactccaacagtgacagctctgagtaaagaagtcgccgaagcagtgggacactagacgcggggaaggcttcctggaggaagtgaggcctaaactgagccttgaagaatggttaagagtttgctccaggaatatattgcaaaggcattcttggcggaaggacccgagacgtgaaaaaaacaggcgtattctggtaatttcgaggaggtatgtcgaatgaaagaaggggagatggaggggactgggccaagcagaaacctgtaaaggggtgaggagtccaaaaaactgtacagttagttaaagggagtgaagcctgggacctgaagtcttttcaagcagctggtcattaggcagggtagagaggagtggagagggggaagatgaagtctagatagggaagcaaagtgcagggaaggaataattctagttctgaaagaagagctcttggattcatttatttattgagcaattgctgcgggccaggcactgttctgggttctggggacacagctgtgaatgttggaaaagataaaacagataactatcaaatatacctatcatacaaatataaactgtactgaagtacactccagatggtgatgactgctacaaagaacaataatttggggaaggggagatagtggagaggggagaggaggtttactattttattgagggtgtgttaggcttttctaataacatggtattgatgcagagatttgaggaaagtgagagagtgacccatgccattatacagggggaggaacatcccagacagaggacatattctgtttgatatgcc

SEQ ID NO: 28989 - DNA, 903 bp, Artificial sequence
  DNA replication origin
atgttctgagaatcacatgagataacatgtaaagtggccaccatagtgcctggcacatggtgtcaattgttcattcgtccagcaaatatttcaaggccctactctgtgccagtaatgtctggggttacagctgtgtgtatacacgcacacacacacacactcccttcctcttgggtggtatgttctttttggtgggggcaaggaaaacaagtgatgattttttactccctcctcactgggatacttcccttcctttacgaatgaggaaacagaaaccgaaagaatgttttcctcaaggacgcaccgcgaatttgaggcaggtctcgctgggctgtgtcctttgcagctcgccaagcgcccgtctcccagccctggtccatgcctgggaccagaagtgcagagagccgctgttctcgctccctcccgtcaaacacttgccccacaaggtggcgccggagggtctggaccaccgagggccatgcgggccttggccttggtcctgaagccgtagttttgcttggtccagctcctcagtgtctgtcctgcagctggacggggcgccttcaggggccttggctccagtggaagctgcgctggacgagttgcagaggaggatctaccgcttggtgttggaggcgctgcaggcggagctccaggtgaggcctccttcaggtcaggatgggagcaggtggagaggtggcggtacagctacgtatgggggtctccgcggcaatgccagatctggatcatttccccagcccctgttcgcggatctgccctcgcgccaatggctgtcgagccctgagctcctgcaaagtgtgtgtgaacggacggggcgcttctgccgggacttctggcgcgtgcggaaccccacggttcaggtgggttgggggaaaagattgg

SEQ ID NO: 28990 - DNA, 1576 bp, Artificial sequence
  DNA replication origin
aggggctggaccttctgttcgaggcactgggccaggctgtggaagcagctgcaggggccgcagggaagctggcacgggaggacccagccctgttggtggctgctgtgcgtgtggcggaggtggagactggacgaacaacccccctgggccaggtcccccgggactggcgtcagcgctgtctgagggcactacaggagggcctggagcaggcccactttgggtcacctctgctgcctgcaccaggggccctaccagggtggctggaggctctgcgagtggccctgccagtcgagttggccacagctgaggcactagtagcgccttgctgcccgccacagtacaacgtggtccagctatgggcccacacgctgcatagtggtttgcgccgcagcctgcagaacctccttgcagggcctgagctagaagctgcggatgccttcgccttgctgcactgggcactgcatgtgtacctggggtcagtgcctttggggcagcgggacatgggggatcagaggctgggggcttggtggcttggtgtgacaccaggccacctatctccaggcaggaaatgatggggagcctggagttggggcctgaggctgatgtgtcccagctggagccccttctgaccttggagaacattgagcagctggaggcaacatttgtggccaacatccaggtgagtagttgaggcacaggtccagagaagtcctacttatctgctgtgggcctttatctgcagagtggaatgtctacccatctccagcagggtcagatccctgctacattcctttgcccctggcccctccccccaggcaagtgtgtctcagtggctgcagaatgcactggatggggaggtagctgagtggggccgggagcatgggcccaacacagacccgtctggctcctattactcaccaatgccagccattgtgctgcaggtaggtgggaagtggccagacaggcaggcagcctccatggggcagtggggaggagaggaaggagggaggctttgccgatggctgctcatttctgcctgcagatcctggaagagaacattcgtgtggccagcctggtcagtgagtcactgcaacagcgagtgcatggcatggcactgtcagaactgggcacattcttgaggaggtttgctgaggcactgacccattcctgatccctatccctgctccccaggcagcccaaaggggctctgagtgaataagacatgtcacagggaaagggctctttcaaacaaggacttgggtatcttggaggtgggacaggagtaccagggactggggctgtggggatgccagcatagcagcaagtccaggagccacctctgcccattgcagcttcagtgatgctctgatccgattctcccgagaccacttcagggggaaatcaatggcccctcattacgtgccctacctactggccgccctcaaccacaagtcagcactcaggtaccagaaggcccccagggaaccccaccttcactaaccccctattgagtacctattatgtatgggctcagcccacactaggacactagggactttggactcacatcgccctg

SEQ ID NO: 28991 - DNA, 1397 bp, Artificial sequence
  DNA replication origin
ctgtacaaatattacaatttccttttgctgcaaaaagtataaaaataatctttatataggaatccattcgttactgtaaatctttctaaatctctgcaaatggctctaaatgagggtaaatgaaaaagccgaaatgaagagagggttatggggcagcaggaggtggggccaatcatcagggctggaccacccagactcctccccagagacctctgttccttcttggtagccgcccccaccacctgcaggttctagggctaaaggcccagcagaagtgggcacgtgagagggccaggaggagctggagggtcagggggtgggggatagcgaaggaagctagaagtggtgctggcatgtgcccagttccaccccacccttccctcctaggggaaggagctggcagaagcaagacactgaggctggcaggaacaagacactgccccctatggggggtaatggcagctcctcggttctgtgccactgggtggcagccgagcctgggctggcgaaggccgcagaaagggagaagcaaacactttggctccacggtgatgggggctgagtcctgttcccctgctctgcgagcacagaagtgccagcacaggagcgggagctgtggccagaactgtgcggtgaggggaggccggagaagccaggcgtctgtggctctcaagctctgtaggggtcgggtgggagaggtccccaggcaacccccaggtcagacagtctgggtcccagccacacagggcatgtccctgtcagtcagaggttgagaacaggcacatcaaagaggtcacagacaccttcactctcgtccaggttgtagatataatcgtggtctcccgggggtggagaaagacgaagcagaggggcaaacactgcagagagcactagtctcaggccctgggccagggctcccctagcagcagcccaacccctgcccacacccactcccaccttccagggccacccaccttctgaggacatcaactcctccagcagctccgagctcatgcactctgggaatggagggagctcagttactaacattccagctcccacctctccacccaccaaagcccaggaaagggaaccccacctgcccatcaggaacttcaccctttgccccagttaccataagcgccacaacaaggtcctcaaaagggcaagaaaacagccataggacccaatgagctgtgtcccttacccctagcctcagggaggaatgcagcagcctacctcgtgtgggatcaaagatttctgacagctctttggggagttccaaaactgaaaaacaagaaagccatgctcagggcacagaggtccagcctggccccactacagccccctggcttcctcggatcctataccacccaccctgaggctccacacagcta

SEQ ID NO: 28992 - DNA, 903 bp, Artificial sequence
  DNA replication origin
gaaagcccacccaccttcctcacaaaggggatgctcagagtctcccaggacaccacgccgtgctccatgagctctgagaaggccctcaggctgagggccagcacctctcctaggctggaggggggacatctggggctgagcaggaccaccccaggaccagaaagacccaccatctcccccagcccacacatccctgtgctcactcgtccccatcttcaatgatggtgcctagtatctggagcccattacggctgatgacctccctggcaaagatcatgtccgaggccagcggaacaaggcgcctcagggcttcccggcgcccttcaggactgttactctgcagcccacccaagagctgctcagcctcaaggtcctggcaggaacggagcaggagcagaggtgaagaggctgggcatggtaagggtgggacctggaagtgtgcggccccgggcgtcaactaggtggcgcaaggcagggctggggcgggggcctccggggcggggggcctctggacctggagcaaaggggcagggatggggaaggcgggacgggaggggcattactggggccgtgctgaggcacaggatgctgccattcttgatctccgcgcggttctggagaagacagcagaaaaggcagcgaggtcagggagggctccgaggactgatcaactggggtgtcggtgagggcggctgggggtgaataacagatcgcgctccggtagtgggatgaagagccagagttatcggggccaggtgggttagaggggtcggaaggccgagcttggggctggggagaggggactcacattctcggtgatgtatctccggtgcccatccgcaaactgcagggcgtaacgctcagagtgcgtcaggctccacctgaggggcacgaggctcagcg

SEQ ID NO: 28993 - DNA, 1033 bp, Artificial sequence
  DNA replication origin
tgggcgtggtggcgggagcctgtagtcccagctactcgggaggctgaggcaggagaatggtgtgaacccgggaggcagagcttgcagtgagccaagatcgcaccactgcactccagcctgggcgacagagcaagactccatctcaaaaaaaaaaaaaaggggggcttagaggattttgcttcagggtggggcagcgcccaccgggtgctgcccccatctagccaccgatcgacactcaccttgcgttccacagggctggccccctgcagcaaggctgtcagcagggccatggccttggtttgcagctgctggttcatcctatggcaagaagagggctcagtggaacattcaggctccagccctgctccctgcatctggaccccagccccagaggcttacacctgtaggtgcaccagcagcctatccaggggcacctcgctcttgaccagctggcccagggctgggctgctcaaggtcacactctccagcagcccaagggccaggggaggcacggaggcatccatgaggttcatgttcacgtagcacaccacctgtaaggggcgggggtgtcaccacctcacccccatggaagaccgggtctaccactgccccactgctccactgcccccacccgctgccctaggaaagcccacccaccttcctcacaaaggggatgctcagagtctcccaggacaccacgccgtgctccatgagctctgagaaggccctcaggctgagggccagcacctctcctaggctggaggggggacatctggggctgagcaggaccaccccaggaccagaaagacccaccatctcccccagcccacacatccctgtgctcactcgtccccatcttcaatgatggtgcctagtatctggagcccattacggctgatgacctccctggcaaagatcatgtccgaggccagcggaacaaggcgcctcagggcttcccggcgcccttcaggactgttactctgcagcccacccaagagctgctcagcctcaaggtcctggcaggaacggagca

SEQ ID NO: 28994 - DNA, 1156 bp, Artificial sequence
  DNA replication origin
catctccttccaggtcttattcaacagctggatgcccacacagaagagctcgtggaagctctggtcttggccgaagaacatgggtgagaagtcctgggctgtctcagagcctggagtgggggggcaggaggggctcagggagaaagtgcatacagcccctggccctctctgcccttccgtcccctgctcttggccatgctgtgcccagtccaggccactcacagggctccccaacacggagcagctcacacagcagcaccgtcagctggatgctgccccgggcaaaggggcactcgtgcttgtcctcgcggctgctgttctccaacacaaactgggggcgcagagaatggggcaaggagtcacagctaagcccatggggaccctgcctgggggatgctgccacccccccaccctaccctgtcaccgacccggctgtacgcgctgggcgcgtttctggagaagtacaacatgttgtccagggccagcagaccggggggcacgcgctccaggtcctgtgctgggttgctgttctgggggaagtgggcacaggcagttcaagaagggccacggccgcctggaacaacagccctgggctgaggcaggggtggggagttgggtaggggtgatactcacagaaaagcccagtttgcggaactctcgggcacagagggaacggcgacggtcagcacttagcccggcacccgaggactccccctccacctcgaaggcagcctggcgtaggacctgcagctgctcccgctgctcctggggtcagtgttgggtggcgggggaggggatcaagattatagattcaaggccaagctctaagccaccccctgccttgtcctcaccaaagacacacacctggctgtaggggtccaggggcgtccgcatgcgcggctccagcagccccagcatgagagcctgcagtacgtacaggtgatgagccatctcgtcgcccattggtgctgcactgtggatgatgttctgcaggacagccagtccctggtgtaagcgagggctcacggggagggaggggcagagaggtccccctggcccaccacttcctaccttatagatgaactggcgaaggttcctctgccaaagatagtcaagcatgtgctgagggggtagaaagaaagggggcttaggctgg

SEQ ID NO: 28995 - DNA, 800 bp, Artificial sequence
  DNA replication origin
caggatggagcaccagctggttgcctatgccacctggcctggcaggggtagctagaaagggtctgttcaaggttctcaccccacaggcaggagggagctaccagagggtccaaggaaggaagaaacatggtccctgtgctggtagtgaaagttgggggtggacagggtgggccatgggggttgccacaggaaaaaggcctggactgtggctggggcaggaaggatgcaggtggcaaggcctagggtggccaccctgcctatgctcccagcccctgccaaaaaagtgaatgaggccacctcagaccacagctcacaactggaccagccagttgaccctgctaagccaatcggagttgctccctctagagctggacgcaaaacagtgagatgtaggtagagctgccagctgccagagcagttagggacggggagcaggagctaagggcagagtagaggaggctggtttgtagagagatgcacagaggggagcttcagggacacaagaacttgaggcctggaggcagcagctgagaggacacggggatgttgtactacatatctgacgtgcttggtgccaaagaggaggagtaaggccgggaagagaggcgcttggaggggaacaaggtggagagacggtttttaggttgggaatgccctggtcaaatggacaggctgaagaaataatccgctaaagagggacagactgacactgccaagacaggggtgccacccagagggacagcgctgagccctgctgacgggcctggccttggctaggaaatgaccctgctgctcctgtc

SEQ ID NO: 28996 - DNA, 1218 bp, Artificial sequence
  DNA replication origin
agtggaaggggcttgggtcattgtggatgtggggagtgagggaggattctagaatcactcccaaatttcccacttgggtgactcaatagagggtggggagagtttagaaggagcagagttggaggatgagatgatgagttcagatttgggtatgctgcatcgtgccctctggagagaggccagtcaggcacttggctcccggggtctggcgttcaggaacatcatgtggatcggaaagacagtggttggaatgatggccccatggggcaaaatgcagttggccagggtacactcggaggggcacaaagatcgtgtgcatatgtgcacgtgcacacgtgtgtgtgttcttgggtggaacaaaccatggggaacccactcatctgtggactggatctctgttctttgttgaccccaaaagagcctgaagaagagcaggctagaaggtaggaggaaagccaggggggcagagttgcagaaccccagtggagatggcatcaaggggagtggctgctggccatgcagagcaggtgacatggcagagagaacccttgtgggaggtctgaggtgaagcccccacatgttggtgaccttgctggaggggagttgttgccaggaatgcgtgatcctgtgggggccagggtggaggggtgagcaggtgaggcgaggggcaacgagtggcgggacagcaggcatgcctgtgcctgtgtgcttccaagaagcgtggctgtagaggaaggggagagaagagaggcaagaggaaggggtgcgggatgaaaggaggcttttagttgcagtttaagactctggggtgtttgtggcctctgaagaaggagcagtggaaaggcataaacatcagggttctcagaggagaaggtgcagcaggagaaggaggccaggagaagaagtcttctggaagcaaaagagcaggagaaggaggaaggttcagatgggccctgcctggaggcagctggtggacatgaacaggggaaagggagggacttcccacttgatggccatccctgagaatcctgggtgagggagggtgtatcagtagggccaggagctggagagggaggggcttggagagaagtcttggggcagggtgggaatcgagcaaggaggccatgacttcctgggcggagttctgtatccctggtacagactcagaggaggcagctggtcttgccagccctggccgggccaggagaatgggcacag

SEQ ID NO: 28997 - DNA, 853 bp, Artificial sequence
  DNA replication origin
atgttcaaagaatgagctgttctatatgtgtgtgattcgaggggatccctgacgggggtggctctggggtaggtgtgttcttctagggtcccagaatcttccaggccaagggagggagatgcggctgtgcctgaatgggggtggggtggtaggctgctgagtcactgtgtgggaagagatcaggaggaatgtgggttgccctcagctgagctggccctggacaagataccccagccctcaggccttgctgccccttctcaggcctgttcccagtaggccctggagaagatgactctgctcccagggaggggaaagtggccaggcctgcccaaggcaccctggggagggcaggcagccaggcaggaagtgggacagagaacaggctggagtgtttgtcctatgtcccaggtcccaggcgggggtgggcgggggggggggtcatccaagggccccacaggctaaactgtggggaaggagccaggtcaggctctgaggcaggcgcaagggttgctaaacagaggtaggggttgaggcaggagctggactccctttttctccaggggaccaaggccagttggaagcccttgggcagggtccagaagagggcagggctgaccaaacagcaggacaaatgttggaattgacatgcccagtaagatggagaccagaagacaccctgcctctccagaggtgggctctccctgggccaaggcatctcaagggccagagccacttaagtcaaggagactttgctgaacctgcatatctgcactgtgcaatggagggaggtgtctgggagaggtagagtgccaccctccgactcacaggagtcacctccctcaggcttctctac

SEQ ID NO: 28998 - DNA, 1600 bp, Artificial sequence
  DNA replication origin
ccccagggacactaggcccggcccaagacactgtcaagctcccttccaccaaccagggccaggagatgagtcagaggctgtggccaggagcttcctcctagtctaggaggaaatgagcaaggctttctgagatctgaaagctctttaaaaaggaagcccccaggggaactctaggggctaggctcggcccaatggggtgtgtgggtggagtcccagggagaaagcaggctggcctctgtacatccccagggaggggggtcatctgctgggatgatcagggccagtacccggggccagtacccagaggaggacagaggccacttggctgtgtcctgtcctctgctggacaactgtacataggacgaagcaatgagtaaagaaccccttcctcttatttctgccctacagcttgggacagggatgccctggtttctgggccacctcttccctctagagggccagcaagacaggcctgagtcatgtctgtgactctggggcacccacttataggactacgggaggaaccagctgttgacatttcctgcaaggaggggccctgctcccccttgctcagctctctgatgtccctgtctctgccctattctcagcccctcttcctccagccttctattctggggctgtggtcatagtttatatttgggttgagcacatcacagtgcatctgaccattcctggcagagttgctagccccagggaatcctggcttctggcattgtggtaacctagtgtgccacctccatatccctgtgggggagggaaggcagtcctcaggtactccaggtgggagaacatgaaatcggggagaccaggaaggactgcattggggatgaggaacttatattcttcaccggagctcagtagtgtcctcagctaaggagcagggaacacagggcagagcacctggtagggttgggtggggacacgggtcccatgagagggagatagaaggagtggttctgagcctctttcttgcagctgacttcccaggcttgcccccagctgggaagaggtgtgtcaaggggctgggcatggtggctcaagccttaatcccagcactttgggaggcttaggcaggcagatcacctgaggtcaggagtttgagaccaggctggccaacacggagaaaccctgtccctactaaaaatacaaaaattacctgagtatggtggcgcacacctgtaatcccagctatttggaaggctgaggcacgagaattgctagaacccgggaggtggaggttgcagtgagccaagatagccccactgtactccagcctgggagacagagccagaatccgtcttaaaaaaaaaaaaatcgggggggtggtgtcagggctaggtccaatccttgagttgcaggatgagaggaatacaatatattctctagtgccccacccttatttcaggatccggactttaggagcctggaagcgggaaccagtcttagttcagcactcctgtcttcccagcccccatcctgaatgggaggtggcctccagctgcacacgcttcttccaggcacacctcaatttgcccctctgaatagggcaagagaagcgggggctgagtcaaaactggcg

SEQ ID NO: 28999 - DNA, 932 bp, Artificial sequence
  DNA replication origin
ctttccggagccgcgccgggcccccacctgcagcctggacggggcgctgcccttgggcgcgcagatacccgcggtgcaccgcctgctgggagcgccgctcaaggtgagggaggccggagaaaggttggggcgatcgggggttcagggtgggcgccatgaaaactggtgggaggtgctccgcgggaagaggctggagcgagtgttcttctccggaaaagtcttgggctggggtcccagggtccactctgccccgcctgcgggggagtcccctctcaagttgaggggaaactgaagaggggtgccaggaacttggctccgccattctgactgcccttcgaattaggcgcacctggggaggtgctcgagttccactcgccgtcggtctgccagggtggcttccctggtcagagtgacggtagccgcttgggctgtagcggaccctggaggcggagctggggagggaccagcttccacctgcttcaggtgaggtgggggcgggaccacgaggaggggcgggcccgaggcggactactagaggtggcagaggtttcctgcggtgtcaggaagctggattggggcttgaccctgtaggtcaatgggagtatgggagtgccggccgaggagagacttcacggggtgaggggagtccccgcgaagcggtctggcccgggatccgcagagcgcaggaggctgcacgggtgtaaaagccctttgagtcaccgctcccgcccccacccccggacactcgccgcccatcggcccgcgcctgaaagtgagagggagggccggactaattttaaacagccggcctgccctactttgctgccgccccgaagcggacttgtgcacagtgcggaaagaggcccttttccagatggccagcctacctcctctcccctccctctcgccgccgtcagccccccgcaggcagc

SEQ ID NO: 29000 - DNA, 1369 bp, Artificial sequence
  DNA replication origin
ccaagacttttccggagaagaacactcgctccagcctcttcccgcggagcacctcccaccagttttcatggcgcccaccctgaacccccgatcgccccaacctttctccggcctccctcaccttgagcggcgctcccagcaggcggtgcaccgcgggtatctgcgcgcccaagggcagcgccccgtccaggctgcaggtgggggcccggcgcggctccggaaagttggcacatgcgaaggggtcggtgtcttccaggtactgcaccctcacggtcaccactgataccggctctccgtccccgcggtcttccccgcccgccatggctctgcggccggctcacgcagcgcgcctccgagtcccggccccagtgcagcttctactcaaagcacactgtagctccgcggttcgggcccggccggaccggacgcggctggaggggcggggccagacggaggcggggccgaggaagggggtggagccaagattagtccccgagtgcgcgccaggaggtaaccactgccggaggcggggccgccgctagccactcacagggcccaatgggaatcccgttagttcactggctaggagggcgggaaaaaccgagctcgcgccccaccttcgagaacgcgcagaaggcggggaggctttctttggtctggggatagtgaggctgcgttctctttgaggggtgttagggcagatggggcagaagtttctttagatagtggccggccaggtctctctcagttgagggacaagatagccctcattccttccatttgaggggtgagtccctgtggtttcctcatttagggaaagcagtgagagggggtcccttcaatttggagcaagaagtgagaataaattccacccagtttgaaggaagaggtgggatcagttccctttagttgtgggaggaagagggaaggatgcccttcagttttctgggaaaagattgggaggagtcagtttgagggggcagatagaacacgttcccctcagttttggagaaaaagtgggatgggtgcccctcagcctgaatgaaaagtggagacggtcctcctctgtttggggcgctatgagccgaatgcccctcagatttggaaaaagttgggtgcatctcgcctagtttgaagggaatcagtaggctgggttttccataggttcctgtcagcttcatcaaagagatgagacagttctctgtagtgtgactgaaagggagggccaggtgccccttggtttgggagatgaagaacagcctccctcttcgcctggcacgagctgggccagtctgggccttagggtttctgggacgttgggggcagcgttgtccgtcactgctttggggagcgtccagtgcgcgtgcgc

SEQ ID NO: 29001 - DNA, 1476 bp, Artificial sequence
  DNA replication origin
tatgtaaatatttgtttaataaaagggaaaaagtctcctagcaatgaagctgggggaaggtgttcctgaatgctctgccttttctcttgttcgaggattttctttgacttgtgaaaaggaggctctcttctcttacttccataggaaatgtcatccaaactagaaaaagaaccatgatttatggggaaaactacagtttttgctataaaccctaagacaggaactcttctgcaactcacagacttagcaaacccaatcgttggctccaaacctgaggctctttctactcttactctcattgctgctggacctctaaggtaaacatggtcatagatctctccatacttgtccctactttggtctcccacttctctccttcggggaccctatttcatcttcatctcttcatgcattaaccccagccccgagatccaagccccatcacagaaccacgctcccggaaggcatattgagttccactttccattattaatctcaggctgccacagcagagtggagagttctgttcctgcccagccccctcaccccctagcagtgtccatgtgggagaagaggggcaaattctaggctctgggtgattcctccatgaaggctgtattggtgagactggagtacaggctgtgccagcatccatggggagagagtagcaacgctcagctataattagtcacccccacagcagagccagcacaacagggagaaggaggagggtctctggtgggaggagggaccactggctgctcagaagggaggaggaaggagcagatgcaaggaaaagcagctctattcagggaaaaagaagtctgaagcacagccttcaatgctgtcaggactgaagaggtcggatgtatgaaagcatctagggtagacagcacacaggaaggccccgatacacggaagtttcttataccctgaagtgagaagaatgtggacctgaacgtgggttgggggggtacccatacacaggcacaagaaggcagcagctttaagtggggagcaggggagagctggaggaaaagtggcagtgtagtttcccaagggaatggacactcggacatggtctccagggaaggctgctttttcagaaccaggatgcctgtgttcttgggagaacaccctcccctcaatgtccccacacatcctcaccagcgacagaggtttctgggaggctagggattggtgggggagagaccagactgaagagggcctactgcaaggggaagaggggagcggagagggcaaaggagcctacagatggagttggggagagcgggggacagcccttcagaaaggcaaatcctcagagctcccaggggagaagacagggacctgggacccacaagaagcgatgcaggaactgggcgagagcccggatttgtggaatccaaacctaagtcccagcaccgtgcaagaagccagccccaatctgaggaccgaggaggtgggggtgttggg

SEQ ID NO: 29002 - DNA, 2226 bp, Artificial sequence
  DNA replication origin
tggagtttatttaggccaaaggcaagagaggtctggaagttctggggtatttgttgccctcagtatttggggtagtactgaagaggggtgtgcaaggtgaatgactgtgggtctgttgtcactagacccagtgaggcccagagccctcccctcctttttatttatttatttatttttgagacagagtctcgctttgtcacccaggctggagtgcagtggtgtgatcttgcctcactggaacccctgctttccaggttcatgtgattctcttgcctcagcctctcaagtagctgggattacaggcatgtgccaccacatctggctagtttttgtatttttagtagagatggggttttgccatgttggccaagctagtctggaactcccgacctcaggtgatctgcctgacttggccacccaaagtgctgggattttgtggcataagccacagtgcccggcccattttatttttgattgagtcatgttggcaagaaatgggaggctgagggagagttggggaagggccaggggagggaggcccattcccattttatgatctcagtggaaaaggctgctgtgagttgattctgctgccaggagagccacagagatgggccccatgagtcactgctcagtcctgcaagctcagcccacaaagcctgctgtggtcagccacccctggctggctccaggcccagctccccaatattccccactaggcctcagtgtgtcctcatttctatctgtacctttgccatcctgggccatgcaacctgtagctctcggcctcttctgtctcctttcaggctgagtctctgaatctgtctccatttgtgactctggtttccatgggatacatagatgtggagcctcaggagggcaggggtagtgtgatcagtgtcaggcgccccaaagcatttattctgtgccaggccctgtgctggatgctgaaagtacggaagtggataacatacagtctctgtttccatgaagcctacaatgcacattctctgtggagtggagaaaccagggcccagccctgcctctatctcagtatggctgtacctcccctgaatctgcctgctgtgcccagggtgccaggtcagctatagcctgtggcttgaggctcttctttgcctctggcattcacaggggtatgtgtgcccgccagcaggtcccccccggctcttagggctcctgggggacttggctggtgggtgctggtgggcagcagaaggggagggagggagcagaaggcagtgactcagtgggggtggccctgggacagaactggggaggaagccaaggttggatgatgcttcctgaagccaggagggtgggaagagaggtctggctgggagttagggatggagcaggacaactccaaggctcccctctggcagccagacctgctcatgaagaaggctcctcggtagctgcctgaaagtctggactctgggggctgggctgggctgggtggggagattgctgttggtcccactgtgcctgttgtaatccccaggttcatgaaagaggtgcctgccttagagccagggaagccgttgcacccggtgccccctctccccagggaccatgggcctgggcacactgtggggctcagggtcttctcctggtcgcagagctgaccttcccacaatcttcccacaaattctggggagtgtcgggccaggcccacatgccctaaagggacctcaaatcgcacagctacccacttgggtagctttcatcagttcaggattccctgactgcgggtgaaatgagggggcagggcaccaacacagcccgagtgctggcagcgggtgaacgtataacacagggagtcttccccagtcctcacggcaaccccaggagaaaaatgactttccatttttacaggtgaggagggtgaggctcaaagagcagagttcctggagcgcccccagcaggtaagtggagaagccaggcctgggctgggggctctggctccagaaccccacctcagcaccagcctcctgcaccggactttgtggagaagggggtaagggggtgccagggatggcaaaggggtagaggatctggtggactctggcaggcctgggtcagctccacccattggtctcactcccacccggatggcagccccatcccacgtgggatcatgcgacctgtctctgggtgcccgcggcgaggcagcaccccgcttccctacacagaaggccttcccct

SEQ ID NO: 29003 - DNA, 1916 bp, Artificial sequence
  DNA replication origin
ggggcccgggggtgcggcggggcggggctggcgggctgtccgggcccacggagaggacggcggcgggcgggggttgctgcagggcccgcaccttgtcttccgcgccggcagggctgtgccccgtcgagacctgctcgggctgtggctccgtcctccggcctccagggggcggcgcggcgctgcgcggcgccccggcggcactgccctcccttcccagcggccaggaggcggtgtcccgtgacgccgcgcggccgcgctgtagtggccgtcgaggccgccgtctgttcgaaggctgtccgacttcacggttccccgcggctcggcccgggggcgtgagtgtcgccagcgggcgacgggggggcgcgcggtaggccctgcaacaaggccagggcctgggggggccggcaggagagcgaacccgaggcatcgtggtgccatggcggggccgcccccacgggcatgggcctgcagagcgtggccgtgaggacgctgagggtgggcgcgcacggagcagaggcccacgggcgtccgacgggggacctggacagagggacacccttaacgttattccctcttcccaggcctgaattgcagttcctgtgccctggcactaagactggcacctcctgcggcccatgcccttcgcctgcattgcccactgagtcccactcgactgtcttcagcgcggttcacactgagacccagccctctcccgctggccccgagcaggcccacctttaggagggcgtgatggaaaggcccctggagaatggggatgagtccccagactctcagggccatgccaccgactggagatttgctgtgtgcagtttcagggatgcctgggaagaggaggaacctgcttcccagatgcacgttaaggacccaggtcctccaagaccaccagccggggccacccaggatgaggagctacagggcagccccttgtccaggaaattccagttacccccagctgcagatgagtcgggggatgcccagaggggcacagtagaaagctcctcagtcctgtcagaagggccaggcccctctggagtggagagtctcctatgccccatgtcctcccacctcagcttggcacagggtgagagtgacaccccaggggtagggttggtaggggacccaggtccaagcagggcgatgccatctggcttgagccctggggcattggacagcgaccctgtgggccttggagaccctttatcagaaatatcaaagctgctggaggcaggtaaggaaggctgggctagggaagtctgggaagggaatggggatgcctggagagatgagtgtcaagactttggaggtctctgaccctactcaggctgaagcccgggtccaagtaggggtctctggataggtggtccaaggcagacccaagtcatttcccttcccaagcccccagtggatccggcctccctaagcctgctgactgcctcctggcccaagacctctgttgggagctgctggccagtggtatggccaccttgccaggtagccaggcgggcctagaggcggtggaggtggagtggcccaatacggcaggagttcactgcttcctccccacagggactcgggatgtccaaggccgggcagtgctgcttctgtgtgcccacagcccagcctggcttcagtctgagtgcagcagccaggaactcatccgcctcctgctgtacctgcgaagcatccccaggtttgagggagggggttgggagactgagcctgagccagctgtgaggactgggagtcaggtactgaactgaagctcacccctttaggcccgaagtacaggcactgggactgacagtgctagttgatgcccgaatttgtgctccaagttcttccctcttctctgggctcagccaactacaagtgagtacaggattgtagctcccctc

SEQ ID NO: 29004 - DNA, 1526 bp, Artificial sequence
  DNA replication origin
tccatagcagctctcttcacttttccctgcttgtgctcctccagattgaagtgtggctgcagcaggtgggctggccagcactggaggaggctggggagccctcgctggacatgctgctccaggcccaaggctcttttcaggagctgtaccaggttgcccaggtatatgtggtcacttgttcatgccacgggtattgggatgcaatgccaggaactaggaatgcagaactgtgtgaaagcaattcaatcctttgctttcttagaccttatagtcccatagaagatatcagttgtaattaatcacagtcatatatgtgcctgtaaacccaggcaagatctctggagagaatcagtgcaggtgattctgcctgagggtataaccaagactttacccagcaggagtgtcaggcaagctttttttgggtgatttttgagctgagagttgaaagataagttgaggtcaaccaggcagaagagggttgaggatgggggcacattccaggcttggaagatagcatgtgcaaaggtcctgtggcaggatggaggacggtgtgcctgaggaatcataaggccagtgaggttgaaatgcagagcagagaggaagaaagagttgggggagttgcggtgggacaagcctggtcagtggccacatcactgggccctgtagcagtcagtgtggagtttaatcaggaaggccatgtaatcagatccatattctaggaagattgccttcgtttccgagtagacagtgacttggaggatgggcatggggagtgcagtgaagaggcaattgcagtagtctaggtgggaaatagtgcctcctctggccaggatagtggcaggggagacgggttggagaagttgatgggatttgctatgtacccatgtgggagggtaagggacaaggatgttgcaaggatgaatgggtgctgttccctgagagactaggagatgaggtcatcttgggggaagggcattcaagagtccggtcttgggcatgctcgagatggctgtgagggatgagaggagggcccttgggtcttgggcctggagctcagaggagaggtctagctggagaggatcacttggtgggtccaggtgtttggatgacatttgaagttggtcacacaagagtgcctgggagagcgagtgcactgtcctcaggatccccagtgtttaatggcctaggtgagggaaggggagcaggacgagccaccagagaagagtgaggagaatcaggagcgtggggaggagctgggggagcccagtagagagtgggctgaatgacgctgagagttggagtcagtgaggcctgagaagcgctggggacggggcagagtggagctggagagggctggtgcggagggcgagacgagacggtgaggacagatgattcctctaggaactttggctgtggagaaggggagtggatgtgggtggggagtaggagatacgggtagatgttccaccacaggacagacttgatggggacatgtcgatatgtcagcaggaagtatctgagtctgg

SEQ ID NO: 29005 - DNA, 1533 bp, Artificial sequence
  DNA replication origin
ccttctgcctcaagttatccccccgccccccagcctcaggtaccgcttctctgtggttccctcgcctctatctcaggttccccgccttccacttcagttttctttccacagcttctgaccctacgttcccagtccacaccctcccggccagaccctacccggctgctccagcgtcagcgcccccaggcggcgaatgccttcctcgtccagctcccattgctccgccatccccgcccgccgctcacctgccaccgcccgcgagaccacccggcgcacgccaggccccgcccactgccccgccccccgcgcgcgcgccgccgcgaccccgggaaccgttattggccgggtcacaagcccgcccgcccgctgctggagccgcgaccatggtacggagcccgctctggcgggggcgccaaaagcaccaaagcggcgaatgggggccgctgtggccaaggattggggctaagtggttcgagacctggctctggggcatgggagagagcgaggggcccccagccgggaaggatttggggggctggctctgaggagttagaataacgctctgtcttgagggatgaagtgttctggctctgaggatgtgggggactccggttctgagggctgggcgtgtgcccctttgacggggtggtcttcatatctcagcgctgggggatgctgactttggggcaaggcgagggtgtgtgtgaaggggagatccaaatctgaaggattggagcgtggggacagaactctaaggcatgatggggagctccagatctgaaaggttgggaatcctggctctgaggagttggggtcctgtctttagagcatgaggaagttctagctctagaaattgacttggacgggctgggcgcggtgtctcacgcctgtaatcccagcactttgggagcccgaggtgggcggatcacctgaggtcaagagttcaagaccagcctggccaacatggtgaaaccccatctctactaaaaatacaaaaattagccgggtgtggtggcacggcctgtagtcccagctactcgggaggctgaggcaggagaatcgcttgaacccgggaggtggaggttgcagtgaaccgagattgcaccactgcactccagcctgggcgacctgagtgacagagccagaccttgtctcaaaaaaaaaaaaaaaaaaaaggtaagaaatttacttggacggagcttcttcgggggagaaggatcagcgtgggaaagagagaagctctttgtaatggggtggggatgactgctttagggctaccccgtttcctgaagtcagtccggcaagaagccttttgtctttcaagcaccacaggttcccctaagcttgcctgtgactgagggctgtcgccaggctgcgatagctctgcactaaccagcccctgagtagtctttgggaaagaacagccgcatccctaacccctaccctcactccagcaggcacttaagagcccacctgtggatgggacatgtatgtaagaaggagccaggaccctcttgtcacaccctatcctta

SEQ ID NO: 29006 - DNA, 1012 bp, Artificial sequence
  DNA replication origin
ccaatccttcagatttggatctccccttcacacacaccctcgccttgccccaaagtcagcatcccccagcgctgagatatgaagaccaccccgtcaaaggggcacacgcccagccctcagaaccggagtcccccacatcctcagagccagaacacttcatccctcaagacagagcgttattctaactcctcagagccagccccccaaatccttcccggctgggggcccctcgctctctcccatgccccagagccaggtctcgaaccacttagccccaatccttggccacagcggcccccattcgccgctttggtgcttttggcgcccccgccagagcgggctccgtaccatggtcgcggctccagcagcgggcgggcgggcttgtgacccggccaataacggttcccggggtcgcggcggcgcgcgcgcggggggcggggcagtgggcggggcctggcgtgcgccgggtggtctcgcgggcggtggcaggtgagcggcgggcggggatggcggagcaatgggagctggacgaggaaggcattcgccgcctgggggcgctgacgctggagcagccgggtagggtctggccgggagggtgtggactgggaacgtagggtcagaagctgtggaaagaaaactgaagtggaaggcggggaacctgagatagaggcgagggaaccacagagaagcggtacctgaggctggggggcggggggataacttgaggcagaaggttagagggaggtggaggtggaggaactgaagtaacgggagggtgtggggcagagcccgaggaattgagagagaagaggggagtgtgaagtagggaaggagaaacaaggttaacaggggaccctgccgcaggtgacagaactgcggggggcggtggctgaccgctgtaatcccagcactttgggaggcggaggcgggtggatcacctgagcgtggccaacatggtgaaaccccgtctctactaaaatacaaaaattagcccggcgtggtggttcaagtc

SEQ ID NO: 29007 - DNA, 1036 bp, Artificial sequence
  DNA replication origin
gagggtgtggggcagagcccgaggaattgagagagaagaggggagtgtgaagtagggaaggagaaacaaggttaacaggggaccctgccgcaggtgacagaactgcggggggcggtggctgaccgctgtaatcccagcactttgggaggcggaggcgggtggatcacctgagcgtggccaacatggtgaaaccccgtctctactaaaatacaaaaattagcccggcgtggtggttcaagtctataatcccagctactcgggaggctgaggcaggagaatcgcttgaacccgggaggcggaggttgcagttagccgagatcgcaccactgcactgcagcctgggcgacagagcgagactccatctcaaaaataataataataaataaaataaataaataataaaatgtctattagacatccaagtgtaaggtacctagtaggcagttggatatatgggtctggacctcagaggagaggtcagggttagagatgaaaattttggagacattagcaataggtggtatttaaagctacgggagtggatgaactcagctaaggagagaatgtcgatggagaagtgaaagaaagcttaagactcaaccttggaatatttcagtgtttagaggttgtatagaggaagaatgtggtatcttggaatttgagaaggggtagtgtatcgagcaagcaatggccaactgtgccaaatgctattgacaggctgagcaacttaaatgcagagtgtctgttagatttagcaacatggaacttactggtgaccttgacagagggagttttgggagggtggggaggagggaaaccagattggagtgggatgaaaaagggaaatgatatttgaggggaagagacagtgaaagtaagaacttttgctgaaaattttagctgtaaaagagactgcagaaatagatggtagctgaagcgtatgatgtgcagtcaagaacagaacaggaaggatatactagagcatgtcggtagtctaatgattaatttggtagaggggggaaatatgtaatattta

SEQ ID NO: 29008 - DNA, 1471 bp, Artificial sequence
  DNA replication origin
ttcaggagcagccgcgaggtagaagcccataggagacccagatgcccgccaccccaatcagtatcctgcacgatgagggttggggggagcagcctggaaagggtcccaacctccggcggtcccagccgaggagccagctgagcggccctgccctggccccaagcattccacctcgcagcccccacctcctggtccggctgattgatgactccagctgtcccagtgggagcgggacgggtggctccagttcacgggtgtggccactccatccatggcctgcagacccatggggctgcggcctgcaacccagcgccacctgaccgcgctgagatgaccaagaatccatctttccacggacaggagtgagcactgcacgcaggatccgcccagtgcttgggccaagcaccctgtggcatccaagctcccctggacgttacccttggtgaaccaagtgcgggtcttggggtccctggtgggaggttgcacccagggaaagggaaggggagtgcagcgtggactggggttatggtccctgtaacgtaggaaccaccggtgctcacagtcccagaaactgccacttagggatgggagtgtggtcactggcgaggagtttttggtggaagatggggcagccgggcagagcccaggccgtggtcactggaagccctagtgtaaaaggcagagctagaagatggttgctgagaccgagggtgtggtcaggaggtggcagtggaggagggggatgtggtggggaggtctctacgcaggggatctccgcatagtacctgggagtcttataatgttagtgtgtggatgtggactggggccttcagtgcaggctgagggtgtggccagagggctgagggtgtgtggacaaaggggtgctgagggtcagggcgccttgataaagggctgcgggtattggagggggtgagtggctgaggctatggtcaggggtctcaggaagggatgcaggtttgtggccaggggcctcagccccagggctgcgggtgtggggatggagaaggctgctgtgtaggctcagggtgtggccaggggtctgcagcggagggctgtgggtgtggggggcactttagtgctggactgtgggtattactggggttggcgcaggcttgttagtatatatgtgggggctggtggccgagggctgtggctgtgggtgtgaagatggaggatggagggctgaaggtatggccaggggtacaaggcccagggggtggcaggccagggctgagtgcacagggtcgctgggaatgtgggctggtgtggccaagttcagggcgtggccaggggaggtctgaggtgtagacatgatgaagtgtgtttcagccacagccccacttgccagcacgactcttggggttcgtaactctacagcccccacgctactagcccccaacctcctgctcccccaaaactccacagtgggaggttacagcaccagtcggtg

SEQ ID NO: 29009 - DNA, 1336 bp, Artificial sequence
  DNA replication origin
ttcttttggcgatgtggggccctcaggctcccccgtgtctctgcagaaaaagaggaagaggcgcgtgtataaagtgcgaacgtctgagacctcggatccggcgtcgggtgagcgcctctccctgtccgggtcctgctctgggaactcgagggaggggaaggcagagccacaagcgagccgcagccactgggctcatgttcccttcccttgcgcagggcctagggcccccagccgccgctccagctcgtcgacggattccgcggacgccagccctgtgcacgccgctggccctgccggcgcctaccactcggcgtcggcagagtccgtggacgagattccagtggcgcagacgcgcctgggcagcgccgctctggccgccccgcggggccggggccgacagcccacgctggcgcggcaggcgcgtgcgcccgccgttttcgtgagcccgagcagcggcgagcccagggcgccgggcggccgggaggctggtctggcttagctgggccgagaggccggagggccgagttagagcggccggcctgactctctatgcaacaccccatccttgccgcaccgagtgcactttaggggcccctacggccggcgggatcggcctccctcccccacgactcagcaatacccgccccaccggctgtgatgctccaataaacttttttatgcttttgcggacgtcgcgcttactttcttaatggcaggggccacgggccatccagaagcccgaccctggccagtggaccgggggcggggaggaggtccctgtatagtaggtagccacccaggctgccctgtggaggtgctcacgtgcggctcgtggttaggaaaggccttagaaggcggcctggaggaggttatttttcttaaagatgggctttgcactgggaggccgagagaaagcaggctttgggctccgaaagcagcagtgggcgctgaggctgcgaggccgtggggaggtggcggcgaaaggagggggccgagccaggaggtcccgcagcttttccccggcagcagggctgccgtcgaatgccagcatcctggggctgggcgagcgcgattcgctcgtagggagtcccctcccttcttccccactgctccaggctctgaatcctacccaagagagcacgggagttgtggcctgggggtgccatccgttcagtggatggcagtgctcttgagtcaaccgtatacccctgtcactgagggagagctccttcccgattccccaagccccaccaatgccccgcgcagctccccagtggcctctggttgactctctggggagctggatctcttctggagattggggccgcttagagct

SEQ ID NO: 29010 - DNA, 1905 bp, Artificial sequence
  DNA replication origin
tctggatggcccgtggcccctgccattaagaaagtaagcgcgacgtccgcaaaagcataaaaaagtttattggagcatcacagccggtggggcgggtattgctgagtcgtgggggagggaggccgatcccgccggccgtaggggcccctaaagtgcactcggtgcggcaaggatggggtgttgcatagagagtcaggccggccgctctaactcggccctccggcctctcggcccagctaagccagaccagcctcccggccgcccggcgccctgggctcgccgctgctcgggctcacgaaaacggcgggcgcacgcgcctgccgcgccagcgtgggctgtcggccccggccccgcggggcggccagagcggcgctgcccaggcgcgtctgcgccactggaatctcgtccacggactctgccgacgccgagtggtaggcgccggcagggccagcggcgtgcacagggctggcgtccgcggaatccgtcgacgagctggagcggcggctgggggccctaggccctgcgcaagggaagggaacatgagcccagtggctgcggctcgcttgtggctctgccttcccctccctcgagttcccagagcaggacccggacagggagaggcgctcacccgacgccggatccgaggtctcagacgttcgcactttatacacgcgcctcttcctctttttctgcagagacacgggggagcctgagggccccacatcgccaaaagaagcagaggcgagcgccagggtagaggcttctttctatcccactccacctggaccggaggcccagcacagtccctcctacctggggtcggatccggggaggcagggcgagagtgtctggggaagagggtggtggaggttccgcttggccacgggtggcaagaaactgggagggactgagggggaagcaggagggtaagcctggggcctgttccccaaatccctccccactggaggtgctgagagaagcttcccttcctgttagctcagagaagggcctgacccatgccccgaccttagcctacccccttctcctgcctcgatggccctgccatgctaactggagatgcccagtggcacatgcccaggttgcactcacttggcattcactgctgctggcccggcctggccagggggctctgggcgcatatgtctgaaggtccgcatgtagaactccatctcctggggaaggtggaagtcaaggaggctgggaggccaggtgtggctcccgagcctgctgagccctaagcccacgcagtcctgccctcattggcctctgtgggatatctcaggcctcatgccaggctcccagccatgctgggaaaaccccatctgtagggtaaggcttaaaacacccatttctggcccttgccccatccccaggtccttacctcatctattcagcctctgcctcctgcaggaaggctcccagcccccatgggtctataggcccagtttagagaggctcagccagggagtggtgggaagctcagagctgcccgcacctgctcctggtgtccccagggatccagcctctgaaccaattgttttcccctggctgagaaacaggcctgagtgtgcatccaccagctcccgcagagctgagtcctgggcacacccctcgccctcacagaggaccagccacgatccaggctgccgagaaggggctgcgtaaatgcacatgcggtggtctccctgccactacaccaaaagggaaggtagcaggtggtggaacaaacagagccgcagccccactgagcaccaggcttatgggcaagccctgatcttcacagcaaccctgagggtgcagacgcgacccctgagagcaaaggggccttgaggccagggggttgcaggagtggcctagtcctgcacccccgcccgcaggactcgc

SEQ ID NO: 29011 - DNA, 1240 bp, Artificial sequence
  DNA replication origin
gggggttgcaggagtggcctagtcctgcacccccgcccgcaggactcgccccagctttgcccagaaggactccaggtgaggaaacaaaagcctggggaaagcaggcccgggaagggcgtggtgcgagatgggggcgggtcccgggcggggtgggagccgggaggggttgccgggagcacccggacagctgtcgccagttcagcagccgtttccatggagacggaggcgtcctgactaatgcagagaggacactgtaacagcaaggccgtctctaaaacaagcctatgtttgggggcaacggctccagagaggggcccctcccgcattcctgctggggtgggggtgggtggctgcctgcagggccctgacagatctgggggaggagcccagccagcggccccgcccaacctctgccctggctgctgctctggagaggggtgtgggggcgccagcctgggccgaggagcgcggggtcaggggtcagaggccagtcacagggactggaaacctcaagatcactctcccccacacctcttttctgccccagtgtggactcagtgaccctctagggccagcagaggggcaaagcccactggggggccctgggctccagaggggggagcagaggaggggccagcagtagaggaggtctcagaagctgaggggcctggatgggaaaggcgccaggccctagccagctcaagaagtctgaaagcgtccccagtgagtccccactcagagccctgtcctctctcgccatggctgtccagaggatactgtctcagagaccttcaaaaccgtgtacattcctgaatggtactgggccctcagcctcagctctctgctttgtaaaagaggacaagaacaccactcctgtcccccgggtttgcctccctcaagtcactgcagatggacagaacagaaattaaatgtcttcgctgtggccacatttggccccaaagccttggcagcgcagggccaaagagcccgccctgcttcagtgggtgctgcctatgaggcttgagaaagtctcctgcctacttctctgggcctccgtctcctcttgatgtggggctggaaacagtaccctctccccagcacagctgccaccatcagagcccagcactggggcaggtatacggtggtgtaacagtggagtcgccacccacagccagcatgccccaggcccaggcctgcccagtcctggcagcctggcccacaagtagtgtccagccctggt

SEQ ID NO: 29012 - DNA, 2092 bp, Artificial sequence
  DNA replication origin
gcagggccaaagagcccgccctgcttcagtgggtgctgcctatgaggcttgagaaagtctcctgcctacttctctgggcctccgtctcctcttgatgtggggctggaaacagtaccctctccccagcacagctgccaccatcagagcccagcactggggcaggtatacggtggtgtaacagtggagtcgccacccacagccagcatgccccaggcccaggcctgcccagtcctggcagcctggcccacaagtagtgtccagccctggtgacaagaacagaagaggtggggtcctaggccctccccaacccacccaccagcctctgtttgtgtccagttgccatgaggcctcgggatccagggctcagccttcccccagcaaagcctgcccgggccccgccttcctagtccctaggggctcctttgacgactggatcacccccaccccagcggctgacctcaggaagccatggggcgtgggaatggggataggctggtcagccactggcctggccaggccggccagagcgtagagaccttaactcttcccagacccagcttgtggttaaccttctaggcctcagtaggcacatctgcagaagaggctgttctaagcataaattagggtaatgggtataagcgctcaaggtcatggatgaggagaagtgatggctccatcctggccacccatcactgaccccgtcgctggtccatccctctctctcctgctgcagccccaacctgcttgcttccaggctcccacatcccatgccctcccgcgcatgcttggcgcctgggcaggtgtgtacgtggggtccgggaaacacagggctccctctggctgtgcccacgcttgggcgagcaggcacacgctcagcacaagcccggtccctgctgcccccagcggctgttccaggcttgcctcccttgccctgtctcctcactggctgctcgctgcacagcccaacaccccccacacccaggccccctcccacccttcatcctctatacctgaatgggccgcatcttgggaggacatgactcgagctccctgtgaacccccttggcctcctgtggtgggcggtgctgcacgatgtactcataggtggtgagcttgtgccacactggtggggggaggagagggctcagtgcggtggaagggggactctggagctcagaacaggagggaggacaaccagccccaggctgaaaccagtgtccccaaatacacgaagccatcaggtgagacctggccaccatagtgagcccatactaggcaggggcatggtttcagggtccaccgtccaactgggcaccttcctgcaatctgaggacccctgcgttccagaaggcaggtgcaggaggcacttactgagataaatgtggaagcagagcaggtgccccaggagggctgtggacaggaggcccagaaggatgagcagggcggccagggccaggatggcaggggcctgggtctccacgggggcggcaggcaggaacacgaaccacacatccgtgtgattcttcaggactgcaaggcacaggcagtgtgtgctcagccggggacgtgacgggtgaccagggttgggggtgagaataggcccggagcctaaactgaccttcaaagtgtcggttggtgcgcagacgcatggggttgacaaagaactccacgaagacatatgtggccaccagcaccaggagcaggacgcccagtaaagcggatgcaacactgtgtagaaagagcctgggcccagccatgggtcgctgtcagctccccggagctccagcctcagaaggcccataggagttggggctgtagggtcattgctatgggctcagagggctgagggtgaccccacagccccaactcctcagaagccaaaggcatacggcaaaactgaagatgggtggccaccccatcaggcagcccacatttctctgggccagcttggtggaagattccaggcccacccttggccatctcagccggcacccaggagcatcactctctctgggcagcacccccgcataaaacgggcacaggtcctcgaagcatccccatccccgcccgcctgccatgcgagctgcaaggt

SEQ ID NO: 29013 - DNA, 1668 bp, Artificial sequence
  DNA replication origin
cggggctttccttcacttctctcccggcaccccccgcagggcaggtgctccccccccgccccgccccctcgaccagattcgatttggaaaaagccggaacaaagtcccaaagttgctgcgctcgaggagccgcctggctgcgggcggtgcttgggagagggcccgtcggtccagcccgggtgcccggcctcagctctccgccgcgcccccacccacacgcccggggccgccaagccgccgcgctcaggtgagcacatgccactcacgcttgttcgggacacctgaggacacgcacaaccggcatcccggtgccctttgctgatcgcaccaccgcggccgccaagcctgcaggaacaccgcgaggaaccagccggtgctcacccggtctccgctgccgctgccgctgccgcccgcgcccgtacacgcgccgcactcccacgtggtcggctgcgccaggtccctggcgcacacaccctaaggcgcgctcacccctgagcagctcgcggccacaaaacctgcctgggacaggggctggcgggggaacaggacgaccgctcccggttcttggagtctctgccccgtctttccctttccttccagggcttaaacctggggacgcacaaccccacttcctgcctcacaaatgtatgtgtgtgggggtcagtggagggtggggtgtcagaggaagcacctaggtctcccattacttatggcccacccccgccaaccccaagagccaggccagagggacgtcggtgaaggcagcctctaggacagggtggtccctgccttgctcccctgaacccccagggggtaaaataagtggtatgagtgtgggtggatttttctgcctgcgtgtgtgaaggtctccatgcttgtgtgtggcccagtggccccccaccctgcccacccccgtgtctggcaccctgtgcctagcatccatgccagggctctgccaggcactgggagttggtgccagtacctggctgcaggcttgatgctgagagcagtaggtgtagccctcgacagaggggtccctgcttcccgtgggcttccaggccgtgctcagtgcctcatccctgccctcccaagatcctgggaggttgtggactccctgtcacacttcctagccctgttgctcattctctcttaggtgcccaggctctgccagggtttcagggcaatgcctcctccaaagccctctctgccaccagacacagccccctggtgagccagggaaatctcaggggaggctgggagccagacccacctaaagggagagtctctgggtggaggaccaatttgccctgagccactcctgtgcctccacctatccctcctcctaaggacagatgacaggcaagccccagacctgggaggcaggacttgaatgaggagggtgtgtgtgcctgaccttgggtacatgaccttgtgtgcctgtgtttgtaagcacttgtgtccatgggactctgtggcttgtccaggccatttggttgtgtcactccctatgccatgaccctgtgtgtgcaagtgagtacatttgtgtgcattgtgtgtgtttctggtaactctctgtccttcggtctgggtcatcctgcctctagaaactcagggaaacattccttttccaaagtcactgattcctgttgcggtgaatgtatggcccag

SEQ ID NO: 29014 - DNA, 956 bp, Artificial sequence
  DNA replication origin
tcccccgcccccggggctcttcataagctcggcccgagggcgagcagagaaagcgagtgtccctctcgcgccccaggccggtgtacccccgcactccgcgccccggcctagaagctctctctccccgctccccggcccggcccccgccccgccccgccccagcccgctgggccgccatggagcgctggccttggccgtcgggcggcgcctggctgctcgtggctgcccgcgcgctgctgcagctgctgcgctcagacctgcgtctgggccgcccgctgctggcggcgctggcgctgctggccgcgctcgactggctgtgccagcgcctgctgcccccgccggccgcactcgccgtgctggccgccgccggctggatcgcgttgtcccgcctggcgcgcccgcagcgcctgccggtggccactcgcgcggtgctcatcaccggtgagtgcgcgggtcgcggagcgcggggactccaggctcgagggcgggactggacactcaacaggactgactccccatgggcacagccaaggcgggctcctcagcgcaagagtgggagagttctccacccctgggtgcagggagcgagccaaatagggagcgccgggcacctccccaagcccgggttcactacctgccgctgcggggagtgttggagggaaagtgagacagggagtgggccggttcgagaaggaaactgactggtggctgagaagagggaacctcctggagtttgagagtttatgccattcccttccccaagagagcagtctcaggggacttcggaggccttgagaagggaggatcgttaccccttgaactctgcctgacatccccacctaagatacccatctcccattcctcgggccagagggaagagcttagatggggaacttccccaccccacccatcccccactggctgggatccttggagttcagaaaagctagaggtca

SEQ ID NO: 29015 - DNA, 1376 bp, Artificial sequence
  DNA replication origin
cccaagagagcagtctcaggggacttcggaggccttgagaagggaggatcgttaccccttgaactctgcctgacatccccacctaagatacccatctcccattcctcgggccagagggaagagcttagatggggaacttccccaccccacccatcccccactggctgggatccttggagttcagaaaagctagaggtcaccgtgaggggcagctggacattcagctgtctttctgtctagccacccactgccaaactgctgaggcagtagtttggagcctacacccagcaccccacccccaagccctcctggtcctctgtgcccaggaaggagctcttagagagctgggctcaggtgcctctggccgcctagctgagctcctttgtctggagcagggaataaatctgtcaccagagggagggaaggggaaggggggggggggctggaggcccgccggaagtggggagggggagaaaggccagggggcactgactccattgcatcgtgggaggagcagcctggtctctcgccaatacccacggctttggacaggtgctccaggctttgtccttgcgctgggcctttgctggggcagccagcaacctggcttctcagagacctcggtctagtaggggccctgtgtgatcagatggggctgggagaattttccggaggaggaaatccttgagtggggccttggagcatgagtggagataagtggagtatgaaagggatctcggatcagagaaaggatgtgggacaaaggcttaaggcaggagtacacacggtctctgtaggggacagccagtctgggtgtgggggtggggagaaggggatatgaggtggtttccttgggaggggccatgaatcaggtaagaagccagactgctgaggcagagtaggggggaaggaggcacaagggccttgcactccagcaaagatggtagagatggggaagcattcgggctggacaggagagacccaggttccaggcgcagtgtgaagcctcagcagaccccagtttcagaggtttgaggaaggaaaatcaacagacaccccgggtatgaagtaggggccaggttgtgggctctgcctctggggacagggcagatcccttcctgctttatttgtgagccacctcaacaggacccaggccatctgcaggtactagtggcctagctgggtagtctttcctgaggtctcacctcaggcctttgtgctgctgctgttgcttctggccttgagcctgagagagaggtgagaggaaggatgctttctctaacttgggctcctccaatctctggttgcaaagctggggttgggggagagaggaccacccaacctgccctgtacaagcatcagtaagactccaagtt

SEQ ID NO: 29016 - DNA, 900 bp, Artificial sequence
  DNA replication origin
gatcccttcctgctttatttgtgagccacctcaacaggacccaggccatctgcaggtactagtggcctagctgggtagtctttcctgaggtctcacctcaggcctttgtgctgctgctgttgcttctggccttgagcctgagagagaggtgagaggaaggatgctttctctaacttgggctcctccaatctctggttgcaaagctggggttgggggagagaggaccacccaacctgccctgtacaagcatcagtaagactccaagtttcccagggcccgaacacttgggggttgtctctcaacacccggctggaagacaagtaggtaaccaggttcagccccacctgccaagaacactgtgttttgggcctggcagagctgctactccccctctccctcctaagaatgcccagagaatcacttgccaaggctactcctggagctcagctgtgggatcagggtttgggctgaggatcaggtgcctgtgtgcacacatgtgcacatgtgtgtgccaatgggtggtagggattgagcccgttgtgagaacatccagccaggttggaagtgtgtacaggtatctgagggtgtgcacgtgagcaagagggtgtgcaagatgtgggtgactgttgggaccacagagctgaggcctgtggtcagctcaggtcagaactgggaggtctgtttcccttgggaggacctgtctgctctgagggggacccggacaagtgcacatatgcatgtgtgtgtctacacacacacacacacacacacacacacacacacacacacatatgcttgcctccctctccaaggcagacttgcctgggaagtacccctcctcagcaggagctcgaagacccctgcccagtgctgttttcagtagagggagtggagctgaga

SEQ ID NO: 29017 - DNA, 799 bp, Artificial sequence
  DNA replication origin
tgccaggagggtgtttgggctcatgaaacagtggagaggcgcagaggctcactgggaaaccttggcctcaccgggcctggattgggcatcggcagtgggcatgaagtgggggtgggattctttaggccagggtccaggacacttgggggatcgtaatgctgggggttttcggggaggaaccaagggctcacggagcctcctgtgctgcagtggctgggccataggtgcacatggctcaccgagccactgctggggaagggccggggctcaggtttgggtcctgggctgcgtcctgtggtggggtagtgccaggctggccaggctgcagtgctcgaggcagacagtgactgatgaagaaggcctgcaggaagcggcgccgcaggccttcaggcaggtagtagtggatgaagtacatgagccccaggccctggccggggtaatagcggcggcggggccgagctgccagcagcgcatctgtgatggcatctacaactggggtgaggtcggacatggccaggcgtagcgagtgcaggaactgcccatgcaagtgctcgatgtagtccttgccgtaggcctgcagcagctcttgaggcaggttggccagcagcaattgcttgcgcttttcccactgacccacgtttctcactgactctggggaaggagtggcaaggtcagagtgggatcagctaggggagccaaagccaattaggactgtttaacccgcgccaggtctgcagccaaaactacacccccaaccaaaaccatgaccattcatcaaacctgacctgcccccataaga

SEQ ID NO: 29018 - DNA, 938 bp, Artificial sequence
  DNA replication origin
tgcctcccgggttcaagcgattctcatgcctcagcctcccgagtagctggggttacaggcacgcgccaccatgcccggctaatttttgtatttttagtagagacagggtttcaccatgttggccaggctggtctcgaactcctgacctcaggtgatccacctgcctcggcctcccaaagtactggcttgtttaatcagggacagagggatgacatagtcccgcagtgggagatggagggtaaaggaggtgcacataggcctgagatgttccatagccactgcaaatggatggcaggcatggattgagcatgtgctatgcgcctggcatcattctggatgctggggacacagtgacagaccagttcagcaaggcccctgctctcaagtttacactctgccaaaggagactgacaataaatgagttaacatataaacaagatgatttcagagagagggagagaggagagctgtgaagaagccaaaccaggtaatgtggtttggagtggtggggctgaggggctgctttcgtcaggttggtcagggaaggcctctttgaggcagtgacattggagctgagacttgagtgacaggaaagaaacagtcactgaacaacccagaggaagagtgtcccaggcagagggaacagcaaaggcggggggttggggggctgggaggtgagaatgagctagtggtagttgagccatgtgggctagaggagaggtcaggaggtgaggtctgagaggtgagtggggtgagggcggggtagggagtgagggttttatatctgaacatggaaaggcactcaatataataagcatggtggaggccggatgcagtggctcatgcctgtaatcccaacactttgggtggctgaggcgggcagatcatgaggtcaagagatcgagaccatcctggccaatatggtgaaaccccgtctc

SEQ ID NO: 29019 - DNA, 862 bp, Artificial sequence
  DNA replication origin
ggagctgcaggctgggagtgtagtggaagccagatcacaggggccgcagaataagtgcaagataaggaggtgaggtcatctgaggccagatctcctgggccttggaggccctaccacatagtatggactatcttctggagtgggtgggcatggtagggggagggaattaattcaaaagatgttaaggagaaagaagcaagaggactgggcagctaaaggaaggtgagggcaggagagggggatgccaagggctcatgcatttacacgttcagttacttgctcattcaacaaatatttcttgaactcccactatgagccaggcaccttgatgataaggacttctgtggttcctacccgcacactacttagagacaacacagtcaggcagggtcaggcccatgagcacacatggtgtgcacactgctgcctggccatggtgagcagtatgaaaggagtcaataggaggctggaacagagggtgtctgcagagaaagtactcagaagatgcctggctgagaggtgactttaggggtgggcagaggccaattggtgccagctttgagaactccagaaaaccccagtctctagctcaggtggatgcctgggtagacagtggtgctttgtagggatggggacaatgctgaggactggtgagtcaaccagaaagcagccaggggctctgaaacaggagagggctctgggcacagagggaagtttgggatggtcagcagtgaatggatgggagccctgagactggatgatattttagggtagggtgaataaagagaagaactcagcccctggaagtcatgcccaggtttaaggacttcagagaaaagggcactgaccggcccagtggctc

SEQ ID NO: 29020 - DNA, 1287 bp, Artificial sequence
  DNA replication origin
aggaaggcagcagcgccaggctctgcaggcccggaggcggcggcttttgtgggagaagctgcgttctccacgcccggggggaggggaggaaagacaaggcgcggccggggtccgggagatggggtgaggcgggacagagccgcagatcccggacccaccgggcggcgccggcgggggggcaccagaacctccgcgcctgctccccgcccggcctgcagccccggaaacggcgcgggacactcacatggctgcgctgggctgcgcggacctcgcgctgtccttgcgctcggaggtgcccggcctggtcgcgccgcagctgccgctgtcgccgccgcaggcgccggcccctccctccgcccgccgccccgccgcccctcccctggcccgccgggccccaccccctgcgctcccgcggctcccgcacccctagaggcgcccacggctcgctccgccctctcggataacggggcaggccggtggcccacgcagcccaccagcttgcagggagggcagaccctgggggatgtgagggaggctttctcacgcagaccctaaaacggtgagcgccagggagccccgcctgcttgtcccctccccagatccctcgggctctggagaccttgcgggccccctgtccgtgaccacctgaaacaggtcctggagctgctactgctggcttaggctggttggtggaaaggatccagggctgttgtgaaggccttggggagtccagaagccgcctggcaccttctgggtccagacgctgcccttcagccctgccatttcagccagcctcagcgtcgctgtagaggcaggccgccctttctgccactgtctggctggtaagtccaggctcatagccgggtcatgcattccccactcattgggtactggttttcgggcagtcttggggtggggacgctggcagggtccgggtacagggccatgtgttgggcaacccagtcctttccaaagccggggctagaatgctggccctccacacagtcggtaaaggtggggctgagagtcgaccccatgttggggtcaaagggccagttccactcccccgctcctcccatcaatcagacacccctggcccttccaacctggacacccctgaggcttctccaggccttgcactcccgcagccctcatgtatgtcagacctacccaggaatggtttcagggacagtaagaggtccctgaatatctgtaccccgcccccaccagtcctgagggctgtttttttgtgtgttttgcttgtttgcttggttttgtttggtcggg

SEQ ID NO: 29021 - DNA, 1180 bp, Artificial sequence
  DNA replication origin
gcggggagcaggcgcggaggttctggtgcccccccgccggcgccgcccggtgggtccgggatctgcggctctgtcccgcctcaccccatctcccggaccccggccgcgccttgtctttcctcccctccccccgggcgtggagaacgcagcttctcccacaaaagccgccgcctccgggcctgcagagcctggcgctgctgccttcctcccacggcaaggccctggcggccggtgccccggggcgctgggatgggccaggccagagagcgggctcaaggcgccagcctgggccctggcacgcgcgctccctgggagcccttgctgccttcgccgcaggggaggctgggctggaaatggggagggggcgacgaagggtgcgggccggcctaggagctgagctaatcctcctagctctaggggccggcctaagcggctttgtggccggccccgaggtgaccgagcctgggctggagccgggctctccgcccaaacctggcgtagccgaagccggagaggatcgtccttgtcggggaacggagcttttccctggaaatggaggttggcgcaaggttcctgcaacagccgggcctgggctctctgcagaactggtttgggcaaggggctgctcaccagggctagaggtcggattcagtccagattcagcaccctttgtcctcctctccagggtgagccctgagtccggcctcccctacagaccctccccagccagttctaacgtgtgtccaggctggccgccccagcacctactgtgcgcagcctcgtgtaacaatacttgtgccctggctgcagtctgcggggccgcgccctgggcctgccgcattcggccaacgcacagcatctgaggagggttatgaccatctggcagatgcagaaacaggcccagagaggttagtagtattctcaaggtcacacagctggtttgggagaagcgaggattagatctgagtccttgcccctgcgacacccacctccgtggtattggagggaggagaggaatgataattgggggctgaggtacaaaatactccagcgggacaaggaggactggcatagctccttcttccaccgccctctccggcttgggtcctgtgactgcggcgggagagaggagcaaggtgagccgccccaggggtctgggtttgggtgcgggtgaggggag

SEQ ID NO: 29022 - DNA, 1971 bp, Artificial sequence
  DNA replication origin
ccctgcgacacccacctccgtggtattggagggaggagaggaatgataattgggggctgaggtacaaaatactccagcgggacaaggaggactggcatagctccttcttccaccgccctctccggcttgggtcctgtgactgcggcgggagagaggagcaaggtgagccgccccaggggtctgggtttgggtgcgggtgaggggaggactcaggactctgggctgggtcccgcttgagagaagcgggcggggagggcgcgggtgagtcacggcggcccctctgcgtcgccgctcggactcagccctggccaggcccggcccgggggaggccgcctggctcccagcgcgcggccagggaatgtaaccagctgaccagggagggggccggcaggaagtgaggccacccgacagcctccgcccggttccggggtggggggtccggggctgtgccgctccccctccctcctatacgcttgggcagctgcgagatgacgtcagccgccgggtttgggggcagttgccatggagacaaggacaggctcagaagggacccccttctcccttgcagccgccccttgcccaggttatttttagcctctgtttacctcggtcggggcggccccggggtggggcggggctagacccggggactcccagagaggcagctggcctggcacagtgctgagatgggcagcccaggtggtgggatattccgccgcacccgggtgtgccagtcttggtgtgtaggaagtatagcggggctgcaagatctggggccatgcggacaggtcagggctcctccactcacggccatcctgacctggctgtgctgcaagccccataacctttggaaccttggatctgggttatttcccatcctgggaacagactatagggctgacatgagcccagagagtcccctggttcttatcagccagtcccccaccagttgaggtggcccttctgccttagctcaaggggttcagctctttccctacctgctctcacccagcaagggcaatcttgcccgcccatctcccgaagcggtcactcagatggacattatgatggtcatttgtaccaacagttagacatcctagttcctatgggactcgggggatggtggcagcagagggccaaccagagagagaaaagtgatggaacagtcagcggtttccaagtccagaatcccaggggatccccaccctgcaccatcccagggagcagagccccacttgctgatggtatacgataccatcagccagtgggaagggagagggaggattgcatgtcgggtaggggagttggggtggacatagacttaaaatcctccccaccaacaaacagctcaggacctgctgttcctgtgtctaggcagcccagcttcccccactgttcccccccttcatctcccaggtgctacaggacccccagagcgctgtggtgagccaagcagatatgccccaggtctcacaaggttcagtctggtgggaagacaggccctaaaggagaactgacaactgggttatgtggtctcggggttcagagggaggaagtcaaaaagggggaaccaacccagggcctgcttcctggaggaagaagtcatagggtagacttgaggaaggagagggacttggggctgagtagtgggaagaaggaataggagcgatgggggctgccggtcagattctgaagaaccttgcaggtattgagagagggtctcagttgctggaacagagaaagcaggggactgggaggagaggagtggttgaaagaatgtgagggacaggacaaatcctgaagggcctacgtgggtcatgttagagagtctgggctttctccctgggacaagagtggctgtggctatttcacatcagtctgaatagagtgatattaaagatttagagtcctggggtcagacagcctgggtttgaatcatggtcttgacacttaccacctgtgtgactgttt

SEQ ID NO: 29023 - DNA, 1218 bp, Artificial sequence
  DNA replication origin
agcagctctctgcagcctctgcgtcccaggttcaagcgatcctcctgcctcagccgcccaggtagctggcactacaggcgtgcacgaccaagcccagctaatttttgtatttttagcagagatggggtttcaccatgttggccaagctggtctcgaactcctgacctcaagtgatccacccacctctgcctcccaaagtgttgggattataggcatgaaccaccacacccagcccgtttttatttttcatgtgggagtgacttgagcttgtctgagacttgtggagaaagtctgaaacaccccaaaaggagaaagatgactagggtcacacttgaggatttgccaggtgggcagtgagggcctggccaaggttgaggattgctctgtgattccagccaggctgctgtgccaagacctctggcaactcctgccaacctgtgtgcaggtgtagagaagtccaggagttggattccccagggctggtttctgccagctgggagagaggtgcgcagtgctgaggatacttgcagcaggcaagtgatgggatggtggctgtggatccaggctggggaggaggctgtgcagggaaggtacagaagagaaggtaggagggagctagcagaaaaaaagaaagcagaggcggactgtgagctctgcacagggtggtgtctgtgaaattctgggctgtatctccagtgactggcacatgcttggcacaaggttgccactcagtgaataggtgaataaatgggtgagggctcaaggggccagaggtctcaggtaaaaggcaggtgaggtgggggtgatggaaagcctgagggttgcatcagtgtggttgtggtttaggaggggggcattccaaaggcaggtgataaggctggggatggctgaagggaccagagaggccagcgataggcaggcaatccatgggaatgcacaggtcaccagtgtagggtgcagggtacccaggcttcgccttcaaggaggaggggagaataacatatctcaaactgaggtccctggacctcttgcatctgaatctgtcggggggagggggaacttgtggaaatgcagacccctgggcccaacccagccttttggggagaaagtaagcacagtatgggagaactgagcctcaaggagcaagagtgtttatgggatgggggagcatccagcccctccaaggtcaagggagggatgggcatggtggcatctatc

SEQ ID NO: 29024 - DNA, 1183 bp, Artificial sequence
  DNA replication origin
ccacttcgagccgcccggctgggctccgggctcgctcccagcggctctggctcggcttcggctcctcccggcgccgccccccgcccagttcctgccgcctgactcagcccgcctggatggggcgggaccggtgactggggttcccctcggggaggggaccgacggggggcgaggggtctgctcagctggggtcagcaatgtgcgtaaagggatttgagcatggggatgaatatgaagggatagaatggagacgctaagtggaggaagtatcagacattagagtagggggcttaaagagtcgctattgaggccgggcacagtggctcacgcctgtaatctcagcactttgggaggccgaggcgggcggatcacgaggtcaggaattcgagatcagcctgaccaacaaggtgaaaccccgtctctactaaaaatacaaaaattagccggacatggtgacgcgcgcctgtaatcccagctactcaggaggctgagacaggagaatcgcttgaacccgggaggtggcgccactgcactccagcctgggcgacagagcgagactccgtctcccccaaaaaagagtggctgttgagcagtgctaaggctgaacacacagagggctgagagctggggttctaagtgtgagaaggtggatagtagggggctgaagagtggaaagatgggctaagggtgctgattggaggggctgtgccaatggagggcggagagttagggcactgatcaccaggggactgaggctgagaagagaggctgaaagtgtgaggctagatccaccccatagtgtgtgctgctgcgccaagagagatgcagagaaggaactggatgcagagtcccacagccccatgcaccaccccatccctactcccacagagggagtgctcagcctgagcactcccctcttcccaggacccaggggaaaggatcaggtctggctgccagccagggcctcctccctagtcaagctgcatcctaggctaatgccccatccttcctgcccccagctcacatgggcctctcaggttctgcgttcccatcctgatccccatccccagtacctctctttttttttctgtgtctcccaagctgtagtgcagtggcacgatcttggctcactgcaacctctgcctctcagattcaagcgattctcctgcctcaggctcccaaa

SEQ ID NO: 29025 - DNA, 710 bp, Artificial sequence
  DNA replication origin
cgggcgtcccggcgccctccaggcagggggattcccagagctgggcgcgatgccgagaagggccccgccccctcctctttcctgaggctcccacctggaaactgagtcacggacgtgcgcctccaccccggcatcggcggggagagctcctcggcagacccccaccccgcttcggcgaaacacacactcctggcccccaaacccggcctgcttcccctggggccagtccctgagctttcgcagccccgagctgggtcctacctctcttcttggtgttcatggtgggtccgggacggcccccgacccgcgctcgccccccgcggaccttccggccctggccacttcgagccgcccggctgggctccgggctcgctcccagcggctctggctcggcttcggctcctcccggcgccgccccccgcccagttcctgccgcctgactcagcccgcctggatggggcgggaccggtgactggggttcccctcggggaggggaccgacggggggcgaggggtctgctcagctggggtcagcaatgtgcgtaaagggatttgagcatggggatgaatatgaagggatagaatggagacgctaagtggaggaagtatcagacattagagtagggggcttaaagagtcgctattgaggccgggcacagtggctcacgcctgtaatctcagcactttgggaggccgaggcgggcggatcac

SEQ ID NO: 29026 - DNA, 1150 bp, Artificial sequence
  DNA replication origin
gggcagggctggggaggctgccccgcccccgggtaaacaggcgcttccgcacattcttcgcgcgcgccgcccctttcctgccccttcccagccggaggagggtccccgcgcgaccccccttcctgccccgcggcaggcggagcccgcacctcggcaggaagtgggggccgagccgaggccacgctgagtccgaggccgagtcgcctgcggctgtcctgtcattagtgcccgggtcggcgggactaggcggacccggccggagcccgctggggcagctgtgcctagcgacaggaaagacctgcgccagccctggatcccgctgcgtgggagagggcttcggggatccgactggtactggacacccccccgatcacccgcagggagccccgcgcggactcactctatgatgtccctgtcggtgcggccgcagcgccgtctgctcagcgcccgggtcaataggagccagtccttcgcaggcgtcctcggcagccacgagcgggggcccaggtacgcggccgcgcagggttggtggggtcaaagggcgtcagatggggctgggtctgggggtgcgtagtgagagtctgggggactcctgctctcctctttctgaggacagcctctccttcaggagtttcccggtcttcagcccgccggggcccccacggaagccccccgcgctctcccgagtgtccaggatgttttccgtggctcacccagccgccaaggtgccgcagcccgagcggctggacctggtgtacacggcgctgaagcggggcctgacgtgagcagctcctctgttcccagccctgtcccgggatccctccccaagcccgcatcctgctagcaggaaccttctccagccccatgccctctccctgctgtctgcaccctgggcagcatgaggctggagagccgagttcattcttgtggtcgcccctttcctcagggcctacttggaagtgcaccagcaggagcaagagaaactccaggggcagataagggagtccaagaggaattcccgcttggtgagtggcgggaggtacggatgccctttgcctctttggtgtggagggctgggcaagggcagccctgggtgatatctgggctattttctgaagtgatctggttcaggtgtgagtagaaaagggga

SEQ ID NO: 29027 - DNA, 1141 bp, Artificial sequence
  DNA replication origin
cattcttgtggtcgcccctttcctcagggcctacttggaagtgcaccagcaggagcaagagaaactccaggggcagataagggagtccaagaggaattcccgcttggtgagtggcgggaggtacggatgccctttgcctctttggtgtggagggctgggcaagggcagccctgggtgatatctgggctattttctgaagtgatctggttcaggtgtgagtagaaaaggggatatcaggaaaggctgaggggcttttctatccccaaactttgctgtgcatactttctgcttgggactcagtacctgctccaggagcttccagtggggtaggtgggacccctacagacatggacagcaggagattctgctgcagtggtactgagcagtggtactgctgcatggtgcttcttgggaagaggttagggcttcctggaggagggaacacttctgccggggcttgatgggagttcccctgcagagggaaccttgcacaaggaagcagagagctctccccaggcggctgcaggaaaaggaatcccagggaagaggtggaaggaggggtcctggagggggctgaagggaccagatctgtgctaccagcatccaccaagggctagaccagcaggaaggggcgtcagttgctactgtgacaggagtgcttgtggactgtggtgtgagaaaggggagctgtgacgagtctgagtgcctctgctggagtcctcctcatccctcctaaatatttgccccttctccccacccctgcagggcttcctgtatgatctggacaaggtgagtatgcatggaatggtactggaaggggttggctcacagggagggtaaggaccctgggcctcaggcccctcctgacccacctctcccccagcaagtcaagtccattgaacgcttcctgcgacgactggagttccatgccagcaaggtacgagtgcagcatgtgtgcagagtggggtggggggttggatatcatagggagaagaggggtggtgccaggccctgggtgagcaaccttagaggtgagtaaccccagaggtgagtctcagtccccctactgtcaccccactcaccttcccagatcgatgagctgtatgaggcatactgtgtccagcggcgtctccgggatggt

SEQ ID NO: 29028 - DNA, 986 bp, Artificial sequence
  DNA replication origin
ttgtgggtggagcctgtagtagtgtgagtgagggggcttggagcactgtgggtagtggtaatggcactataggtagagcctgtagtggtgtgagtggggcctggcagttctgaagggccagagtctgtggacttatgaactgagtctaggtgtgcagatggggcagggtctgtagatgtggggacagagcctgttgtaccgagggtagagcttgtggcagagtggccagggtccagggcaggaggaacaggactggggtgctctccatgggtgggagctgggtgtgtaggtgggctaggtccccaggctaggctttctgggccaacggcctccactgaagcctcagccaaggcagcatctacactagcctcactgatgtggctcagagtccgactgtagggtgcatgcccatttgccaggactggggccacggccccctcctcatccaagggcccagagctgggggtctcaggcctgcggaaggcaacttggatgggaaggggctcgggctgctgcaccaggggcctaggggctggtgagtggcgggcagtgcctgagagctgtgggctggatgagtcgtctgaagattcagatgacagggaccatgctgtcccattctccagctcctcctgccgtcgcagcatgttctgagaaagaggagagggcatttcagaaccacccccagggagcctctgggggatggtgaggcctggacctgggctatgactcacatagaaagcctgttcccgaagtgagggtgtgtccggtgggctctggctataggtggagaagcgcttggtgactgtggaggccttgttgacagaagaagcagctgagggctggtcatccttgtcgaaggggctgggaagggaagaggctgttggcaggtgccacagccctcctggccctcctccaagcctctcagccccaccaacctccatgtgacttccaggctgagcttgatggtaccaaggtcattgatatcc

SEQ ID NO: 29029 - DNA, 1414 bp, Artificial sequence
  DNA replication origin
caccttttccctctcacctagcctcacacccatcttgcctagccccctcacctgtccccaggaacatcattgtcttcatcttcgtcttcattgaggaagctgaagctctccaaggcatgctccacagtgatgctgagactggaggcccggctgcgagtcagaccttgtctctgctgaggttgtgaagggcatcagagcggctgccgccccctggctgccctccctggttgccctagcccagcccagccctcctcaccatgagcagactttctaggcgggtcacctcctgctccaggccctgcagctcaggaaactggccacggtagtcatccagggcagccattagggcccccagtgcctcctccaggctcctgtccccagaccctccggctgccgttgggactggggtctggacagccatggccaggcaaaggtctgaatgctggggtgcaggggttgggggtgagggagtggggcttagactctgaaccgtagactctgagggatctggggcagggcttgtgaggggtttcctactggaatgggcaggacttgggtggggagttctgggggccatagggtctgcctgagtgtaggaattggagactgggggactacagggaagggagtcagtgcctgggagggtggggtctgagtgtttggaggggctggagagggtagcaagttctagagaagtggaagggcttacatttataaggatggggcttgtggtgggatgggtggggcttgtggtaggatgggtgggacttgtggcagtctggactaggcccataccactgggggtaggacttgtagtggtgggaggtgacatactggttttgtgggtgggacttgtgggggtatgggtggggcttgtggaagtatgagtggggcttgctgtggtatgggtagggcttggcatagtgtgggtggggcttgtggtagtctggactgggcctatgatattgagggtagggcctgtagtagtaagggtagagattatgggcttgtgggtggagcctgtagtagtgtgagtgagggggcttggagcactgtgggtagtggtaatggcactataggtagagcctgtagtggtgtgagtggggcctggcagttctgaagggccagagtctgtggacttatgaactgagtctaggtgtgcagatggggcagggtctgtagatgtggggacagagcctgttgtaccgagggtagagcttgtggcagagtggccagggtccagggcaggaggaacaggactggggtgctctccatgggtgggagctgggtgtgtaggtgggctaggtccccaggctaggctttctgggccaacggcctccactgaagcctcagccaaggcagcatctacactagcctcactgatgtggctcagagtccgactgtagggtgcatg

SEQ ID NO: 29030 - DNA, 776 bp, Artificial sequence
  DNA replication origin
cctgagggaaaaatggggtccaccaccccacaggcacacatcaccacctggtcaccagcgtttatttttattaagcttcccccatgccagaaaggaagaagatgatgcaccgacagcagacagtggggtaagttcatggaggatttccagaaggaggaaggggctgggaccagcaggtggtagtagggatctctggagtcagtctgcgccatgctacctccagctgggaccactggggatggcatgggtaggagtaggctgcaggcgggatggtttatgacaagtggactgcaaagggtgcagggcatggggctgtagcctgggcagcagcagaggaaggagggacctggcacaactctcaactgggaaccagcaaaggccactccaggactgacagttgaggggccagggcctctgggagagtcggggttgagaaggagtggggcagtgctggggtcccagggtgcacggcgagacactgagagagctccttaaagggcaggtccaaggtgaggccaaggggaagaggaggggctggaggcacccaagctgatggggaccggcaggggaggcagacattgcagagatgaagagggcggtcagaagcactggggacacacgtagggttggagacatgggcatgaaggacatgggaggggtggacacaggtgcacctgccagcaactcagtcctcacatgctccacctggccctgcctcacctgtcctgtcctttgactttctcccaattcacctgttccaccttcccctggtcctg

SEQ ID NO: 29031 - DNA, 893 bp, Artificial sequence
  DNA replication origin
ggcgcagggcagcatgggaggcggccccgggcgccaactttcaaaagcgggcgcgatggcgtcacgggacgcgccgcgagtcgcgtcgtcacgccgcacgcgccctcgccgggtcgctcgtgggctctgccggcgccgcggcgtcctggctcccgctgggtggggcttcctgggcggaggccgccgcccctgggcggtgccggatccagtccgcttgaccttattccctagctgctgtctccggccccctgaacccgtacagggttggggaagtgggggtggctggaggaagcgcgcgcggggcaagccagtggggctgaggaggctcccgggcccggccccgcccagtctccgccccagccaggcccgacccgccctccgaatgtcttacagctgcccgccccagagtaaggcccggtcggttcccgcgcgctcccagctccgtgcccgcgagcgacgactggaagggctgtccttgctcagcggcttttggtgatctctccgccctagaagagggccacctaaaagcgggtgcgagaggagagtgggagggcctcctcttggtgtccccaggccacctcagcccggagaggtggcggaaaaccagacttgatgctttaacacgttcatagcaatcgctttttactgaaaggagtttctgtatttagcgctgtgtaattctgtggaaacgtgcatttcttgtctttgcgggagagctgttctctgtgggcggagaccttcagtcccacccctccccaggaggcgcctgcggacccttcccaacctgcagtcaagttgaccaagaactgactgcaaggtgctggtggctctgggatgagagccttttggtacttacagggaatatgactcttcccttagatatcaaatggacc

SEQ ID NO: 29032 - DNA, 1386 bp, Artificial sequence
  DNA replication origin
ctcccgcggcgggtggccccagctgagacactatctccgcgtcccggcttcggcgcccgcctagcttaagggttcggaccgactgccgccgcgcgctaagccaggtcccggtgccgtatgggtgtcgggccctggccgtcgcgtctcgggctgcccctcctccagccagccccgtccccggaacctaccctgccggcctgcgtgccttcccagctgcttggctgctcggcggtcgctcccagtccgcgcgtcgccgccgctggtctccgtctccgccgagtggcgcaggcggcgctgcagcggctgcgagcagagggaccccagagctgccgagagctccctctgcaaggctggctgagctgctcgcacctctacgctgcctgagcgggcggggggacgcgcgctcgccgcccccgctgcgcccccaaactcgcgcccgggttcctggccggacccgaccggtgcggcccccccacggtgggcggaaaagatgcgagttccgcaccaagtagtttttatccagccgggttcggactccccagccgagtgatagcagcctgactttgtgcgctcagagatctcaaagggactgaaacttaaatttcattctgatctcaagtgacgtgacaaatttctgaatttgggagtatgggctaagtcccttgagtttccctcccgctttaaaatgtcctcacactaacttagtacctgatgctctagggctaggtgaaggcggttctgccccaggattgtgcaactcgatctagagcgccagtagggcagaatgagtttattcttgactcgactggtaatttgcccatgcgatgaaatatgagggttgatgttgtaattgaatcctgggtcacttgctgcagatggtttataaatatctacgcctaatgtaactactgtttagtaggagacttcctgtagccccgagttcagcgttaagtaaacattcgcatacgtagtcttcatactttgagtttcgatcaactaggaaagttaaaaaccaagtcctcataggtgggaaaggaagttaaacaaggcatatatttaaatttattcggtccttaagttttctttcttcactaaaaagcatcccgttgaattgcgggagtcttttgcttttccgtaaatattctagtgccttaatatagttcattgcagcagttaatgtatcagttcgggttgttttggagagaagaaagtctggattaacctgtttttaggaaggaagctatgttaagtttatgaagaaattaaacagcctggtcctaaccaaagttgtccagtccactgtatgtaatctcaatgtgtagctcctcactgcagtcctcttcgtaggcacgctttctatgtctccttttggaaccctgcaaaata

SEQ ID NO: 29033 - DNA, 1576 bp, Artificial sequence
  DNA replication origin
tcggagctcacaggagatgccgtcgggggtctgggccatgggccgggcgggccggggaggcccaacgagctccggcgggaaacagcagaggacgagcgcgcacacaggaagcctggggcccagacccgcacggcagccacctgctcctccggcggcggaaggtgcgcgccgcttcctgccaggccgcccccggcccggcccctccccgccccggcctcgcggctcgagagcttgcccgggagcggggttgtgggaggggggccgagtcccacctgcccgcccgccccgtcgcccaggagcttctccgccagggtagacgtcggggtgggcagtggcgtggccgggagggtcgcgggtgtggcgggcctccagcgggtccttgcccccggcttccaccccgccccgcagtccctgccgcgaacaccaggggacgctgcctgcctggggatccccgcggcccaccggggctggtcccctccaaagcccaggctgcggaggtggacgaggcgcctggcagaagggggactgttcagcaaggagcgcccgaattctgccaacaccggaggtcctgcccgttgctccgaacctggagtccgtgaccctgttagggatccaagagattttgaatgggtgggaaaaaatgtcagatggggccaggcgcggtggctcacgcctgtaatcccagcactttggaaggccgaggaaggaggaacgcttgagccaaagagttcgagaccaagctgggcaacatagggagaccctgtctctgcaaaataatttacaaaattagacggcgtgatggcgtgtgtctgtaatcctagctacttgggaggctgaggtgggaggatcacttgagcttgggaggcagagtttgcagtgagcggagatcgcaccactgtactccagcctgggtgacaaagccaggtcctgtctaaaaaaaaaaaaaaaaaacagcctgatgggtccagacgcccttccttgccgcagaggtggggtcagggccgaaggtgagggtgtacccggagccttcggggggaagcctggggctaaggtgagccctgaaccccaagcacttcatagagggccggagtgagtcgtccaggtacatgagggtcttcttgtgtctgccttctccccaggctggagagagtttgggagggggcagccagagagagagaaataagccagtgtctccagggctgagaggggtcagacagtcatagggtggggcctggtagcctgttgccctctcaaagaccaggacctagattctggaaagttcacaggaagagactgcattttttttcttctattacaatctaaactccacttaagcggtaaggaacagcagtctaccctgcccatagctcagcaaggtggaggtgaaatgacagctaagggtgacaaggaggagtcagctgcagaagatgcagcacagagagttcctgctgcctccccgattgaagagacatacttggtttgtttgttggttttgagatagagtcttgctctgtggtccaggctggagtgcagtggcacaatcttggctcactgcagcctccgcctcccaggttcc

SEQ ID NO: 29034 - DNA, 3555 bp, Artificial sequence
  DNA replication origin
ccttccgcctcccagcgcctctcccaatgtgtggtctcttctgggggccggcgctcacctcgcaagcgctgaggtccaggtgcaggtcgcggaggtgcgtgttgagcgcgaggccatccaaaagggctctgggagaggacgttacacggggtggcgggagctgggacagggggctccagggtgcgaacgaaggaggcagggccaggatctgggggaggttgtgggagcgacagaagcaggagcggggaggggcgaaggccagggcagggtgggagcgcccgcgggggcgtggccggggtccgacactgacctgagcgcgtcgggcggcagcttgcagcccgccaggcccaggtgccgcagcgtccgcgcgcggctgaggaagagctgcagcgcggccggcgcggcgcgggacttcctgggggaagtgggaaggtgggcctggggccgcaaggaggcggcttccagcagcctcccccggccccgacaggtcccccttacgtgcgggagaagacgttcctcgaagcgtcgaggtgggtaaggctggtgcagcagcctcgggataccgctgcgaagagctgcggggggaggctgttggctacacccgcggggggaccgagccctccccgtcccgccctccagtccgccctgccggtcatccatccccccacggagcaccccctcacagtgtccagggcagtgtcggtgcctgcgagattcaggaacgacagtacgttaggacggctcaggaagctatagaggccctggagggaggacaggggtgcgatggagtgggggatcgcctacccagggcttatgagcaaccccaagctcccaccctgaagacagccactcaccccactgtcctcggaggcccccagcgccccaggattcccagaaaggtccaggtgggtcagggtggagtcgaaggcggcattggtggccagtgcccggcccagagccctcattcctggtggtgggtcggggtcactcagcagttggacagacccccacccccctcccctcaccccctccctcatccagcctacctcgcggtgtcaaccctgtctgggccaggctgagtctcctcagggctcctggacaacgctcgaggtgtctgctgagtgcagtcatgccttggggggtgggaacagccacgtgggtctcacctcctcctgctgcccacccctgcggtccccaggctcagtcatacctcggtcatccagcaggttccccgcgaggctgagctcccgcagcccagagcttgagtgtcccgccagcgcctgggccagtcgtcggacaaagtctctggggaccagaccccaggcatgagattctgcccctggtttgccaacccctcccaggccactagcccccagtcccaagcctccagactctcctctccaagccctgccctgtccccctcaccccctcaggctgcaggtctccagcaccagctcctccaggtgtgatgactgactcatcatgtgcagaatctgttctgagacctcaaggctctgagaagcagagggcggcggctcacgggctgcaccctggccctcagcgggctgcaccctggcccacacccttggcccctccctgcccttaccccgaaccccctcaccagcttcatgtccacacaggagaggcaccggaaccacaggttgtaggacagggcagccacactcaaggccaggtccctggtgggagggtgggaacagaggcagagctcagggccctccagccaggtcccaggcccagcagcccctccatggagaaactgaggcccagggatatgggccccgggatcttcctcctctcccatcctggcaggccacacaccgactgccgaggtggctgaagtctcccaggctgaaatggcggcagccctggcgatggtaaatggtgtccacgtcctgggtgagaaggagatgcttacagttcgcctggggccacaaggggcagggaggggctcagcacacatgggggaccagatgtctccagagcccttcaaaagggccctaccctcacccactgaatctcctctcggaaagggaagccattgtagtcacacagagcctcgtatgtctccaagaagccacctggggaggggataggggtgcgatgtggaaaaggagagagacaaaacatcagcgatggaggaagaccagacccacagactaggtggtggctgggacctgaatggctctgttcagtttggggcccccccagcttgcgggtctggggaggcagaggtggggcaggctggaaggcctgtggctctgccttcacccttaccacaggggctgcaggggtcagtggactccgaggggctgcttctctccagccgagccagcatggaggctggtgtgggcctccggaatagcttcctggtagggggttaaggagaagggggcaaaggacttccagcctctgggatgggaagcagcccttctcatgcactccctcctcccctgccagcccctcgaatttgccaggcctcacccaagggtcgagcgagggaagaccttcttgatggctgcagccacgtgctgggccagctgttccagggcggccacaccaggaaactccaggaccagctcacgcagggactccagctcaaaggtgacctagggaaggggcactactaggcctcggctccacacatgggcgcaggtgatggtggtagcatgaagaccaggctgcaggcccaggtagggtactaggtgtctcacctgagggggtgtctcctgcagcgccatggcctggacctccaggtagctgaacgtgcagtccacctagaaagggcctagatcagctgggaccaagcccccagccccgccctcatggaagtccagtcctttgggcagcctggggcagagccagatctgcctggactcccctcctgtcggctgcccagagcccagtgctggtgcaaagtcagggcccacaaggccaagaaggaccactctgcagatgcagccccctgccaaggtagctgctggcgggcgggggtgtggccaggccctgggactcaccctcagcgggaggcaggtggtgtgcagcaggtaggctctccatcgtagcagtgcctggggaaagacagtctgatatcctgggcagagcaagaggctctttctgtggggccacagccgcctccccggctctgtcccctgccccataccaggacatggttttgcacagcaccctccccgggtagccaggttttcagcagcagctccacctctttgggccacaggaacctggtgatctcgcctgtggaagggcagcctgctgggtgacttcagtccttgcacagaagccactggtgcccacagtctgtgccaggctggggccctggggcttatctgcggccagcgaggaaggaggggagaggatctggggcgcctgccctcctggggagcagggaggacctctgaccaggccctctggggcgctgggtgggcctctgattttggggctgcactacttcctcccggccaagaaggcaggaagggccagcgcttacctcggagctcacaggagatgccgtcgggg

SEQ ID NO: 29035 - DNA, 1511 bp, Artificial sequence
  DNA replication origin
agaaatgccgagggacggagttaccgtgcagagaagggcaagggaagagggggacgcccacctgatggactgcacgtgctgtcagttccgggcggctgcgctgcgcctgggccacgtcgttcagtggcagaggcatggccttcaggctgtggttctgctccagcgcctgcgccacgtccagcagacccaaagcagatgtgtggttccggtcccagaccacagacctgggccgggcctggcttcagtcggggacggagcttcccaacgccccacccaaccctcggcctagtccattcgcctcgtcagcctgctccatttgctccgcctcattcagtccctccccttagcccggtgccctcctctccaccgcgccccctgcccgctggtcccacccctctgaccccgcccaccggagcctcgagttgacccgcagcgccttggccagcaacttggcgcccgcgtcccccatggcgttgccgctgatatccagcgcggtcaggttaggattggtggctagggcccggagtaggacgctggcacccagcttcagccgagactcagccaccgacagagactgaagaggctggggttaagagaaagccattgatggctggagtcaggggtcagtgagggcaggtcacagggtctgagggaacaagagaaaggaggaccaaagtggtctaattgcccgaggccctgcaaggtcccgtgaactcacacaatcgtcgtcctgcatgagctggacaatccggtgcaggacgtcgtccagggtctccctgtgggcaggggccgcagttgtgggggacaggggtggtggggtgttgtctgggaggcccaggagtagggtgggggctcacttgcaccggacgttgaagttccttccaagcgccacatgtctcagggaccggcttctcccgatggccagcaccagagtcaccatgtctgagccgaagcctgggggtgactcgggtcacgcacgaggcgaagttgcaagggtagggtggggattgggaatcgagtggatgatgcgaggatgggctctcctgcagcctcaccgttatccgccagatccagggagctcacagcgcctgcgtcgcacactaagtcttgtatcacctgggcgccggccgagcgcagctgtatgtgggaggtgggaggtgggaagtgggacccacttaggccgcgagtggggaggggcaggcggcccacggccctgcccttccgcctcccagcgcctctcccaatgtgtggtctcttctgggggccggcgctcacctcgcaagcgctgaggtccaggtgcaggtcgcggaggtgcgtgttgagcgcgaggccatccaaaagggctctgggagaggacgttacacggggtggcgggagctgggacagggggctccagggtgcgaacgaaggaggcagggccaggatctgggggaggttgtgggagcgacagaagcaggagcggggaggggcgaaggccagggcagggtgggagcgcccgcgggggcgtggcc

SEQ ID NO: 29036 - DNA, 1861 bp, Artificial sequence
  DNA replication origin
tgtctcagaaggccctccagcttctgcccaagctgccagtgatggcttggggagcttccagcttcatatagaatggggagaatctgagggccaaagaggaaaagcagttgcgagctgacacctgactaagaggggaagggtccttgtagcaggagggggagtgctcacgctgagagagaagttggcattttggatggcatcctcggcctggcgcacagcggcttcaccctggggcccagccccacagcccagcagctccacatgctcctgcaccgactgacacaattcattcacttcctggggcgaaatggggatcagtctcagcctagccccctcccagtctcccagatcctgcctgccttcctcccaggctctttaacagagggaggtcctgaagctgacacccttagaccagccactttggaaccctatctgttcaaggagggaaggaactatctgttgctttggttcattttaaggactttatatacacttcctaagtgcccagaataggaaggaaaggagttgtaaatcatgtctgtgttttagaagctcagtctgtccacacagaggatagactgagagaggggtagaaaagggagtgagtagccctggaggagggaccaggaggagcaagggataattggtgtgggggtaaggagtggcatgtatgaaggttggtctagaggcaggacgaaggaggcctatgagggctccagtgtgaccaggagagacctggaagggtgccccaacctctgtccacagcactgggtggctgtgggcaccagtgggattgggctccagggtagacaacagggtttgtgagcgacgatgacatcacttggagaagtgcagagcatgaagcccagcaggatgtctggattaagacctttgggctctgaagcttaggaaagaagaggtatttgggaatggagaggtagaaacatctccaacagataaggtagtggagggagatgaagacagtgaaggagcagctgggtttgggcacacaatggagaggggaggggagtcacgtatatgtgaggacagagatggggctacaattgggggaaaattgaggaaggacataaaaattcctctctaacaggacagcctgtttacaggcttaacgttaggcagccaagggtgttatttggagagctatttaaggggtgtttagccgcctccagatcaaggagagggactttgtgtgggacagcagggctcaggcaccctggccccaggaaagtcagaccctctgactcatggaggctcccggatgccacaggtctcctcatgccctacctctcgtggttggggaggggacattgacctgctctgaggggtctgagaccagaccaagtggctgaaggcgggtcgtgtggtcagaagaggcagggtctgcgcggttgttcctcaagagacaggcttggatctaggggcaaggggtattgagaaatgccgagggacggagttaccgtgcagagaagggcaagggaagagggggacgcccacctgatggactgcacgtgctgtcagttccgggcggctgcgctgcgcctgggccacgtcgttcagtggcagaggcatggccttcaggctgtggttctgctccagcgcctgcgccacgtccagcagacccaaagcagatgtgtggttccggtcccagaccacagacctgggccgggcctggcttcagtcggggacggagcttcccaacgccccacccaaccctcggcctagtccattcgcctcgtcagcctgctccatttgctccgcctcattcagtccctccccttagcccggtgccctcctctccaccgcgccccctgcccgctggtcccacccctctgaccccgcc

SEQ ID NO: 29037 - DNA, 2137 bp, Artificial sequence
  DNA replication origin
ggtggtgctggcggcgcggccgcggccgggcccgggtcggatggcgcaggggctgccccgccagtggcaggtccatgcggggcagcgggccggccgggggcccaggggcggcagggctcggagagccgcgcgcggacggccccgcctgcggctctgcatcttctcccggagccgccagctcgggctccggctccgcttcctcagcagcacctgaggggacagcaccagaagagcaccgagcgccgagcccggggaggtggcggcggaggcgctagggcggcgggggacccgcccagggcgcggggaggggcccggctacgccgcccgtccccccgcccctctgcccctccgcccctcccccgccgccgccgctgtccgtggtgctgagcgcggccccgagcgcgcgcggctccgcgccgccgcccagcatgcgcgtccctggggtagggaaaggggcgcggggaggcgagctgagccggtgtcctgtcccagatccgcccaggtcccgccccgggctgaccacagcagaccccagctttgcaggttgcacaaggggcccgacctggcccagtcaagggctggtgggtacccagacaaggctgaatgagttcatccaggtccccgggtccccaagtctaatggagcttcagcccacccacgtaaactccctcccccaaggccctgacttactgtgaatgaaggggaccaggtgaagaccgtggctgagctcaggccatttctgtggaggactgtcatcctggtggggagggcacaaactcagcctggggtaggagagcaccaacccaaaagagctgcctttcaccttccacactccacagcaagatgggaagactgggagtgccatgccccgtgttctaaaaccacttaccttctccttctcctcttccttctcctcggggaagaaaagaccttccaattccccaggctcaaggaggctgggctcacctccatccggtgctggtagggcagggggcattgtcactgttgcctgctgagccagactctccacctgcaataccaagcagccaaagatggcaggtagggcctcagccatgatcccattgatgctaactaaggggaccctgaaatagccctgggctacatgaccccagaagacattacagagcccctgcaagggagatggccaagtcactgcatgtgtgtgtttgcacgaaagtgtgtgcacatctccccctcaccagctgatcccgggctgcactcaggcctgccaaagcctgagccacaatgctctctgccaaggtccccgtgattgatagccgcatgtccctaagggcaggagaggacaggggttaatgggctggctttgctcagccttgcccagcccagccccatccagcctacctgagcctagtgaaggcatcttgcagcagctgctctgggagcagctccgggaggcccctcgagcctgccaggaccccctctagctgctccctccagctggatccctgcagcatctgtgggcagaggctccttgctgtgtccagtgtggcctgagtgaagtcctagacaaaggtcagtcagagcatggtgaggatgtggccagacaccaggctgctggcttgaggctccaactccaacagaatattgagtcaggggatatcacagttaaaactaaaggatgggagtcaaacctgcaaacggaggtggggttggggcaggagtaccctctcacctggatgtcctggcggcagacctcgcccacctgtctcagaaggccctccagcttctgcccaagctgccagtgatggcttggggagcttccagcttcatatagaatggggagaatctgagggccaaagaggaaaagcagttgcgagctgacacctgactaagaggggaagggtccttgtagcaggagggggagtgctcacgctgagagagaagttggcattttggatggcatcctcggcctggcgcacagcggcttcaccctggggcccagccccacagcccagcagctccacatgctcctgcaccgactgacacaattcattcacttcctggggcgaaatggggatcagtctcagcctagccccctcccagtctcccagatcctgcctgccttcctcccaggctctttaacagagggaggtcc

SEQ ID NO: 29038 - DNA, 840 bp, Artificial sequence
  DNA replication origin
cgcccgccgccggggggcccccaggtgagcacccttcccccactccggagcgcgtggaattggggatcacgggtggcccggccgctcctcatgggtggtagcggtcaaggagagggggtggtgggggcccaaggccacctggtcgtgcggccgcggtcacatcctggcttcttcctgaccaccccccaccccaggccatgcctgtgcgggaccatgggtgtgcgggttccgttcggggtgtgcctgggtgtgggactccgtctcggggcggcccgcggcctccgtggctgcgcgagagagggtgtccgtcctccctccctcccccggggctgctgagagatgccgggcagccgggtagccgagccgcggggccaagcctgcgtctgctgcgcgtccggcggcggcgcgtgtggggagatgcgtgtgtgggctgcaagcccgcgggggcagcgggcactggcggagggcggggaggagccggcttgaggccccccagagggtctgacgcagcagccggcgccactgagccggcagcaggccgggtggagtgggggtggggtgggggacactgcagggaactgttcggagcagagctggtggcaagtgggaacgggtgaccccgggggcacgtgagggctaggtttgctggtgaccgggtggctcgggcgtgtaggatactctgtgggacaaggacgggtgtggactgggtgtgcgggagccagcagcgagtgaggagtgcgtgaaatctggagtctctgtccagcagcaggacagtaggaggctggtatcagcagcccctagggtcaccccagtctggaatcctggagttattcagtccag

SEQ ID NO: 29039 - DNA, 1430 bp, Artificial sequence
  DNA replication origin
ggctgcaagcccgcgggggcagcgggcactggcggagggcggggaggagccggcttgaggccccccagagggtctgacgcagcagccggcgccactgagccggcagcaggccgggtggagtgggggtggggtgggggacactgcagggaactgttcggagcagagctggtggcaagtgggaacgggtgaccccgggggcacgtgagggctaggtttgctggtgaccgggtggctcgggcgtgtaggatactctgtgggacaaggacgggtgtggactgggtgtgcgggagccagcagcgagtgaggagtgcgtgaaatctggagtctctgtccagcagcaggacagtaggaggctggtatcagcagcccctagggtcaccccagtctggaatcctggagttattcagtccaggctgccggccgggggggggggggggtagaagccagagttgcactcaaccctgacccctgaccccatgatgccccccaggtacccccagccttgccgcaggaagggaatgggctcagtgcccgcgtggacgagggcgtggaggaattcttctccaaaaggctgatccagcaggatcgcctgtgagtgaggggcatctgctgggggtgggagagggtgggatgcctgatgggctttctcgctcactgctgggtgtccccacagctgggcccccgaggaggacccggccactgaggggggcgccactcctgtcccccgtacactgcgaaagaagctgggcaccctctttgccttcaagaagcctcgttcaacgcggggtccacggactgatctagagaccagccctggggcagctccccgaacccgaaaaactacatttggcgacctactgcggccgccaacccgtcccagccgtggtgaggagcttggtggggctgagggggacaccagcagccctgaccctgccggcaggagccgacctcgctacacaagagatagcaaggcctactcgatgatactgctgcctgccgaggaggaggcaacgctgggtgccagacccgacaaggtgaggcttgctgatggggggtggtgaaggcgcttctgggacccagggcgcggactgtctccaactcgagcatctctgtccctagcggcggcccctggagcggggagaaacagaactggctccatcctttgaacagcgggtacaagtaatgctgcagaggataggcgtcagccgaggcagcgggggtgccgaaggcaagaggaagcaagtgagttgaggggacctgagcatgaagtgagagggcagatggcatgctgtgggtgacataagtgaccaagatggaggagactcatgacagataggtctaattgtcagttctactccattctcctcgaaatggttacagattcgacctttcttccctcttggctttgacccaggcacaggccaccagca

SEQ ID NO: 29040 - DNA, 1401 bp, Artificial sequence
  DNA replication origin
tcaaacgcaggccaaaactcgaggcacctccatccccaagcctaggtaagagggggtccaggccagctgggagggtggcaggactgcttagcccagccctgacccttcctctctctccctccctcccctcacaggatctggccttggaaccgagcctctgcccccacagcccacagagccctccagccctgagcggagcccaccctccccagccacagaccaaagaggcggcggccccaatccctgatcctctcctctcctgccgcatgagattattttattaaaaaactcaaaggaagcagagtgtggagcggtatctgtcctgcgtgacgtctcacatcggagttggctcagaccctggctgtgcatccatcagaaagtgcaaggcccaggccatgagctggggaggaagcctggaaagaaaccaccgctgcaggtcaatggagcctgggactagtgaccaagagttggggcagacccaggcactcacctgacagcttggacccgagcacagagggacgtgcagggtggctcatactcatactggaaggcagaaccatcacgatgcctctttgggggttcctgaaaggggtatggtgtctggggaagagctaacaaggaccccaaccccatccaaggctacccatgctccctcccagctctacctcaggccttccttgttctaccctccagctgcagaggggctatgctcacccagacagagcagggctcctgggctcccctggtagctccggtcctgggaaaaggcggccgattcttgcagggcaaccctacaaactccttgaactccaggctaggtttctggggcctggtcacaagagcctggtgtggactggggacatggctacggggtgagagactgggagtgcagctctggagtggggagctgggggtacggctggcgtgtggggacctgggggtcagggtggcaggggctgagcagatggctggtgagggctgggagctgcttctctgccctgggtctggagcagccaaggacagggcaggcagaaggctgatgctggtaccactttcctcggatgacatgtggccgggtaaggccggggttcctgaggaggaggggacttattgtaggcacagccctctccgctcagggcagctgagtggcctgcgagctcagacaggactgcagggaccgtgttcatcccccacccaccgtgcacctttcacagcatcctgcgcagcccgggaacctgactgacaggcggcagtgagtgcctgtgacctgtgcatcacctcacctgaggaactgggtgaggaaggaggagaggctatgagggtcagagataggtcctgcagagccgggtctggtgggggcagctcagggcctggggggttcaggaagtcttatcagcactg

SEQ ID NO: 29041 - DNA, 884 bp, Artificial sequence
  DNA replication origin
gcatcctgcgcagcccgggaacctgactgacaggcggcagtgagtgcctgtgacctgtgcatcacctcacctgaggaactgggtgaggaaggaggagaggctatgagggtcagagataggtcctgcagagccgggtctggtgggggcagctcagggcctggggggttcaggaagtcttatcagcactgtggacctgggccccaggtatccccccaacctctccagtcccccttaccctgtgtcctctgacaggggcctagagagctcagaattagctggtcattctcagagatgcacagcattgagctggggacagtgtacacagcttctccctgtgggacatgaactctgtaggacaggcccgtttactctcatgtcctgtgggatatgacccttgcccaactcctcaccctgacatctcccaagcaaatccccagactgaccgtggccttgcatcgtgaggcagcccagtgggtgacagggggtgctgtgcaagggccctccagtgtcaggcagctttcagccaggcacacgagtgccccctgatgctcctggtcctcccgcatttcatccagaagctgggacagtgataggcctggggacaggggaccatgggatgagtcaaggcttaaaggggaggaccaggagggtgagggggaagacagcttattgaggaagcataaggttaaggctggagagatcactgcacagcgtgttaggatcactggtcaagctctacagtacctgcattggacgaggtggactctgaaaggtgctccctacaggaagagagtggccaggactcaggaaccatgctgaggcctgtctacctagatacaccatcccctcaccaaacaacacgtggcccccgagcccaaccccag

SEQ ID NO: 29042 - DNA, 826 bp, Artificial sequence
  DNA replication origin
caggcccccgagcaggacgccctcgtgcgcaggcgcggggtgtacgtgggcggggcctcctcctccggccccgcccagcgaaggagcttcctcttccgaggaaaggcggggcctgggcgcccgcgggaaacccgggcccgttgcatccgctgggtgtagccgtggggatggcaggttcggggaggctggtcctacggccctggattcgggagctgattctggggtcagagacaccctccagtccacgagccgggcagctgcttgaggtgagcccccattcagggcccggagaccgaggcggaggcccggggtggtgggattgacgccgctcgccgccgtcaggtactacaggacgccgaggccgcggtcgcgggcccatcccacgcccctgatacgtccgacgtcggggccacgctgcttgtgtctgacgggacccacagtgtccgatgcctggtgacgcgggaggccctggacacctcggactggtgagaggccccgcgcggctctggaggtcggagtccggcaggagagcgcgaggtgggcgggccttgtgttcaggtgggcccggcagtgaggatcctgcttgttgcagggaggagaaggagttcggcttccgcgggacagagggccggctgctgctgctgcaggactgcggggttcatgtccaggtcgctgagggcggcgcggtgagtggtgagactgccttgggcgggttaccgggcatgactcttcgtgacgattctgagacccccccttccccccgaactcctccagcccgcagagttctatctccaggtggaccgcttcagcctgctgcccacggagc

SEQ ID NO: 29043 - DNA, 859 bp, Artificial sequence
  DNA replication origin
gacctcagctccagtaccagggacgctgtccaaggtcttcttaccgccctccaggtactcaggccacagagagctggagaccagcagtggaggaaggaagacggatgggggaaggcgagcagaaaagcagaatgggacttggaggatagagggaagaggtggcggggaccaaggagctgggaaggggagaaagagggaattgggagcgcctagggccgaggccggaggagcccttactttgctcttcacctcgacgatgctatcgggactgcgcgccggagtcctctgcggccgggccatggcggggccgggcgggccggggacggtgccccaggcggcccgccgaggcgcaggtgcacagcccggccggcccgcccgcgccgccccgcccctggcggtagcacacgccccgccttcccatccggagcgtgacgtcaagggggcagcgacgcagagtggaacgcggagtccacgtttcctaggaaacggagccgtggatggagaggagccgtcctccgctcttgcgtcatcacgctgaggtccgcgcgcccccggagtctggggagcagggctccgccaatccgaggggagggcgaaggaagtaccatttatttagcgctgtgtgtgtgctcttatttccactggccttacaagaccgtgcactgtgtagatgaggaaactgagtcataataaatatgtgctgaaccgttcgggggtcacacggtgctgaaatggtttcgagtcaactcgctcggacggcactcggcctcagcctccggccctggaaccctctccagggacgggaccagcccttgttctgttccctaccggtaccacaggaatcttgacgaacggccca

SEQ ID NO: 29044 - DNA, 1949 bp, Artificial sequence
  DNA replication origin
ccagtcaccagtggctgcagaagggccaccctagccttttaactgctttgtcaaaattaaacattttgtacacaggatttgtttccataagagcttttcttaccctaaaaatgccaagcctggtggccctcctgctgcttgattgcaggaagttctccccaatgtcactcctgccttagtccagagcagaaggcaagctggtgagaccagggaggaggctggaactgggacacacaaggaccatgactgtatttgtagaaaacctttaatgttccccaggctgagggagccctgtgagccagctaaaaacccccactgtgaagtccctgccatgtcccagcagtgtggagtggcatggggcttcatcctgactgtcagaggctgaagccactaccatctcctcgaatgcgactcccccagccagaactggcctgctcctggtcatccagggagggcagagagctgcgggtaccaggatgtcggcagccagggtgcaggtcccagcacgggggcccctgagacagcccattggaactgggaggctggcggttctcaatgaccaggtcactgctgtcatcgtcactatcaggctcagcaggcccaggccctgcagagggaggacctgtcaaacgcccagatgcccctcgcaccacgttattgcgctggttggcgggcttgacagtgacaatgaggttatggctgttggcaaccatcatgtccgtcacttggtccaaggtcttcccggctacttcaatgccattgacctcgaggatctcatcactgaccgccagcagccctgtactctcagccagacccccacgtaccaggcgggagatgaagattcctggaacccgctccaggccctggggagccacacgcacgctcatgccatctcggatgtagaagcccagggggcggtctgaaccatgcttgtgcagccgcacccgtcggtgggtctcaggcagtaggtccacgtctatgactgaggaaacctggcggaaatcttggggcaggctgattagcaagggtggccgggtgcgcaggggtgccactggccgcagcaagagccctttcttgcgccgctgcagagagttggaggcaaaagccaggccgctggagtcagcttctgctgcagaagaggggggatgttgagatcagagacctgctccccgacttgggctgtttacagggggcactgtagctatttcctaccacttagaggtcaagccaagggcagggactgcagagggtgacgcttgggtaccctgggcatggactaacccttgtagacctgccccacagacaccttaccccacagaggctgcccactgtacccctcctcaccccgcttctgcaccagtaggcgcagtggcgggggcccgctggccagggcccggtgcaggctgtcgtcgttggtgaggggcagcaggtcgccatgagcatccgtatagccaagtagcacgtccaggcccgggatctggtgcaccgcccgcagcaaccgcgagaactcctggaagccgctcaccgaagcgcgaggcagcgcgaagcgtcggaactcggcgtcaaactggaagtcggggttgggggagaggaggagtcaggacagcctgcgcccctttctcaccgcaggctggcaggaatgggaaagatgcggctgccgcttttgcggcagccttaagcccagacctcagctccagtaccagggacgctgtccaaggtcttcttaccgccctccaggtactcaggccacagagagctggagaccagcagtggaggaaggaagacggatgggggaaggcgagcagaaaagcagaatgggacttggaggatagagggaagaggtggcggggaccaaggagctgggaaggggagaaagagggaattgggagcgcctagggccgaggccggaggagcccttactttgctcttcacctcgacgatgctatcgg

SEQ ID NO: 29045 - DNA, 1023 bp, Artificial sequence
  DNA replication origin
cagggccagcccaggcccctgaaagctctgtggcgctcacccaagtacgacaaggtggagtcccgggtcaaggcccagctccaggtacctgcttcagggagccagaagtattatccattttgttggccaacaggcaactgtaccctgatctgagttctggggtgggagggaagtcacagaggtaacagaggactaagagaccctggctctgctgcagggcgaggctggggggcttctcagaagtagtgatggtggggctgatcctgagggcaagtagcaattagtcaaagggacagcagaagagaacattcccaaaagatggaacctcacagaccacagggcacgcagcagtggagatgctaggtacagttcactgtgaggaaagaagggcgtgaagttaggccaagaagtcagctggacccacgtcaggggccacaaaagccacttttcagcccttatttctgaggacagtgggaagggcaggggtatggtggggggctctgtctcagggactcagtaggaggagcaggagtgagaggaaaggcaaggtcacacaaatgtgttgtagctgaagcatctgtggggttcccagggggtgggagtgtgtccaggaagcagatggaaattcaggcctggatctcaggagtgagacctaggagttattgacgatcaggttgaggacaacgagaccaaggaattgaccgcctggatttgaggacttggaggccagctgttaggagccttgcagggctagagccaggaagcttggctaggaaggaggaaagagagtggtagctgggccagtactgaggtggaaggagagatggtttgttgttttcttaaaaatctgacatactcacacatttgtgtgctgatgaggacaagtgtcccttgaagagggaagagggcccgagggacatggatgcaaaggtcagaagggccaagatggccagggtcttgcagcttgagccccagacctcagcctgcctgctctctctgctgtgccctgccctccaggagcct

SEQ ID NO: 29046 - DNA, 1020 bp, Artificial sequence
  DNA replication origin
ggccggggcccaggcggggaccggcaggggcccgggagtggcgggcacgccagggtcagggtgccgggcgagggagggggcccggggttggggaagggggcccggggagggaggtaaacagccctgcaggcctcggggcaccgttgctgggcggcgccggcggcatgtgcgagggcccgtcccgcatctcggggcccatccccccagacccgacgctctgtcctgacaactacaggcggccgacctcgggtgagtccgggggcttggcggtggtgcgaggctcaggggtcggccctggctccacctctgagccccggactccgcccggctccgccccacagctcaagggcgcctcgagggaaacgcgctgaagctggacttgctgacttccgaccgggccctggacaccaccgctccccgtggcccctgcatcggtcccggtgccggagagatcctggagcgcggccagcgcggcgtcggggacgtgctgttgcaactcgaggggatctccctaggtcctggggcctctctcaagagtaagtcccaggaatggaagaagggacagagaggcagtgcggggtggaaagagatcaaaagcagctgctctttccaccctgacgtgggcccaggctttgcatctcttgagtctcagtttccccaactataaaagggggagaaatatgctaccttctcgaaggaggtgaactgaatgaggtagttcccacgaagccctagctctgctttatgcatttgttacccattaaatttgtttgttgagtgcctactgtgtgccaggccatatagatgctagaacacagggctgaagataagcatgagccatcactgagtcaaggtgggatacaaagatcaagagatgaatgtcatatatgagatgatctatggtgtacttcaatggtgtacttcactataataatggaggaaatcacctgggcgcagtggctcactcctggaatcccagcactttgggaggcccaggcgggcagatcacttgagtccagg

SEQ ID NO: 29047 - DNA, 2107 bp, Artificial sequence
  DNA replication origin
cctccctcgcccggcaccctgaccctggcgtgcccgccactcccgggcccctgccggtccccgcctgggccccggcctcgctcgccacctccgcgacctctgctcccagcccacttctcggtcccgctcgcggcctctcccccgcggcactcgggcaggggctcactcgagaggttttgccgccagccgctgccacccgacgggacttgttgttgccgggcaaccgtggcttccgtccccggggtcagggcccactgaccccggcgcaaagcgtcctggggcttgtagtttcggccgagggtgggctccgcggtcgccggtttctcttcccagctctgccctcgcttgctggccggtctccggggtcagcgcggggccaccatccagccccttggggcccgccccaagcagctgtcgaggacgcactcagcctgcgcagccatggcctcggcaggggcggagaggcggccgggggtccaggaggcgacggtcgtggggcagggacagctcacggaggagcccggcagcgctcagacctccgaggtgaccgtcaggctgtttaaccttcaaacacagggccgcagcgctctgagaggtggaactgagcgccccgacccgctaactgccaggctgggccctccaggcggggaggggcacaggctggtgtccttattcccgtttcggtgtctaacgttaggtgttcagtgacggatccctatgtcctttgcccggccatggtgaccgatggcctgtgtgtcatctctagtgtccagtggcgggagaccagttcctggtgcctgcccatgaggcccgcggaacccagagtgaagaccagcgcccagcaggcgcagcttcggagtcggagctccaggaggaaggacccaagctgggggaggagcggcccaagccgcatgccggggcgctagaggagagaggccccaggcccgtggtctccattgtgaggccccgtcatggtccaaagagaaagcctgtcaagtgagggggctctcggggggaaggagctgcagccccggggttggggcacacaccacagtaggattcctaaatcctgcactcctgcagggaggattctcgtccccagccactaccatcactctcctcccgttcctcaagagcccccgtgtagggagcagcaggagagtgggagcttcagggcttgtaggggcctgggctcactggcctctaagcctcttgggcctggggtctcattgaccaggaacgggacaggcgtcgagccctggggctgtgggcaggctgggctattccctgggccagggaatgggagccagggctggagcctggctcaagtctcttgtccctggctcaggtctctcagcctcccgggccttcgtgcccatcttaaggctgaagctgagctgccacccaagctgccgctgcaggaggaggagccagaggacagccagagtgagccctcaccatctgccaaacagcacaaaaaagccaagaagcgcaagagcctgggggctcccgtgctccacgctgtggccagcatggtgtctgcacccttagagacattgaggctggagcgtgagtggcagtccctggactgttccttctccccctgcctgtggggcccgacatggcacaacctggcgctctagcctctgccctgccctgggtctttgcaggaaaggcccagcgcctgcggccgctgtaccagtacgtcaactattgcaaccctgagctgaaccaggcagggaagggggacggggaggctgaggtggaggcagaggcagagctggccccggttcccgaggagggaggtgtggagcaactgcaggccttgctgcccttggcaggtgagctgggcccaggcctcgctttgccctgtcccagtccactagtgacccccacccatgccctggctcccctcggagaggaggctggagaggagcctgggggcttgcccagcttgggggtgagtgaccacaaggccgaggtggataagtcaacccaggtggacatcgacaagatgctgagtgtctgcactgctccacttgtccccccgctctctcctcagtacaagtgactgtcccgccccactggtggctcccctccttccacg

SEQ ID NO: 29048 - DNA, 1268 bp, Artificial sequence
  DNA replication origin
cggcacctcgggaggccgaggctggcggatcactcgcggctaggagctggagaccagcccggccaacacagcgaaaccccgtctccaccaaaaaaaaaacgaaaaccagtcaggcgtggcggtgcgcgcctgcaatcgcaggcactcggcaggctgaggcaggagaatcaggcagggaggttgcagtgagccgagatggcagcagtaccgtccagccttggctcggcatcagagggagaccgtggagggagagggagagggggagggggagggggagggggagagggagagggagagggagctctttattacatttttaaacattgcaagagcctactgatggttttggtgagctcagtatatatggttttctatagtatggttttgatgggctcagtatatatgtcttagtttattgactgtgcaggaactaggtctgaaatctttcattctttcagcaaatatttagcaccaactacatgtcagaccttgttttaggcactagggatatagcaatgaacaaaacagacaaaaaatttgttgtcttcaaggaggatacattctagcagggatggtggggagagacaaacaatggaagaatacacctgtttctgaaaagccaacatggaagtagagacctgaaggaaacgtgagagagagagagaaagccacgtggatgtctgcacaatagaggttcttggatgcagggtatattttgaaggtagagagccagcaagacttgttaatggatcagatgtgaagtgtgagagaaaaagaagactcaaggataactccaaggttttaacttgagcatttgaaaagtttgtgttaccagtttctgagatgaaggcattgtgggaagagtatgtttggtggggagaaacatcaggagtttagttctggacattttaagtgtgagatgcctattaaacatccaagtagagatgttaataggcggttgtttgcacccgtctggagcttaaagaggacctggctgataactttgggagtcatcagggaatagataacatttaaaagccatgacactgaatggaaccaccaagggagtgagtatagatagaaaagagaaatagactggggactgagccatggttactacagtcaccatcaggagaaatgagcagaaggaaccgagaagtggtcagagaggtaagaggaaaatcagaagaaatttgtgttgtggaagtcgggtgaagagtgtttcaaggaggttggaacctgccatgtcagatgctgctgataggtca

SEQ ID NO: 29049 - DNA, 1138 bp, Artificial sequence
  DNA replication origin
gtctgtgggactgagccctctacctgggggatctgatgcgattctccaggtagatatcgtcagaattgaattgaaggacaccagcaggtgttgactgcagaattgcttgcttgcttggtgtgtggggagaaacccccacacatttggtcttctgtgttgattattgtggtgtgaaagcagaggaaaaacaatttgaatttgtctttccactttcacaatgacatacctgttatgtaacccataaaactatttatgataacatgaaagatgcttatgtctggccagtgtggcggctcacgcctgtaatcccagtactttcggaggccgaggtgggcggatcacttgaggccaggagttcaagaccagcctgaccaagatggcgaaaccctgtctctataaaaaataaaaaaaattagctgggtgtggtggtgcatgcctgtagtcccagctactcaggaggctgaggcaggaaaatcacttgaacttgagcgcccagcagaggcgctcctcacatcccagacagggcggcggggcagaggtgctccccacatctcagacgatgggcggccgggcagagacgctcctcacttcctagatgggatggcggcggggaagaggcgctcctcgcttcccagatgggatggcggccgggcagagacgctcctcactttccagactgggcagccaggcagaggggctcctcacatcccagacgatgggtggccaagcagagacgctcctcacttcccagacggggtggcggccgggcagaggctgcaatctcggctctccgggaggccaaggcaggcggctgggaggtggttgcagcgagccgagatcacgccactgcactccagcctgggcaccattgagcactgagtgaacgagactccatctgcaatcccggcacctcgggaggccgaggctggcggatcactcgcggctaggagctggagaccagcccggccaacacagcgaaaccccgtctccaccaaaaaaaaaacgaaaaccagtcaggcgtggcggtgcgcgcctgcaatcgcaggcactcggcaggctgaggcaggagaatcaggcagggaggttgcagtgagccgagatggcagcagtaccgtccagccttggctcggcatcagag

SEQ ID NO: 29050 - DNA, 1265 bp, Artificial sequence
  DNA replication origin
cggaccggagagaagccaagcttaggaaactgccgcctccgccgccggaaatgaataacctgagcctcctagccaggctgcttaagctccgcccccaaaaagcgagcatgcgcagctcccggctacggcccctcccagcgcaggcccatccccgttatggagcatgcgcagtcctcctgccgtcccgcccctccctttccagagcccccagttccttagaaaccaggcggcgcgttcccggtggcggcgccctggactcccgggcccgcgcatccccgccagccttccttaaggcggatgggtggcccccgagaccccgtcggacccatggtttccagtgcagcgcggagtgggcgatgccagcgtgccaggtgagaggcggccaccggtggcgggtgagggcgaaagagggcatggcgcggccgggagcgggcgccgacagggccttctccgcggcccggcgccggaggttggaggcgtggacccgcagagccggggttggagggggcttgttccaactgcctgcaggcgcgtggagtggagggtcgccttgggattcgccctttccaccgcagaaataggacccgcaggcttggtggtagaattataggatttgggatcctggaagaacctgagacataacccatccttttaccagatgcaaaaacctagtctcccccgccctgtgccgagcggaccacctgactgtgtgaggatggacgctttgtggatgaggatgtgtgaggtgtagaagctcagacaaagggctcgtggggtagctggttcgtcccctttcagaatgagatgggacttttggggataaatctttaagaaacgggtgttcagttgacaggtggaagaagggacaccccagaaggtgcgagtggctctgccagctcccatgtgccctatggccacgtctcaatggccctggcctacctttgtatttgtagctctggaaggaagcagatggacttgagacaaaaggtgaagtgaggtcttcccatcaaggccctatcacacttaaaaggtgagggaggaagagtggacagggacatgagggcttgggaatggttgtgtgaagagtttaccctccagactacagcacgatctaaagaacaaggcaggatagaagagttgaaagctgtattggataggcatcagggaagcttatttaactgtcttatttatgttcattgttcccataatgttatcctgagggcaagaaagtggatgtccttttaaatgtccagaaagaactaggg

SEQ ID NO: 29051 - DNA, 1584 bp, Artificial sequence
  DNA replication origin
gacgccgcgcagcgggaagatggtggggacgcgtaccgtgtaggtcttgcggccgccctggaagtgaacgctgcagagacggtggcctgtggtgggctggaaggtggagaagcacccactgacgccggcacgcgacacgttcttgagccagaggcgccgcaactcagcgtcctttggaaacgtgtagaagtgcagcgccttgtcccggtgcgagttgttgtagcagcctggcacgcagcacgtaaagccaggcatggctgcgccgcgcggcccggcccggcccaccggcctcctgcgctcttcgacggcccagtggctacgccgccgcccgcccctcgacgggcggcgccgcgcgaggccttgggtggtatcccaccactgccgctcggcgcagccggcccgcccggcgccccgtgcccagaatacgcttcctgccggcccgcgccgcgccgcccgcctggctgcccgcctgcgctcgggagtgggccccggggacgccgcgaaggaccgcctgagaaagagactacgccccccacaatgccccgcgccagaagcggctcacttccggggcgggtgtgtgcggattcctgccgccttccaaggcactgcgatagcctccgaagagcagattctttccccagcccgtcttgtccccggcgggcgagagaggcgtattaggttggaacgctgtcgcctggactgctcctcacgaggacccgaatcctgataggggcgtggagcggggcggtgcgcgcctcaccggtgcgcaagcgcggtgggtatatgcccacggagactacaaatcccgtgatgcctcgcgctgaactaggcgccttccctccgaagcgccgcctaagggaaagatcgagttactgcggaccaggattcgggcgaggttgtgctgtttgccagaaccagttccccagccccgagcccctttgagtcgacggcattgctgcagcagagggagacgaaacctgggcctcggcgccccgaagggtctcaggagcccctttctttgcgttggggactctctcctgattcagctgctgcctgcgttgactaactgatctaaacaaagtctccagtagacgcctactatgtggctgacacggtgccgggagtttgcgggagtcagaccgactgggctcctctcttggagcctgactacctagacggataagcgtctgtcttttggataatagatctgaatgcacgcgaatggatgtctactcacaaatagtaatcgctccaaaggaattaacaggagagcagagaaatgggggggaggtggtgggggccaggaataaaaaaacgaacgaaagcttgggtagggagaagtagccaattcttgtcccaggaaccagtctgtaaggccacatggcagaaaagagctaggctccgccattaaagagcctggaaaggggtggcccgggtagggccaagcgtaggaaaataccaaactgggacatgttaaggatttggggttttattctgcaggccactgagagctattaaaggattttatgggaaaggatttgcattgtaacaatacacctccccccacctcaacttatttgaggg

SEQ ID NO: 29052 - DNA, 1015 bp, Artificial sequence
  DNA replication origin
tccacgcccctatcaggattcgggtcctcgtgaggagcagtccaggcgacagcgttccaacctaatacgcctctctcgcccgccggggacaagacgggctggggaaagaatctgctcttcggaggctatcgcagtgccttggaaggcggcaggaatccgcacacacccgccccggaagtgagccgcttctggcgcggggcattgtggggggcgtagtctctttctcaggcggtccttcgcggcgtccccggggcccactcccgagcgcaggcgggcagccaggcgggcggcgcggcgcgggccggcaggaagcgtattctgggcacggggcgccgggcgggccggctgcgccgagcggcagtggtgggataccacccaaggcctcgcgcggcgccgcccgtcgaggggcgggcggcggcgtagccactgggccgtcgaagagcgcaggaggccggtgggccgggccgggccgcgcggcgcagccatgcctggctttacgtgctgcgtgccaggctgctacaacaactcgcaccgggacaaggcgctgcacttctacacgtttccaaaggacgctgagttgcggcgcctctggctcaagaacgtgtcgcgtgccggcgtcagtgggtgcttctccaccttccagcccaccacaggccaccgtctctgcagcgttcacttccagggcggccgcaagacctacacggtacgcgtccccaccatcttcccgctgcgcggcgtcaatgagcgcaaagtagcgcgcagacccgctggggccgcggccgcccgccgcaggcagcagcagcaacagcagcagcagcagcaacagcagcaacagcagcagcagcagcaacagcagcagcagcagcagcagcagcagcagtcctcaccctctgcctccactgcccagactgcccagctgcagccgaacctggtatctgcttccgcggccgtgcttctcacccttcaggccactgtagacagcagtcaggctccgggatccgtacagccggcgccc

SEQ ID NO: 29053 - DNA, 1363 bp, Artificial sequence
  DNA replication origin
tgccggcgtcagtgggtgcttctccaccttccagcccaccacaggccaccgtctctgcagcgttcacttccagggcggccgcaagacctacacggtacgcgtccccaccatcttcccgctgcgcggcgtcaatgagcgcaaagtagcgcgcagacccgctggggccgcggccgcccgccgcaggcagcagcagcaacagcagcagcagcagcaacagcagcaacagcagcagcagcagcaacagcagcagcagcagcagcagcagcagcagtcctcaccctctgcctccactgcccagactgcccagctgcagccgaacctggtatctgcttccgcggccgtgcttctcacccttcaggccactgtagacagcagtcaggctccgggatccgtacagccggcgcccatcactcccactggagaagacgtgaagcccatcgatctcacagtgcaagtggagtttgcagccgcagagggcgcagccgctgcggccgccgcgtcggagttacaggctgctaccgcagggctggaggctgccgagtgccctatgggcccccagttggtggtggtaggggaagagggcttccctgatactggctccgaccattcgtactccttgtcgtcaggcaccacggaggaggagctcctgcgcaagctgaatgagcagcgggacatcctggctctgatggaagtgaagatgaaagagatgaaaggcagcattcgccacctgcgtctcactgaggccaagctgcgcgaagaactgcgtgagaaggatcggctgcttgccatggctgtcatccgcaagaagcacggaatgtgaactggtgccccggcagcctgctggactcccagaccccatccagccaggggaccgcaggccattgttgaactcctctatactcctgggcactggttgacagtactgaggcttaaggcagctggactctcttgctggtgacctggcatcctcaattgtttcctcctgaagtggaagctggggccttagactctgccctggtgacaccagcaattatgactttgtctacccttcctccccagttattgttgcagattctggttaagcagaggcttcagaaccactgaacttgaaacttaccctctagggatgcaggtgggatgtccagggactataggtttgggaaaaccataccttaaggttggtcagcagtcagacaactctaatgtgtgtagtgataagagattcaagtaacatcagttctcctccttttcatgcttttccttcccaggtgcagcctgtgattctgatggggactggtaaatctgtgcctctgcctcctaggacttattttcccaggaggccatttacaaggggatctggatg

SEQ ID NO: 29054 - DNA, 1545 bp, Artificial sequence
  DNA replication origin
cggagactttcagaccccataaaatatgactcccttctctttcttacttatggacaaagccatctgcctggggacttgtctgtggcaacatgctgggatggtcctaaaactcaagtctctgtttcccttctagtcccttagcactgagttgggaaagtggtggggaaggagtgagacataggttgtgtaggtggctggttgggggatggactggacctctgtcttcctagggttagatctggctggtaatcaggtggtggaagcactgcagtgccctttgttgctcctattgggccagtctcacatcttcccggtcggagcaaggccttttccaggatccagccatgctcttcagtgtatccttgagctcctatttattgaagggacttctgctgtttctgcattggctcccttgaggctctcagcagtactccctggaccctccctggtgtctggaggttatgggcagtgttttggcttcttagggagaagaagacagttcacagagcaagggagatcccagatgcagatgtataagcggggcaatgcagagttctcactagctgagtaataagcatctagtcaggcaaagtgtagtgttgacagacctgagatttaaaaaacagaagtgtggtccggtcttaccagccatctcttggaggggtagcctgtgggtgggggaaggtgcaaaactcttgtggaagaacaggagtactgagagacctccggccaggaaggaaggctaggagttgcctggagaggccttgtagccatttcccttacctgtggtaccccaagttggctgcagatctctttgccaagcacaggtctgacctagagactggccttaccacaaatgtttgtgttaccaagaaaacaaatgggcgttgaaaggaaagggcaatgggtaggaagagaactatttacaatctggtcacttaaatcacagcgaaattttgggtaagtcagtcatttctctttcctcattaataaaaatgaaacacttagctgctctatctgctgcaaaaaaaccttacagaatgttttggggggacccctgactgtagaagtttgagggtaacctctccaaccaagccccacctgagggacatttgagtctccggcccaagaatagcctagcctgctcgaaaccagctttgggcccgactcgccgaggtgcaggcgcacgaatgttgggattgcaggagctgtgcgttccgcccgggctggttaaggccacacagctcggaagagtaacagcggcagccatagccccaaggggagggggtttcgtgagcggaaacggcccaggggcccagggaggggcagctgggccagcttggggccgggctgggctcccacggaggcggggccaacccccaccccagtgcacagactgggcggggccgagccagctgagaccaggagacaactgagccctgaccctagcctggcgccaacctctagtgttccagaggcttccgctagaccacaattctcaggggcttgccccggcagcctccctccctggcttagcctcacctc

SEQ ID NO: 29055 - DNA, 1531 bp, Artificial sequence
  DNA replication origin
cgctctctgggctgccgggaggctccgctgagagtccccgggcggcccctcccctcccccccccccggcggcccgaagccgcgcggggcccgggccatgtgtcgcgcgcggctccgcctcccgccggtcctgtgaggcggcggccgggggtaacgcacagagagccagccgggcgcctatctgggccgtaccgtgctggtggctggtgcaccggcctgcgccatggccaggcctttttctctagtcaggaccgtccggatggggccttagggccccgccccgtctagcctggcccggcctgcgcgagccccgcaagctctgcaggctggctagcgggcagaccccagccccacgtcctgctacccacctacgaaggatccggggatgggcagcgccacccggcccgctccagagtcagcatgggtaagggcgcccgcctgccgcagccggggcttgggcccctcaccctgttcccgaccatagcccggccggggtgtaggtgaacgccccctccttgtctgcccctcggaagtgtacgtttcttaccgcgccctttgtggagcccggactggagttctcgcagggagggcagggtcagggaatatgaggcgggaggggattccacgggagactttatccctgtcttgtcttagaggatctgggcctgatggggtgaggcggctcctgccgggtaggcccagcccacgcccttctctatcagtgaccaggccccagcagcaacacagaattgccccgcaggacaggatgacttcataagaatgggatgttaaggtgggacttaatgcacgggaagtagaattcaggcctgaggttcttgagcctagtgctaaaccagaacctgggctggaaggggctttggggggtggggcacgtagatttcagactttgtggggccctcccgaagcctgggtggcagaactagggctggaagctccagaaagtctggcttcccctcacttgcttgctcacttcccaacaactggagctgcctgtaaacaggcaggaacctggttgctttatgaaattgcccttactgatgccatcagagaccctactgagttctgggggaagagttatctttgaccaaaaaatactatcctgatatcctttgtaaaggcgcttctgattgagagatggtaaattaaggaaccagtccagagaagaccttgggactaggggagagatggcatgtaaagcgttgatttctctgagccgcagtctttccagagactaaagaagtagctcaggcctggcgcggtggctcacgcctgcaatcccagcactttgggaggccaaggccagcggatcacctgaggtccggggttccagactagcatggccaacatggcaaaagcgcatctctactaaaaatacaaaaattagctgaacgtggaggtgcacttctgtaatcctagctactcaggagactgaggcaggagaattgcttgaacccgggaggtggaggtcgcagtgaactgagatcatgccactgtactccagcctgggtgac

SEQ ID NO: 29056 - DNA, 1430 bp, Artificial sequence
  DNA replication origin
ggctttaggtggcccagtgcgtggacgcttacttcagccccgtgggactttcctgacctcgcggacacaggggcggggccgccgagggggactggctgcgggaggggtttaggcttccgcccccagcccggaacctttcttctccggccctggcaggttccgggagcctcggctcgtgggtgccggaagtggaggcggttggtggggttggcggggctcagcgacgctgcgcgggtggcggtttgcgaactgcgggtggactgtgtagtgaccggcgtcccgctgtctcgccccgtggcgggtgagcgagggtgcgtggtgcgcggcggcggcggaacgaacgcggtgcgggcggggcgcccgccgcagggcccatggcctcctgcgcgagcatcgacatcgaggacgccacgcagcacctgcgggacatcctcaagctggaccggcccgcgggcggtgagcgggggttgcgggggtgggccccaggcgagctgacaaaagggcggcgcgcgtctgaaccgccattggggcccacagctcccttaggactagctctggatcctcccggcgggtaagggtggacggggattgactgtgcccctcgaagggcgcagacccctgggtgtgacccctccctatcttgtcctcaggctgttctgccttgtccttcagcgtctcggttgaaggtgaggcgccttctctgaatccgctggggccctctggtttcctggccccgaggtctctagtgttcctgggactggcctagctcctcttccctttctccatggttcagaggcctggtctgggctccgtatatggaattctgggcccaggcttaagcgcgatgctgaagagctgccggtccccctccataacttgcccttctctctggaataaagactccaggcctcccgttctgaaactgatttccaggaggaaggtgtccagtctcaattccgtgttctttctgggatgaaggcaaatcacagaccgcaccaccctgactgaattatgctacaaatatctgcaagccctaattggttcccattcattcatatttcgctttggctcttaatgatacctcagaactagtcttgcccccaaagattccccaagacacagctaacagggttgtaatatactgttgtcattgaaagaaaggagtgtctcgatactgtgatgggcgtgggaagggtggaggctggtgagtgcagagtgcaggtctgagaggggagactgggctaggtcttgtaatgtgaacaggggcttgggtgtcaggaaaggcacccaaggcacctatggagaagccacctattaggaagaggaaatagcacgtgtgcaggcactagtttactgacaggtttagggatctctgaagtggccggtgatgatggtgtgggcgtacagtggagaattgtgtttcctcagat

SEQ ID NO: 29057 - DNA, 804 bp, Artificial sequence
  DNA replication origin
cataacggagcccatgtggtcccgagtgatggggtcactgtggtccaggtgcatcacggcctcttccaggtagctggggatgggggggaaaggacaggctacaggtgggtgccagcagacgggagcgccccctggtggcaccgaggcccagagggaaccctctgggtgaaggcagaaaggactggtggagaaaattagggagaggattcaggcagaagtgggcgtcagcttcaaactgctccctcccactgccccactccccagctcatctccccatccctggctgtccccacttacctgagcttgaggtcagttcgagtgccaaggtcagatgccagctgctggatgagggaaaggagcacaggctgggagagcgggcagggtggctgcccaaaaacctgggctgggtccacagtttcacacacatacagcaccaggttcaggtcagcagctgtcagcgcctggaggagaaaaaagcagcagtgtttatagcaaatatcaggatggaatgtctgcttgtctgaactgtgtggcctgggggaggatgaccacagggtgggctagtgagagctccagagggactcagagagagcctgtagggctgtgtagttaccctaggggattgggaaatgggttcctgagaagggtagttgtaaagcaaggtgggctaggtgggaagaaaggggtccaggaagaggaagcagcagggacaatggcctggaggccaaagggaaccaagaacagtctgctggggccagaaggtgcaaaggtggtgggtggagtagaatgtatggtatgtgggcc

SEQ ID NO: 29058 - DNA, 1060 bp, Artificial sequence
  DNA replication origin
taaatatttttggagagacaaggcaggatgcagaggtattgggatccaggccagaccctcagagaggacttagggatcctacgactggtctataagtcctgccattggcatgtctccctttatcataagaggggatgcaaattttggagtccttctcccataactggggctgtttgtgcctctcactttctgtcctgaagtcaccagcacaccttcctggagcccttacaactcttctccaccctggcacccagcgttcccacacaccctatgcccagcctggcttggctgggcgagaagggggtgtggcccgggccccggatgcccgcactcaccgaggggcagcaacagcaacggcctcagggcatggggtggttgccggcagcagcagcggcggcggcagcagcgcatcatccctggctgagagcctagtgcaggagctagctgcttggagtgcagcccgtccgcccagcccccggagggagggacggtgattggatgggagctgggggtggggctccgaacccagccggcggctccgcctccaacacccagatgggaaaaggagcgaggagacctcagagagcagaaattcgcaggagcacaggctggtgctgggcaggcccctggaccctcactccatagaaggagggagaagggagatctgggaaggcagttggagcagatgagtgggtaacccggccccttggctgggttggcctcgacagagctccacgggcaagagatgggcagagaacgaacagacggcagttatgagagtcacaccaaagacaaaccaaaagcacacacatactccattttattccaaaagcatttaattgaatttctcaatgtttttcaaaaacaaaaagatccaaattagaggtaaaaaggaacatggaaaattccactcaagtggtgtcacgatctcagggtcatgctccaggcatggcagaacccaagcaggcgcaatacctgccctgggcccagctaaaccttctgactaccacacgctgtagaccacggccagtgctccctgctccctgacccccaaacaccc

SEQ ID NO: 29059 - DNA, 1044 bp, Artificial sequence
  DNA replication origin
caccgcacagagtgtgcaagttattcggacggggggcctggcgagcttcttgctgtagtgattcccacactgcagctgcctcctccggacagcctgacaggacctgagaggcacaggcatggaagtcattccaagacctgttaagggagtgggattagggggattaggtgaggcaaggagactttagcttgggaaataaaaggttcagtccccaatggtggcacaggttgggccactgcctcacacccgccggtacctgcagatggtctccagctcgcctccgcggcccatgctgtcccccaagcggatgagacactcggcgaagccctggtatatggtgtcacatcggtttgggcccgctgcagctgctgccaggggaggtaaaaggactagaagtggggcgggggtggggtggggaaggaatggtagataggatgagccaggctcatcccccagcccccaggggcttgtttacctgggagcactctggggatgtgactcagcggaaaaagggtgccccagggaactaaagggcaagtctggggattacctacccaggcccccttcaaggtaggacccagactgggatttgtacaggggaagggggtgttgtgtaccccaggtcagctcttcctttgagcttctggggccgcaggtggggtgacaagggtccatgtaaaggagtcaggacagggtggaggggagggaggtccagaggccccggaccaggagcaggtgcatctctctgcggtttagacaagctttgcttggccctccgaactctctctaaagataaatatttttggagagacaaggcaggatgcagaggtattgggatccaggccagaccctcagagaggacttagggatcctacgactggtctataagtcctgccattggcatgtctccctttatcataagaggggatgcaaattttggagtccttctcccataactggggctgtttgtgcctctcactttctgtcctgaagtcaccagcacaccttcctggagcccttacaactcttctccaccctggcacc

SEQ ID NO: 29060 - DNA, 1247 bp, Artificial sequence
  DNA replication origin
gacgcggggcggctgaacagcaagcaggcagggcaaccgaccacgtccaccaggcccaagcgggcctggagacgggctatccagcacgacagcacgttccgaggccagtccagactcggacgccgggaacccgagcagccatcgcccggcctgctctccaaccctgtaggccctggcgcacggggcacgggccgacgctgcaggctgaccaggggcaggccccggagcgccagaaagcgaccacgaccacagttcggctgcccctcccgcccgtcgggccgtcgtcctgggccgggccgcctcacctcgcgcgggcggcgggctcttcggcgtctcggcggctctgccggccatctccgggcaatggcagcggccgccgccgccgccgccgccgccgccattctcgggcgttagcgtcgtggcgtcatcacagcgcgcagctgacgccaaaacaagcctacggggcgggtcgggggcgggtcgggggcggactctcccgaaactgggctacgcggctggcggatctccgagcgtggcctgccaatcaacctcttcggggcggggacgggcactctcctgaaggggtgggtctatttgtcgctcaaagtaacttgaccgctgcctgcgagacgggtcggtgatagaaaaaggaaggatcgcgggaaatagggagaaagtttcaagtttctggttgggggaaaggggactctgtaatgcgagcttgggtaaacaatgctttccaacagaggtttctggaagtgcctctggaactccgcaaaggatagacttaattttcattaacaaaatctattttttaaaactgcacttagaataatttcaacactccatgtgttgaatttggcctccatcaaagaagagatgcaaagggttaatttgtagataggtgaagtcaatcttgggccaacttctggactcatggttatttgttgttgttaatttaatttatatgccgagtctgaaaagcaagcggatttttaaaaaattgttaccattcacaatgacttctctataggatcagaactggttcactttacagtcaacccaacttggaggggttaaaataggtgctgcagatggtaagtgcattgtaacctccatccatcttccccatttcagtagctctgtattcaaatctttattgagtatgtactttgcacatggaactgtctttgattgactgtataagctaatgttatactttaaacctaaaaataaattaacaccaa

SEQ ID NO: 29061 - DNA, 1281 bp, Artificial sequence
  DNA replication origin
accgacccgtctcgcaggcagcggtcaagttactttgagcgacaaatagacccaccccttcaggagagtgcccgtccccgccccgaagaggttgattggcaggccacgctcggagatccgccagccgcgtagcccagtttcgggagagtccgcccccgacccgcccccgacccgccccgtaggcttgttttggcgtcagctgcgcgctgtgatgacgccacgacgctaacgcccgagaatggcggcggcggcggcggcggcggcggccgctgccattgcccggagatggccggcagagccgccgagacgccgaagagcccgccgcccgcgcgaggtgaggcggcccggcccaggacgacggcccgacgggcgggaggggcagccgaactgtggtcgtggtcgctttctggcgctccggggcctgcccctggtcagcctgcagcgtcggcccgtgccccgtgcgccagggcctacagggttggagagcaggccgggcgatggctgctcgggttcccggcgtccgagtctggactggcctcggaacgtgctgtcgtgctggatagcccgtctccaggcccgcttgggcctggtggacgtggtcggttgccctgcctgcttgctgttcagccgccccgcgtccagagcgggtcaggttgatccaacctggttgtccttgtccttactgccttctcgcgcccggcgcctactccacacccctcctttgcgtctgccaggggccggcggggcagctgatcgcttccttgtgcaggctgggaaatagcaggtctgagtccagctgggttgcttgcttggcaagcttgtcattcctctacctgcaaggggaagcctagtcccccacacttagtccccctccataaagcggctgaagtgataattcccacctgaaaatctgagtaagtccttcactgcctgaaactagttccttagtgccttcaggacaaaggccgcacttcttagcaaggcattcagggctcttcgtaatctggtgaaggtttaaccagccaatcaacaccggagcacttctgtgctccctttacgtagtttattgttgttaaaacgtgtggcgctcctgttagctctggtttcatacctttgtgttttagtattactaattttgagacaaggcctctattgcccaagctggagtgcaatggctcattcatagctcactgcagccttgaactcctggactcaaatgatcctcccgcctcaacctcccgagtagctgagacaagaggcactcccctccacgcctggcta

SEQ ID NO: 29062 - DNA, 943 bp, Artificial sequence
  DNA replication origin
aataccaataagcacccatgtgtttcccttctggcagacaagagggcctccggagtcaccctgagagggaagagggagggagaattgagtagggggggttggggaggtataccacaggacagcgcagaggagcgggtgctggggcttacctggcacgaggaggcacctgcgccacctgcacagatcatggagtcagtgatacttgagccccagtactgccggcactgattcacagtgaccaggggcaaagccacctgctgcagatgtgctggtgtcacattgcctgtgggccaggaggggtggtcacatggggcccagaacactggtccccaccccagtcctcccaccctgagctttggcctgagtccctacccacgccactgaggcgaccccagccggtggtgacacacgtgaggccttcagtcagagcctcgtttgaggatgccaggcaaactggcgagatgcgtgttgtgtactgggctggcgaggcgagcttcagcagcgtcacgtcattgttcatggtggtagagttccagctagggtgtgtaatggcctgtggggtcagaaacagtccatgttctgatgggtgctgagcagggtaggccagggcatgtcctgaattcctcgttcccagcacccacccacctgcactgcccacttttcctccgtgtctgcagcccaggcactcacccgagagacggacagaacctgcaagggctctgcgtttgatgatcggtcatactcgcccaggacaacaaaatggcggccagggctgcaagggggtgggattaggcagctgcagggaggccagcgcgagagggggacagccaggggaggaggcaggaagaggcgaggggcggggcaggtggaatgcaggcactcacctgacattgcagtgggcagcagtgaccacccaggactggctgatgagagaaccaccgca

SEQ ID NO: 29063 - DNA, 779 bp, Artificial sequence
  DNA replication origin
aattagccaggcgtggtggcacatgcctgtgatcctagctactagggaggctgaggcagaagaatcacttgaactggggagatggaggttgcagtgagtggagattgcactactgcactccagcctgggaaacagagcgagactccatctcaaaatacataaataaacaaataaacattttttaaaaggcccagcacagtagctcacgcctgtaatcccagcacttcgggaggctgaggcaggaagatcacttaaggtgaagagtttgagaccagcctgggcaacatagcaagacctcatctctactaaaaaacaaaaataaattaggtgtggtgttgtgtgcctatagtctcagctaaccaggaggctgaggcaggaggattgcttgggccagggagattgagactgcggctatgatcacgccactgcactccagcctgggcgacagaatgaccctgtctgaaaaagaaaaaaaaaagtaggcggggcttcctgaggaccagggtgtgtggggatggtgggtgaggcccaggatgtgtggggatggtgggggcggtgctggctgtcctccctcgggcatgtgtctttctgctccttgtgtggcttatgcagcaatgggggccacagagttgtgctccagaaagggggaaacaagatggtgtctgtttgatgtttattggtggtgtctgatgagcgtttctcttgtccagactgtgtttctctctccagaccagctcccagggtacagggggtggggagtaggtggtagctgtgtcagt

SEQ ID NO: 29064 - DNA, 1027 bp, Artificial sequence
  DNA replication origin
ggcccagcccaggagcgctatttattgcatatttattgtttggatgtcaccatcagagacgaagggaagggtagccagggagggagtccagcccagctgcctgcaggaagatctggctcagtctactatgggcagggccccccaccaagctgagccgaatggagacagctgagctgaggcctgactttttcaataaaacattgtgtagttctgggcctcctgctgccccggctctgtttcccctggcgccaagagaagaaggcggaactgaacccaggcccagagccggctccctgaggctgtgcccctttccggcaatctctggccacaacccccactggccaggccgtccctcccactggccctagggcccctcccactcccacaccagataaggacagcccagtgccgctttctctggcagtaggcaccagggctggaatggggccgcccggctccccatggcagtgggtgacgctgctgctggggctgctgctccctcctgccgcccccttctggctcctcaatgtgctcttccccccgcacaccacgcccaaggctgagctcagtaaccacacacggcccgtcatcctcggtaagcccccaccaggcccctgatgcaccacgccagaccctggggagcctgggccccagcccctggcagctgacctggccaaagcccttctgccctgcataagccccgacataagtacctgccctggtgtggggaggggccaaaagcttgtcccttagaggaatgacgtcccttctcccaccacactgtgactctcagttgtctaacccagggggggcggagtgggggacggggtgtgcctgaggtcttggctggggcatcacaagctgtggtcagtcacagccacaccagactctgggccaagccccaccactccttccttggcccccacccaccaaggacaagatgcccagcccaggatcggtgagcaggagaggcccatccatgcccggcccctattaggcccagcccccatgcccccagacctatctg

SEQ ID NO: 29065 - DNA, 931 bp, Artificial sequence
  DNA replication origin
ctgtggaggagtcctcggagccagatcgcagaggatgggcaagggtttgctgttggaggaggtaggaaggggagtaacagggcagagctgaagagggtggtgcaggggcagcaggaagagctcagtgcctggagactctaggccacattcaggcctctggcctgagtgaccagctggatgagaggctgccatgcatgaaggggaggatggaagataagctggaccatttgaatgcaaccagtcagagatacttaagagtcactgcggtgggcgtgggagtcccacgcatgggcagggccagctgcatgagccctccaggaaggcacccgaggacgggtgcgcaggaaggcaggaggacccacacagggcatgccagggggcaggggctcccagcaggaggcccgagataaaggctgagatgtagcctctgatttgggcacaaggggggtcaccacccaagatggctgtggcaaaacagtttcaggtgtgctcttgggtgagaggaaggggtgtgggggggtggacaagagggtgctggctccagcaggcctggctgtagctgggatggagcctgctcaggggtacagggcccctgtcaagtctgcaggctgagtgggcagggaagaggaggcctttcataaccgcacaagcaagaaggagcgtcagccacggagcagggtgggcgaggaccccagcctggacagagtcaaccaaacaagcgctgcctcggggtccctgggagtcaccacatgctggccactccctgcaaggcactggcacgcagatttgcctggctgattccagaatgttaaaagcaaatgactttgaaaatggatgggttgggcatggtggctcacgcctgtaatcccagcactttgggaggccgagccaggtggatcatctgacgtcaggagttcgacaccagcctggc

SEQ ID NO: 29066 - DNA, 1611 bp, Artificial sequence
  DNA replication origin
tcggcccggggcggcggggacagcggcggggacagcggcgggcggctgggacggcgggtgcggcggggccgagcccgcacgatgcctcacttcaccgtggtgccagtggacgggccgaggcgcggcgactatgacaacctcgaggggctcagttgggtggactacggggagcgcgccgagctggatgactcggacggtgagggcgcgttctgaggggccgtggcggggcagcggggcctgccacccggggccgccatcccgggcccgcgcccgcacctatcccgggaccttgcgcgcacacgtcggtgcggactcaactttttttggaccgcgccgctgccactggctccccgccctgcgcgcgcagacacgattttcctcggcccccggcgcccgcgcccggccgctttctccaccccagctcctcccctgtgggccccgggcgggggctgcagacgtggccgcccagggaggccagccggccgggccgcccggcttggggacagggccgagaccccatctcaggcccttcccggcccttcaacttcggtgaatcccacatccttttctcgcctcggttcctcatttgagattcagcgtctttgcctttgagacgatccgctccccaactgcccaaacccctccgtgtgcctctctgcgcctacctgcactctggccagagtgtgcctactggggggtctatgggtaactgcccgtgagtgcgccggtgtagatctgtagggacagtgggcctcagtgaagcactcacatggagccggacgtgtctaggcacttgaagtgagttaactcgtttaatcctccagcatcacccttgggataagtactgttactctcattaggaagcagtgaagggaggggtggcggttatataacttgcccaggggcagtcaagcctgggtttgagattccagcaccttaactctttaacttaggtgccagggccgagaggtaagccccatctccctcctccttcctcccaggtgcccgcgtctctccacagccctttctctatctcctaccccaggaggccccccagagggctgttcttgttaaggcccaccctcggagcacgaacacggctgaggacatgtgtctgtgtacgtagtggcatatgcatgtgtaattgtgcttgtacaagtgtgtagctgtgggtatcacagggtgaaggctggttcaggtcagggcattctcacagcccctgtttcctgcagggttgacagtgatgaggatggtgatttgactgatgataaatgcctgtgatatctgtgaccgatcatgatggagatatgtaggaagtgtgtggttgacacgtgtcaggtgacgttgtctggacctctgatccatctgtgatggtgacacgactgagatgatccatgcccaatgtgaatgatggctatgtgtgtgtatcacttgactgccatgtgcagaggtagcacaggacagtggcatgggctgctggacattgcagaggttttacaggcttgacagctgtgtgagtgccccagcctccatgcccttgtctgcccctagcttgattcaagtggtcaaagcaaaagccagcattcctgcttccctaaccctgggaggacc

SEQ ID NO: 29067 - DNA, 1940 bp, Artificial sequence
  DNA replication origin
tccaccaatccatttctgcctgcaatgggaactatgaagggaaaggctcagggcagcccagtccagatgaggggtggggtggggtggcagggcatgtgtctgagaaatctgaggggaggtggtgctccccaccaagacctcctggatcaggaggttttttgtttgtttgtttgtttttgagatagagtcttgctctgttgcccaggctggagtgcaatggcactatctcggctcactgcaacctctgcctccgtggttcaagtgattctcctgcctcagcctcccgagtagctgggattacaggcacctgccaccacacccagctaatttttgtatttttattagagacggggtttcaccatgctggccaggctggtctcgaactcccagcctcaggcgatccacccgccttggcctcccaaagttctgggattacaggcttgagccaccaggccggccttggaggttttttgtctgtttgagacagtgtttcgctcttgctggagtgcaatggcgccatctcggttcactgaaacctctgcctcccgggttcaagtgattctcctgcctcagcctcccaactagctgggattacaagcacccgccaccacgcccagctaatttttttgtatttttagtagagacggggtttcactatttgaccacgctggtctcaaactcctgacctcaggtgatcctcccgcctcagcctcccaaagtgttgggattaccggcgtgagccaccgcgccaggcctggatcaggaatttgataagtgagggtagggacagaggctaggtagatgtcccccagagtgaacagtgggtgatgcccagaaactataggtctcaggtgagagagagagatttgaagggctgaggctgcgaggtgggtggcgagggatgcgcctgcagaggtcggggtccggccgcattgggcagggccttatgggcccggagctagtaggattttccttcagaagaggcggctctacgtgagcaggggcgagggcagggagtccagtaggaaggccgctactgtgggcggccgaaggtggcgtgaggggcgggggggtcaggtcggcgggcccgctgcgggggccctgggggaggggtcagagggtggtaagctcgggggtcgtcttgcggggcccagcggctctgattccgtaccccccaccccaagggctggaggctggcagtaggcgtagtcagaggacgccacccgagccacgcgagggagaagagtggagatagacaagtaagatgggctctggggttttctgatagagaaaaaaatagtaaagccagctagataagtaatctgaagcagtggagaagaaagtgaaagaaacgttaaaagcaaataagtaaacggcttggatagaggaacacccaggaggcgagatagagaaagttaaaatgaagggacttggctacagcacccagtgcactgtcccaaaaaggcaagcgaggcaagcggggcggggaagggtgggtgtgcgtgttcttcctgcggaggacgcagcagcccctggggagggaccgagaatccccagctgcctccaacaggagaggctgcagctagagggcccagggctgggacgggaccttcgcgggggtctggttcccagggtcgcggagaaatgggatgcagacgctggaaatgggaaggaggtatacggggttggtgggaggccctgggcaggtggcttctgcagtcctgggccggtccggcctaccctgccccgtccctaagtaacagagcgcttcgtaagcccagggcgcagagccaggacactccgcgacccatctcacggagccctaaaacaaccccgaggtggaagtgtgtttcccccattttacaaatgttgcatctggggctcagagagggcggcctctcacccgaggtcacacaggaatcgggcccgcccccaggccg

SEQ ID NO: 29068 - DNA, 1402 bp, Artificial sequence
  DNA replication origin
ggagccagcgctgggggtggaagggcgaggagtcctcgacgctgcagcggcggttccggcccatgggggcgctctcctgcttgggggcggaaaagccgtggcgcccccttgcgtggcgcgtcggtctcagagtcgcgtgacttcaaccccctcttcgggaggctgggtcgtcatgatccggaccccattgtcggcctctgcccatcgcctgctcctcccaggctcccgcggccgacccccgcgcaacatgcagcccacgggccgcgagggttcccgcgcgctcagccggcggtatctgcggcgtctgctgctcctgctactgctgctgctgctgcggcagcccgtaacccgcgcggagaccacgccgggcgcccccagagccctctccacgctgggctcccccagcctcttcaccacgccgggtgtccccagcgccctcactaccccaggcctcactacgccaggcacccccaaaaccctggaccttcggggtcgcgcgcaggccctgatgcggagtttcccactcgtggacgggtatgtaggtgcagcgtttgggcaacgcggggtgagcacacccttgggcaggagaggaggttctgagcatgctatcaaggaggctatcaaggaggctccctcacaccacccctggatgccctctctcctccatcacccatgggtgcccttccccgcattactccattcctggtggaatctaaccccctccctccaacccaacctcaggaggtctctatatggtctgtgtgaggaggtgcctggtggggtggaggagggtagacccaagcacctgatatatcctgactgatctggaggcggtgtttccatctgaccttcacacccccagccacaatgacctgccccaggtcctgagacagcgttacaagaatgtgcttcaggatgttaacctgcgaaatttcagccatggtcagaccagcctggacaggcttagagacggcctcgtgggtgcccaggtaccacagggacacacagggtgccacagcatggctgctgggggatgttggggtcacagaaacctgggtcagccagcctctgggtgactaaatacaatggggcatgcagtgtgccatcatgtggtttctaaggagagtggggccttggaggccaagacaggctagctgcatgtatgcccaggttctgtggaaacacgcagaaaatgaccagaaaatccctggtgagtgtggggtctgccgtaaccacaaaggacatagtggattggccttggggcattcacatagcacatggactaacagcagttttttgcttgtttgtttgtttgcatttttgagacagtgtctccttctgtcgcccaggctggagtacagtggcacgatctcggttcactgcaacctccgcctcccgggtt

SEQ ID NO: 29069 - DNA, 1066 bp, Artificial sequence
  DNA replication origin
ctgccacgtgggggaggctccaaaaaatgaagcggttccaggggtgccaaggttcagagcagagtcttgagagcctgaggggcaggaggaggcaaaggtctctgaggacgaaggggtttggccacagtcccggaagatctcaggtcgtggggcttctgtgagcgggcacatcccctgtgcctgtgtgattgtgagcttgtgtgcttgtgtggttgggggtccttcctggaggaggcatctaggttgagggccccaggccgggaatggggtggggcctgtcgtcaaggaagggactcagccctggaggtttctgtgagagctcaagccacaggagccacaagataagaggagtgtggctgcagaacccaggtggcagggctttcctcaggccccttactcctgacctggacgaggccggggcttcctcaaggaggtaggaggtatcctggccagcagatcagccagaagctctaggaggaaggtgctgcggccggggactctgctgccctagacaagacttcatttccttccatgcagatggctgtgtgggttcctgctctgttgagtgaatgttccctggcagtggccagatgcttgctgcgctctcatccctccactggggtcctggggaggtgtggcagctccttaggaaggagctctttcctaaggctgattggagaatgtgcggtcggggcggggggcggaggagtgctcctgacaggtcctagtagctgggagattccccagagtataggcttgagggcctaagttacgggagagagaaggtcagggccagggggccccttcctgaatccagtccacagggttaacccctcatttccagagcctatcttctcccccacacccacccacacaacccagcaccaggaaatccagagcccagagcactgtggtcacagggacacatgtggccctgggtgtggccgggacacgttgcaggcggttggggacatgacgtggtctgcagatctcccagggcagggcagagggccactgtttgggggaagcaccccaggccctctctcttagagagagagcctagggg

SEQ ID NO: 29070 - DNA, 911 bp, Artificial sequence
  DNA replication origin
gtggtcgatgggactgggcgctgtggagcagggggcggcgctcaccggggaggctccggccgcacaggagcccatggagggggtgggaggctcaggcatggagggctgcaggtcccgagccctgcccccccgggaaggcagctaaggcccggtgagaagtcgagcgcagcgcctgtgagctggcactgctgggggacccagtacatcctccgcagccactggcccgggtgccaagcccctcattgcccggggccagcagggcccgcgggccgctccgagtgcgggcccgccaagcccacgcccacccgaaactccagctggcccgcaagcgccgctcgcagccccggttcccactcgcgcctctccctccacacctccctgcaagctgagggagctggctctggccttggccagcccagaaaggggctcctacagtgcagcggtgggctgaagagctcttcaagtgccgccaaagtgggagcccaggcagaggaggccccgagagcgagcgagggctgtgaggactggcagcacgctgtcacctctcattaggagctgccaatatcagtggcacagacctgagcacagggataatttggggtcagaggctacagtctaagttagctagatgctggcagtgggcagagtggaaacaaggcagaggcggggaaactcagggcctgactccagagccgaccttaagtgtcaccgctgattcctccttactgtctcccaccaaccctgcttcaaagcatctccaaatcctgggttcaacttccaaacatgtcccaggaatgtctccttcctgttcccactgcttctcccccttacaggccccttcattccttacccctcctgatctcctggcctccagcccattccctacagaaaagccatacctatttcttcca

SEQ ID NO: 29071 - DNA, 1284 bp, Artificial sequence
  DNA replication origin
ggatgcattggatcttgttttcgttttgttagagatggggtctcactctgtcgcccaggctagggagcagtggtgccatcgtctctcactgcaaccttaaactcctgggctcaggcgaacctcccacctcagcctcgtaagtacctggaaccacaggcatgcaccacttttttttttcctttttcttagagttctcattatgttgcctagactggtctcaaacctccggcttcaagagatcctctcacctcgaccttcaaattactgggattacaggcatgagccaccatgtcctaccagactttgttaaaagaggaacaggccaggcatcgtgggctcacatgaacactcatgccccagaagtaaacaagtgttagccaaccaggaggcctatcctccccctaacctcacccaaagccatctctgtgccctcccccttgcaggggaaacagcacacactagtgaaatcttgtcttagtgtgtccggaattggtgggttcttggtctcactgagttctagaatgaagctgcagaccctcgcagtgagtgttacagctcttaaggtagcgcgtctggagtttgtttcttttgatgtttggatgtttggagtttcttccttctggtgggtttgtggtcttgttggctcaggagtgaagctgcagaccttcgtggtgagtgttacagcttttaaggcagtgcgtctggagtcgtttgttcctcccagtgggcttgtggtctcgctggcttcaggagtgaagctgcagaccttcgcggtgagtgttaaagctcataaaagcagcatggacccaaagagtgaacagtagcaagatttactgcaaagagcaaaagaacaaagcttccacagtgtggaaggggaccagaacaggtagccactgcgggctcaggcagcctgcttttattctcttatctggccccacccacatcctgctgattggtagagccgagtggtctgttttgacagggtgctgattggtgcgtttacaatccctgagctagacacaaaggttctccacgtcgccaccagattagctaaatacagagtgtcgacacaaaggttctccaaggccccaccagagcagctagatacagagtgtcagttggtgcattcacaaactctgagctagacacagggtgctgattggtgtgtttacaaaccttgagctagatactgagtgccgactggtgtatttacaatcctgagctagacgtaaagattgtccacgtccccaccagactcaggagcacaactggcttcacccagtg

SEQ ID NO: 29072 - DNA, 1239 bp, Artificial sequence
  DNA replication origin
ggagttgaaccagccggcgcgcctcacactgggccgttgggagcgcgcgccgctagcctctcaaggctggaagagtcgacgcgcgcgtcgggaccacttctccatcgagcgcgcgcaacaggaggcgccagcggtgcgaaagctctcgtctaagggcagctttgctgacctgggcctggagccccgtgtgctgcacgcactacaggaggctgcgcctgaagtcgttcagcccacaaccgtgcagtctagcaccatcccctcactacttcgcggccgccatgtcgtttgcgccgcagaaaccggcagtggcaagactctcagctacctcctgccgctgcttcaacggctcttgggccagccaagcctggactcccttcctatccccgcgccccgaggcctggtccttgttccttcccgagaattggcccaacaggtgcgggctgtggcccaacccttgggccgctccttgggcctgctggtgcgggacctggagggaggccacggcatgcgtaggatcaggctgcagctgtccagacagccttcagcagatgtgcttgtggccactccaggggctctgtggaaggccctgaaaagtcgactgatcagtctggagcaactctccttcttggtgttggatgaggcagacacactgctggatgaaagcttcctggaactggtggactacatcttagagaagagccacatagcagaaggcccagctgacttggaagaccccttcaatcccaaagctcagttagtgctggtaggagccacatttcccgaaggtgtaggccagttgctgaataaagtcgccagcccagatgctgtcaccaccatcaccagctccaagctccactgtatcatgcctcatgtgaaacagacatttctgagactgaagggagcagataaggtggccgagctggtgcacatcctcaagcatcgtgacagagcagaaaggactggtccctcaggaactgttctggtgttctgtaatagctccagcactgtgaactggctgggatatattctggatgaccacaaaatccaacacctaaggttgcaggggcaaatgccagccttgatgagggtaggaatcttccagtccttccagaagagctcccgagacatacttctctgcacagacatagcctctcggggcctggacagcactggtgtggagctggttgtcaattatgatttccccccaacgctgcaagattacatccacagagcagggag

SEQ ID NO: 29073 - DNA, 772 bp, Artificial sequence
  DNA replication origin
acggcccagtgtgaggcgcgccggctggttcaactccggccgccgcgccgaaaccagcagcggtccgggtcgaaccagcaccggcctcgggaggttccgccgcctgctctgccgctgttccaactgccgctgtagagccactgggatgcgcaccaccggcaggggttcgtcgggactgcggaccgtgaggccccgtcgcggcgccaggagcaaccgagtcacgagggaaaagagccgcaccggccgcgttagagccatgtttcccttagtgcgggagaagcgcacatcagtgacgtcacggacgcgccgcgacctcgcgtacggtggctggcgaggctcagtacggtgtgtggagctggagcaccgtgaggaagaagcgaggttctttttaagagttcagctgcgaggtctgtagctccgaataggggatggcgacatccagacccggccagccttggggaagggcgcgtcgtggaggcaggactggaggctggcgatacgaggcggcagtggggccttgacccaatggaccatgagggcggagggcttctggcgattggttacctggttcctgggattctctttagttgttcctcattgccctgagatagcttgtcccgtgctggtatccgaggttgcagctgttttcccagatgtgttccctgcgcagggtctggtaatccgtgtttattgagagtttgaatgaatgatcaggcctaggggccgagacaggggtctgaagtcatagatctgggctcaacccctcaccctc

SEQ ID NO: 29074 - DNA, 1791 bp, Artificial sequence
  DNA replication origin
gagaaggccgttagcctctctaattggataggggaccaccaccggccaatgcagaagacccttctcctcattgggcggagctcatgtcgaggaaggggtgctgaagcactgaggttctgggttcggtgatgtgggggcgcatcgtgttactcctgatggctggctctagggaaggcatcagggcccctcagagttacctggacgccgcccacatcctcatccccccacctcaactttaatggctgagtctccagagggcagggaccggaccgagagtccagctaggttggggtggaaccgaaggagacagattgcgcgacaagtccggactctgagctcgcggtcgccgcaggcccaccctctgcggggcggagctttcgccccggtggctgcgcctttgtccccactagcgggcccccgcagctgctcccttgacagcatgcgcgtttgaggcctcagcgaaccccaatgggcagggcctgtcccttgctggaagttgagtagattgagcgggaaagcccgttgtgagctcgtgccaatcacagctctgtgctctctgcatcctgctgcatatccatgaaagcgggagggatggagccgcctaaattgggtggctggcagtggagaggaagtgacactgcctaaagaaccgttttcgtgatctgcccctcccgagcaagctagccttcccgagatggcccaagacgcctcctcctggggtctggggtgaaggccgtccttggggactgggagcctggcttgtttacctaaggctccgctgaggcgcaaggtggacagggacgtgagagaagtagggtgaccgcctcccctagctccgtgccccgggcatagggcccacagggcatagcatccctagatgcgcgttgctggaggaacccagggcactgtcagaggcttgggtgcaggtgcgcccaaaaatgctgccctctcagaggctacaataggttaaaaaaaaagagagaaaaaaaaaaaagaaatgccgctctcgcaaggcctacagcacattccacaccgcccacaaaggccagtgggaagagagggtaaagggaagctctttgccgaggtctcaatgtctggactgacacttgagctaccagggagccctagagggagccaaactagaccttgggtcaggaagacagggaatgtccagggcatccaagacgttcatcttgtattgcttcatttctgcccagtgttttgtaccggtacctgtgctgttcctggggattcagagataaagtctcccttcaggggtaggggagaggggaccagcaaatctataattactgtacaaagagatgagggttgtgccaggagctcagagacagttcataagcctgctagctgcagggccttgacaggggttagtaggaaccggagtgacagacaagaagtgagcaagtttcattccaggcagagaacagatttccaaagacttgataaccataaagtaacctgcagtgggcagaagcctaaggtggggccggatgagtgggcagaatgctgcaggccactgcaaagtgtctggactttatcctgacggcagtagggagcagtggaaggacttagagcaggggatttacatggtcagaattctggatggatcactagattcaactgggacaggggtgaatgaagtcagagggagaagataatgtggtcaaggagagggaacaactggcattagacgggtggactatccttcccaataacctgtcctgcctgcaaatctccaaccttgagggcctgagtgtggaacttggggcc

SEQ ID NO: 29075 - DNA, 947 bp, Artificial sequence
  DNA replication origin
ttcgccgtgttagtggccaatcggcagccaggcagggtgggcgcgcgtagggggcggggccgggcgcgcggcagggcgcgagagcgcacccgcggcggcggtggcggcgactgtgggggggcggcggggaacattggctaagccgacagtggaggcttaggcaccggtggcgggcggctgcggttcctggtgctgctcggcgcgcggccagctttcggaacggaacgctcggcgtcgcgggccccgcccggaaagtttgccgtggagtcgcgacctcttggcccgcgcggcccggcatgaagcggcgttgaggagctgctgccgccgcttgccgctgccgccgccgccgcctgaggaggagctgcagcaccctgggccacgccgatgactactgcaaactgtggcgcccacgacgagctcgacttcaaactcgtctttggcgaggacggggcgccggcgccgccgcccccgggctcgcggcctgcaggtgggtgccgggccaggcgggaccgtggagcgaccccgcttctcgctcgcaggatctctcgctccctccctgttcccttggatgaccggagaccgataaccctgtgtgtgtgtgtgcgcgcgcgtgtgtgtggtgagttaaaaacggatttaaatcgctgaggaggcgtgtgggtcgctgcgacgtggaagtggtggcgggcttggctggaagcaaactagtggggaactcgactccgggacgatcggggtttggaggcccagggtccgggctgctgcccaagtggcgtctggttgtcgttgctttgccagtgtgttgcaaggaaaatgttgtccctgtgaattgttagcgcactgggtttttcatctattctaggtcgtttcttgaaattttagtttgaaagatgcttatttttcaacggtaggacccctctaaaaatcaggcacgtgtttttttaagt

SEQ ID NO: 29076 - DNA, 899 bp, Artificial sequence
  DNA replication origin
ctctgcccggccgccccgtcagagaagtgaggagaccctccgcccggcagctgccccgtctgagaagtgaggagcccatccgcccggcagccgccccgtctgggaagtgaggagcgtctccgcccggcagccaccccgtccaggagggaggtgggggtcagcccccaccaggccagccgccccgtccgggagggaagtgggggggtcagccccccgcccagccagcagccccgcccgggaggtgaggggcgcctctgcccggccgcccctactgggaagtgagaagcccctctgcccggccagccgccccgtccgggagggaggtggtggggtcagcccccagcccagccagccgccccgcccgggaggtgaggggcgcctctgcccggccgcccctactgggaagtgaggagcccctctgcccggccaccaccccgtctgggaggtgtacccaacagctcattgagaacgggccatgatgacaatggcggttttgtggaatagaaaggggggaaaggtggggaaaagattgagaaatcggatggttgccatgtctgtgtagaaagaggtagacatgggagacttttcattttgttctgtactaagaaaaattctcattctgttgatctgtgaccttacccccaaccctgtgctctctgaaacatgtgctgtgtccactcagggttaaatggattaagggcggtgcaagatgtgctttgttaaacagatgcttgaaggcagcgtgctcgttgttaagagtcatcaccactccctaatcgcaagtacccagggacacaaacactgcggaaggcggcagggtcctctgcctaggaaaaccagagacctttgttcacttgtttatctgctgaccttccctccactattgtcctatgaccctg

SEQ ID NO: 29077 - DNA, 1205 bp, Artificial sequence
  DNA replication origin
cttttccccacctttcccccctttctattccacaaaaccgccattgtcatcatggcccgttctcaatgagctgttgggtacacctcccagacggggtggtggccgggcagaggggctcctcacttcccagtaggggcggccgggcagaggcgcccctcacctcccgggcggggcggctggctgggctgggggctgaccccaccacctccctcccggacggggcggctggccgggcagaggggcttctcacttcccagtaggggcggccgggcagaggcgcccctcacctcccgggcggggctgctggctgggcggggggctgacccccccacttccctcccggacggggcggctggcctggtgggggctgacccccacctccctcctggacggggtggctgccgggcggagacgctcctcacttcccagacggggcggctgccgggcggatgggctcctcacttctcagacggggcagctgccgggcggagggtctcctcacttctctgacggggcggccgggcagagacgctcctcacctcccagacggggtcgcggctgggcagaggcgctcctcacatcccagacggggcggtggggcagaggcgctccccacatctcagacgatgggcggccgggcagagacgctcctcacttcctagatgggatggcggccgggaagaggcgctcctcacttcctagatgggatggcggccgggcagagacgctcctcactttccagactgggcagccaggcagaggggctcttcacgtcccagacgatgggcggccaggcagagacgctcctcacttcccagacggggtggcggccgggcagaggctgcaatctcggcactttgggaggccaaggcaggcggctgggaggtggaggttgtagcgagccgagatcacgccactgcactccagcctaggcaccattgagcactgagtgaaccagactccgtctgcaatcccagcacctcgggaggccgaggctggcggatcactcgtggttaggagctggagaccagcccggccaacacagcgaaaccccgtctccaccaaaaaaatacgaaaaccagtcaggtgtggcggcgtgcgcctgcaatcgcaggctgaggcaggagaatcaggcagggaggttgcagtgagccgagatggcagcagtacagtccagcttcggctcggtatcagagggagaccgt

SEQ ID NO: 29078 - DNA, 807 bp, Artificial sequence
  DNA replication origin
cgtgcgtgcgcctcgtcggtccgcgtgtctggccgagagcccccttcctctgcggccatgactccgccgccgccgccgccccctcccccgggccctgaccccgcggccgaccccgccgcggacccctgcccctggcccggatcactggtcgtcctcttcggggctacggcgggtgcgctgggacgggacctgggctcggacgagaccgacttaatcctcctagtttggcaagtggttgagccgcggagccgccaggtagggtggaaaagaggcggtgaggtccccagggagcttccggggtcgaggggcgcggctgatcggtttcccccgccgctcacaggtggggacgctgcacaaatcgctggttcgtgccgaggcggccgcactgagtacgcagtgccgcgaggcgagcggcctgagcgccgacagcctggcgcgggcagagccgctggacaaggtgctgcagcaggtgagcgccggggtgggtggcggcatggcctggacgtgaggacatttctgggcgggattggcggccggaggctaggcctggcgtgccgcaaccaaccggtccaggcggcaggactgggctcttgtttgaaactttgagcgactctcgcgtgtgcgtgcccctttcatccgcgcgtgccagccattcccctgggctccttacttttcaaccattgcaggaacctactcctaccgaagggatcgggacgcaggctttgggatccatccccagttcccgcccggggagcgaggccgagacgcctttgggagacctgctgggtcaggtctccctgagccgca

SEQ ID NO: 29079 - DNA, 1402 bp, Artificial sequence
  DNA replication origin
acctcaccgcctcttttccaccctacctggcggctccgcggctcaaccacttgccaaactaggaggattaagtcggtctcgtccgagcccaggtcccgtcccagcgcacccgccgtagccccgaagaggacgaccagtgatccgggccaggggcaggggtccgcggcggggtcggccgcggggtcagggcccgggggagggggcggcggcggcggcggagtcatggccgcagaggaagggggctctcggccagacacgcggaccgacgaggcgcacgcacgcaccgaccgaccgcagacgcggatcagcttgggcgggacaccgtgtatcgggggcggcacctgcggcccggctggctcagtgggcgctgccaagacccgcccgtggcgccccgcggggcggggcggctaccggcccacgccctctccaggcgagttacctgccggccccgccggccacgtgaccggggcggctccgggaaccttgggggagggccgccagaactcaacccaggacgcaagagctcacgctcccggcctgggcgcacgcttaggatccggattcctacttccagggctggtcctgcctgattttgggggctaacccattcttccgctctccccccactcttccccaggggtcgtcaggcctctgcaaaggagcgtgcaagacagaggccttctccagtatggaagtcaccaggaggcagtctaggggctgtgggggtcaacacggcaggtctggggttgatggaagtcaaagggtcaagggggcggtgagagttgccgggtatcaccctgtagggggatcaccagaagtcacctgggaaaggggagggcggcgggaacatcagcgttgttagagctgtggggtggtcaccagggatcacagggaagggcttgtccacgcagatgctagggccgagcgctagcctggcactgagaagtgccagagcgcggtcgttgtgggttgggagtgggcaggcctcaatgctggggaaaggaaccccccaaatcgcagagagctgcaccctagacgaggctgagaggggtagaacgggcctggagcctcactcctaccccacgtgtgggggcctgcctgctttcgtccctttctggacggtggagaagctgcctggagattgcgagcgctctggccgatggggggctagcgttgagcgtgtgtgcgcgcatgcgggctgcagatcctcccttttccatcccgcacctacaacccaattgacagccccgcatttggggctcccattcctccctttgcccagtggagcttggtgaggctcctttatggcgcgtttcccggccgttccttactttcccaaactctcccagggaggtgactgagaaactgaataagtgactgagaaactgaataatccagcagg

SEQ ID NO: 29080 - DNA, 1291 bp, Artificial sequence
  DNA replication origin
tttaaagaagaatgcaagggttggagctgagtgcacggtagctcatgcctataattctagcccttcgggaggccgaggtgggcggagttcgagaccagcctggtcaacatggcgagaccccgtctctgcaaaaaatacaaaaattagccaggcgtggtggctcacgcccgtaatcccagcactgggagaccgaggcgggtggatcacctgaggtcaggagttcgagaccatccagcctgatcaacatggtgaaaccccgtctctactaaaaaaatacaggcgtggtggtgcacgcctgtaatcccagctacttgggaggctgaggcaggagaatcgcttgaacccaggaggcggaggttgcagtaagccgagatcgcgccattgcactccagtctgggcaacaagagcaaaactccgtctcaaagaaaagaataataaaaattaaaaaaataaaataaaataaaaagaatctaagttgcaggagttgtcttgctatgggggcagccggatgggcatccggggtagtttaggggagccgcactgtgctaccagcccgtgcctcaggttcacgacccagcggcgacttggacacgcataagcgcgtcttccgtgggaaagcgctcaggactgccagagacgccacaatggagcagtcacctcgcgaaggtggcttccgggaagagcgggcgtcgagactcaggctgaagaggaaaaagggcctagaggctgcacagatgaggtcgccaggaggggcgagaaggagaccgagtagcgcccagaccttcgggcggggacgctgtgaccctgtgctgtaagagtggaacccagacaggagccaaggaggaagcgacgtgcttctgtggagctttaggaatgcggcggttagggccactggtttaggggagttggctggaagggcgtggccggaggaagggccgcctccaccaagcgcaggcgccctaccgggcgggagggggaggagcgttactcgcggttgcgccccgccccgcgaacaaatatttgacattccaggcttatcgggaggaggggcccgaggagcaacgttctcccttcccccgcgcctgattcgcttaccgcttccgggggaggagacgcatgggccagtgcccgggtgggcggtccggagatggacagccgcgcaccaaggcccgcctccacctgtagggaaagtaaagtgctactcgctcgaacccgccgggcgaaggaagcacttcccatgctctccctgtcgccgtgtccgggcgcgagtcatttccgtcccgggcgcctg

SEQ ID NO: 29081 - DNA, 1164 bp, Artificial sequence
  DNA replication origin
atgaaccccaggggagcgaggagtggggtgggggtgggggacaatttttagagaagtacagaaatctcaaactacagaagggacccctgcggaaggtagaaaatctggaggaaggccgggagcggtggctcatgcctgtaatcccaacactctgggaggccgaggcgggcggatcacgaggtcaggagttcgagaccagcctgttcaatatggggaaatcccatctttattaaaaatacaaaaattaacccggcatggtggcgcgcgcctgtagtcccagctactcgggaggctgaggcagaggcagaggcagaggaatcgcgtcaacccaggaggcggaggttgcagtgagccgggatcatgccattgcactccagcctgggggacagagcgagactctgtctcaaaaaaaaaaaaaaaaaaaaaaaaattctggaggaagagctggagccctagatagagaaggggtagggctggagaggaggaaagggcacagatgagaccctactgcaaaggcctgtgtcttaccattgctgaaataccctgtggcagaagaagctagccttagacaacagttcattcattcagtgacaggcgttgggggtaagcctctatcttcgaggataggatgatggagcggggagacaatacacgattaataaatcgtgttataagttggttaagttggggggttggggggcagaaagaagcaatgagggtcggttggggtcaggagtgtgggttgtttagtaataatggggtcatctggaaggactcatctgaagatgagtaagggatctcagcaaaacaggaccccaccctcctgcccagtatttaaacgaatttggtttttaaagaagaatgcaagggttggagctgagtgcacggtagctcatgcctataattctagcccttcgggaggccgaggtgggcggagttcgagaccagcctggtcaacatggcgagaccccgtctctgcaaaaaatacaaaaattagccaggcgtggtggctcacgcccgtaatcccagcactgggagaccgaggcgggtggatcacctgaggtcaggagttcgagaccatccagcctgatcaacatggtgaaaccccgtctctactaaaaaaatacaggcgtggtggtgcacgcctgtaatcccagctacttg

SEQ ID NO: 29082 - DNA, 1342 bp, Artificial sequence
  DNA replication origin
agataggaacggggtgcgggggccgatgagagctccccgcgggaatgtccgctgtggacgccctcggaggccccatctaactccagggcggcgagcgtggccgggcccagttcacgggctgctcgagccctgacgaggcagctgggggctgtctggcgtccacgctcacgttctgggccggcggaccccgtaccggccaggccgtggcggccacgggggcccggaagcgccgccgccagctggccccgcacggaactgtgtcccgacgcggcgcgcgctgtcgcgatccggcggcgggtgacgtggcggggcggggcctgagctgccgcggcggcggcggcgcgaccgagcatcctggcggcgccgggccactgggaggtaacgggctgggccatgggcgggcgcgccgggagcggggccggggctgggccgcgttctgtgggagccgaaccctgtgggtcttcgctgccgccgtcgggagcgggatgcggcccagaaacagcgcggggctggccgatcggggccgcgcgagaggcgctgcgggtgagggggggcgccacgaggagagagggacctcgagcgtgagggccgagtgtgggagaaacgctgtatgggtgcgagccccggaggctgatggtgaccgcgagggagccagtcttggggtgtgctggcgacgcggcgagtgtgagggagaccgggggtgtgtgtggagagggaaaccccaggtgcgagggtgaccgggacgctgagtgcgcgggccgcgccgcgagcgtgagactgtgcgacggtgaccctgagtggggctgtgactgcgcctccgactgcaggacggagaacctgtgctgtgtggcggccgcggtggggcaaagaaagacgcgggctcaggacctcaggagccaggcttcctggggctgtcgcaagaatgacgattatcattttaaaatcagtccttttactttagagaatgccgcaaggttttgtggcgtgctggagcctggagcgttgggctgctggcgctggggaacccgcgtgcccctggtgattatggctcttttgagcgtccctatagcctgtcatcttgtgtgactatctctcctgaatgtggggagatagacgtgaaacattctgaaaattctttgctgggctctaagcaaacatgttgtgtaatggtcagtataaataggaatcagggtgtcggcgaacacgtttttgagtacctcttgtatgccctgggcttggtgacacagttaaaaagaattcagtctctgcccttgataggggaaaaagccagggcagctcatctcgcagggcggctgttcagtgcccagccatccggggcttg

SEQ ID NO: 29083 - DNA, 1390 bp, Artificial sequence
  DNA replication origin
tttcccatatttgctgtaaatatttttcctagtctgttgcttatgtccaactctgttttcttgtgtttttcagagggtgacatgccatgccgtgccaacatcctggtcacagagttgtttgacacagagctgatcggggagggggcgctgccctcctatgagcacgcacacaggcatctcgtggaggtagtagacggagggctccctcagacgtgtctgtggtctcagccagctcacatagcactcactcatgcaccgtgtcccacacagcccaagccctcagcacctctgatacacctgggacacccctccattcctgggggggctctggttctcctcacttaaaactttcatgtcccttgaatgccaaatcttaataggttagagttgaaaagcaagaaactatattcaaattcagttaagttcagcaaatattctcaggaaggcgatgcttgagctgtcagtcttgagaagtgatcaggtgttggcctggcagatggaatatttctggtagaggagagcagcacgtgctagacgtgagactgaatcggtgcggtggctccggagcctgctttggattttgtgctgtgtgggaggcaggagagatgggcttagcaactgaggctagagagctgggcaggggctagatggagtggggtttgggggccatgcccagagggtagctgtcattagaaggtggggtggcatcacaggagggtttgaagcagaggattgacagcagacttatgcaggcagatgtgtggagggcagttggggtatagggctggaggttgcgggtgggttaaaaggctgtggaatcgtccagacgctgtggtacagtgggcctcagctaaggctgtagacagaggcctgataggtggtcccaggagttggtggtcccttaggtgtagagatatcgatgctagggtttgggcacctggattggatggtggtgcttcctgttgacggggagtgcaggaagaggggtagccttgggaaggttgggaagtggtgagggcgattcttctggtttacacagagtttgagctctctaaaggtcagccaagcaaagaggcccagagatgcatggatttactcagtgaagagggcatggttgaggtcactgtggagagtgtggagggagacagtccggaccagggagtccccttgtgaggtggggcggaggaagcacagcctggggaaggcagcgggagtgagtccagttagagcagcatttgtctaccagagcaaggttgggagatgcttcgcagggaggccagttattctgctagccttttaccatgcccagagcaacccctacagcagagaatcatttggcccaagaggccagtggtgtcctggtggtgaaagccatgtgggtagcagctgt

SEQ ID NO: 29084 - DNA, 1332 bp, Artificial sequence
  DNA replication origin
gaaaagggagaaagaagtttgtcccatgaaccccagcactttgcttatgatttgctgtttctttcctgtgtcctcttgtctatgagtggcttcagcgagcgcctcctgggtgggcactggagcagaaagcgggagagcctggggctggacttcctgagggcttgctctctgctctactgggagagcctctggctgggctcctgctggacacctttgccttgtcagacacagtcattgctgtgggtggtcacggtggattaggccaccccctcttttcatgtgttgtcacctttctaaaattttctaagatgtaaatctgatcatgtcgctctcctgcctgaaaacctttgctccctgctacctgtagcaggggactcggcttggggattacagatggggcttagagggagggtctcttgaggcccttgggggtgtgtacagaaataggtgtgaatgtgtgcattttgggggatggggggaggatccaagccatcctgagtttctctcagaggggtctgtcacccagaaaggcatccttgcctttgggcagtcaattgtgaacactcaagccttggaggctctcagctgtctgtgctctaaccagacagggaagaagcctgttgtcatggactggaaggtggcctgcaggtggtgcaggccttcagcggggcctctaggctgggttgaggggtgtctttcctgacactggggacaggtggggagatgtgagcaaggcgggcatgtttgtggctgggggtggttactgcatgaggacgcagggggatggtctgaggtctgggcaagtggagtgagaagggaagtatttctgacagcttgccagcaggaatcttctggcaaactggaggaagccctgtgctgagcttgcctgttccccgcaggtgctgaagccagacagcgtgtgcctgtgtgtcagcgatggcagcctgctctccgtgctggcccatcacctgggggtggagcaggtactgacatgcacccttgtcagcctcctgatgtgggcttgtgagttagagcattgcgtggtccgggtgcacaattctgtgatcaaggctctttgcaaaggccactgttgtgggcacagcatgctcgggtcaggggctggggggtttattgcctgtgcgtgcaggcaggcgtcaggcctcagagctggtgttcaggctgccccagggagggaatgagggcagggagggttgttcaggtgtgtcctctgtcttaggatggtcttgtcgcattttaatctttaatttcttctctgttaagtgaatatcttacaactaatagcgtggtgttccctctaggtgtttacagtcg

SEQ ID NO: 29085 - DNA, 1169 bp, Artificial sequence
  DNA replication origin
atctcaggacttaccggggcttgtctccgtctccctccccaggctctgagcaccacaagagcagggactggtggcccagcatcccccagcagtgggccagtgccgtgaccagatgttctgtgaacatttgtgagtaaatgaacacgtgcacagcgaggagcctgaacggccgagggaggggcagcaggggcaagagtgaggccgggagacagcaaggccccccaaggtgagggtgtggagctggacagaagccagcccagcccaaggcagccaggacagggtgaggggctggactcatcccggaggcggcagtgggggtggtggatgtcactagaagttttcatcagggttcaaaatcagaaggaatgtgatttagaagatgctgctgaggaccacgaagtgtggaagggaacctgcaggtgctggggacggaggcgacctgggagagtgcagaaagagtccgggtaagaaacggagactacagggtgggaggggtgggaggagtggaaggagtggcagagggtaaggaggtagccgaccctgggcaggcccaagcagtcaggcaccaaagtggggccagtcagagatgatggagatgcagcaggaaatgctggcagacagaaggggctgccctgagtgcttcctcgcctccccacacagcatcaggaacatggcaagaacgcccgctcccaccactccaattcaatgtgaccccggtctaccggtacaccacacagtggctttcagaatcatctcctatgccctcatctatgagggagaaaaaaggcgacttgtggatgaatatttatagcagcattactcacaacagcccaaaagtaggagccacccaaatgtccatcagctgagaaacagataaataacatggtctatccacacaatggaatcttattcagcaagaaagagaaatgaggtattgattcaggctacgacatggatgagcccgaaaacatgaagccacatgagaggccagccacgaaagaccacacacttgtctgattccattcacacaagatgcccagaatgggcaagctaaagacagaaaggagaagagtgggtgcccagggctgggggactgcggacaaatggtgcatgactgccaatgggtaatgaaagggttcttaaactgatgtggtgatggttacacaacc

SEQ ID NO: 29086 - DNA, 1358 bp, Artificial sequence
  DNA replication origin
gggctgcaggggcaccggctgctggaagtcaaaggtcaggatctgccagggctcggagaggctgcggcatgggtactcccacagcgggtggggctcagcttccctgctctccctgaagtccagggcacgctgcgaacagaagggggcctgggggctgcagagacaggccggcagctagacagaggtaccgctccccggcttggctcccactgactgcagtcacaaggggtgtgcgttctcccataaagatgccgagcgcccagcagaccagcggcgccccctctctgccacttctctctcatcagtggctccccaggcaccgctggctctgagcctcgctctccggatttttaagatggggtggtgctgcctgtctcaagccttctgaggaccacatatctacatcactggtgagaacacccagcacctagaaacttggtgaccaccacagctgtgtggccccgacaggtgggccccgggccacagggagggataaatgcgtgacagtacagccccggtgcctggcggcaggctgggggcacctgcatccaggagggatgcagaaagctacctggaggaggggaggtgacggtcaaatgggagccggcaggagaagggccagagggggccttgaggatagagctaagtcaggagagcaggccagggcacccaggccagccgggccactctgcaggtgtggtgtggggagccagctagggcattcctgcagtggggatgtggccagactcagatctacaagttcatgtgggctccgtgtggaggacggccagagcaggaggggctcaaaccaggacggcagcagtcaggggacagcctgggtcggaggctcaccaggagcacgaagaccaatggcaggggatgggaggacttgccagggaggatgcccggggccctgggcctggctggtcgtgtgaagtggcgccaggtctaagacagggcactggaagggccaggctaagggtggggaagggcaggtggatttggaaagcatagaagtaaaaatgcctggcaccccactgtgggatacccaccactctcggccatctgccttagcacacgagagacagacactggcccaggaccagagtagcagaaccgtatcagcaagaggggacagggacagccagggtgggcaggccatgagcaggggcccagaggaggcgtagagcgcatgggtccagagcacgcagggctcagcacgaaggagatttctaaaagcatcgaacagtcaatggtctgctgtgaggggcagataagatacaaactgaaaatatccacaaggtttaatttacttaaaaaagtgttcacacacaggcaatccatgttcactatgggaa

SEQ ID NO: 29087 - DNA, 1244 bp, Artificial sequence
  DNA replication origin
tgtgatctcaccaagatccacttgattatttgctgggcctcattgattcctggctcgtggccttgggagccgcagagccttgtgtttctcttgcaaaaacaagcaatcacacgaaaggctgtgcctttgagtcctggcgggcaaagactgtcaacggaagaggtgtccagaataaggctctattgtaggtgaggaaaaagggattccagtcccttccttcacagagccacatttccctgaaggctctgaagtcccatacgggaaaccatgagggccttccgggaaggaggggaccgctgatttctgcagcgagtccctccagcgtcccggcccctctccggctgggcctgtccccaaggcagccccacgtacttcacttctccgcgctgggatccgcgtgtgctgggcacaccacagctctgctgtcctggtgctctgtctgatggacagacaagaccctgggcacgagggcagaggagcccatgaagggaagagaggattgtgtggctggccgctgagggagctccatgaggtggtgtggccacacccagtgtgggaccaagacaagcaggggccaggggtacaggagcccctcatcggggttgtggctggggcagagctggagctaagggtggcgggggcaggggggcgggaggtggtacaaggtgacgttcagacttcctgaggcagtggagggcataagaggagtcacacctggcctcagacgaggagggtggctgaaaccacagcagggctgatgcagaggagggggcctgggccaagggagctggagatgtggggtgcacccagggccatctggaaagtgagctaggggcctggaatggatgggtcgggcacaggacagagcagccaaggtggtccttctggcttcaggatggcagaacacagaagaggagcagcccggggcagaggctgagtctggtttgcgagtgaatggggatgtgtcctggaggcagccagatgtagggctggggggagaggtctgggccaggacaaagcagaggggcctcagaaagggcagaaatggaagctgcagagtctcactcccaggcaggtgtcatgatggttgctgggaaaccccactgcggggcagccaaccacggctccagctcactgcagccgcgtggggtacggaatgtggcaggcctggggctgctgagagaacctgcaaaccgggttttctgtgaaatatcttgattttaacatattggtcaaggctgggt

SEQ ID NO: 29088 - DNA, 1061 bp, Artificial sequence
  DNA replication origin
cttgtacaggagcttgctgttggcacctggctccccgctggcactggtgtctggcccagctcgccccttcaccagggactcccgggaggccgaggggctgcccaggctccctgaatccccgtcctgctgattatggttgggcgtctggccccttgggcccccgccagctccgttcctggcctggcccccaggcacagggtcgtcagcttcaggtggccggccgccctcctcgccaccgatgcgcacgatgcaggcatcctccgggctgctgctgtcgacagggtccccagaggctgggccgttggcagcctcgtcaccggggtgccgcccaccgtcacccttgtactccacagaggctgtcctcttaatgctcccggggacggcccgggccaccccatcgccgccctgtggtgacaccaggctgctgaagctagcggcgctgatggaggtattggtgggggagtcgatgtaaattttgatctggggccgggcggccccattgcggattctctgcccgatctccttggcccgcgcttgggtgttaaaaaggttgttgaccctggcgagtgagtcgggcaggaggcagacgttggcagtggcaaagcagaagcttttgccaggccccgtgcccttccattcactgagcagggctgccccaccggccaggcccttgtcttccagccgtgaatagatgtagggccggcgggccgactgcagtggggaccagaagagaaagccgagaaacgcaaagggcagcgaggccaccaggagggccaggtagatgggcgtgaagagggcagtgcagagcagctgcaggcagcacgggtcgtctgcccgctggcgcttctcgtaggtggtgggtatgaaggaggcagcgagccggtccaccagccagtagcatggaaagataagggcccaggacacacagtgcagggcggacagacagctgttaggaaagggggtcgtgtacaaaaccatcgcagctcactgggcgccgcagccggccctactacatggtgtccgtggcagctgcgggcactttcctgggcgagggtgggcga

SEQ ID NO: 29089 - DNA, 1364 bp, Artificial sequence
  DNA replication origin
cctccccacctctccccacctgggccttatctcccaggccctccctacctggatccaggcctggggctctaagtcgagacgacccgccctagcccaccacgccccggggaccgagcctctggcaccgcagctgggggccaatcccagatgggcatgtacagagcgggacggggcgggtctcccctcaagcactcaagagctccaggtagacgctacccccaacctcgtgcccgcgaatctttgggggctgctccgctccgatgcagggcgcaccccaaaccgaggctcggggacctgcttccaggacgcgcggtggctgttccaaggcatggggctttcgcgctcggcccaggcatcctcgagaggacaaagcggcggtcgccgcactggcaggcctgcgccgcgggctgggcggggggcgcggccgcggagggggggcttcgggcgcggcgcgggcagcttccacggaaacgtgccaggagcggggcgggagacaaagcgcaccggcttctagcgggcccgcgcgagccgggatggaaaatcccgagggaggaggcggctgagccagggcagggcactatgcccccacatctttcccttttcccataccccctaccctaaggccagccaggcacccaggattctgtgcacgcgatggtgaccagggccccttcgggggccgagagtgggggtgttcaggacctgtgaccactaggacagggacaggtgggggctccaccttgagcaaggggcctggagttcacagggcgtgagtgggccagggtccagagggacatcctgactggaccctcccacgccccatcagccatgttaggtcaaatttggttctggggaggggatgtgtttaagtgtgtgagggtttgcatggatgatggtgtgggtcagagtgtgggtgtgaatgtgtgtgactagatgaatgtacccatgtgtgtttcagtcttcatgtgtgtggcacggccagagcttgcgcttcgggctgtgtgtgtgtgtgtgtgtgtgtgtgtgtgtgtgtgtagatgaaccacttactcatttactgatgggcttggatgttgtgggggtggggagcagggtagtcacatctttaactctcaagccacagcaatgacctagggtccgagtggatgccctcagggtgaaggtagcttcaggttgctttgtgcctagcctgcctggcctgcgaaaggcccagtaagtggggaattcacaactatgtggagccttcttcagcccttctgaggtctcaggtctgaccctgacatactcaccagtgccctgcccttcccattttatcagaagctttatcctactgtaataggctgctccaaagaccagaattctgc

SEQ ID NO: 29090 - DNA, 1334 bp, Artificial sequence
  DNA replication origin
cagtcccgctctgtttgcctacccgcggcgtgagcccactccgcgtccttaaagaactataagtcccagaaggctgtgcgaaactccgccggtctctgggggatgtggtcttgaaggagagacccaggaacctgcgggcggggccggagggagaggggaggacgcccccaatgggcagactcctgggcggggtccgggtcaccattggctccggcggcgcgagggaggcggggtcagaggaatgaagcgcggagctgttcgccgctccaggtgctgagtctgagggaggctccggacccgagagccgcgagagccgccgccgctgcggccgccgccagatctgcggccgggagcccgggctgtgaggagccgggaggagcggggtgcgctgccgggcgctgaccgccctcccgcccgccgtcagaggtcagtgctgctgaattcgcttttgttttcttggggagcgggcgaaccgaggcgtgaggggctggggagttgacgggacgtgttctcgttgctctcaggaccgcgggtcccggacagccgccgactgactaggggcctcccgtggccgggcgccggaggtcggagcagcttgggttagttttcgttttatcatggagaaggctcttgggtatgaggggcgagggctgggggtcacccccaccccccatctctcctgggagagcgaggaggcttggaccctccctcccgctgtgcctggcgacggggctgctcggattactcaggacgggaggatgaggtgttgtgggatgaagggactcgaggcagggggacccctccccgcaacacttcggctgctcgaggttacaaaggagtctggtggtgatggatgagatcgcggaccgctcccctagcccagaccctcccaggggtattcaggaagggctgcttgggatgcagggaagacccttgcccaggccccttcctccacactcgcccccctccctattcccccctcctcccttggccctagggttttgtaaagaggaggatcgaggatgtggaagagacagaggactcttacccctcccacttggaccctcctaggttactggtgaagggtggaattggaatgtggcagggaaacgctgggagacccctccccatccttctcggagtcgcgggtggaggaaagcactgacactcggaatcccccgcgctcgggcccgcgccgagggttgggtggcctgggtgtgagaggtagtgtagggggatgtacgaggacaggagggacccctccccacctctccccacctgggccttatctcccaggccctccctacctggatccaggcctggggctctaagtc

SEQ ID NO: 29091 - DNA, 891 bp, Artificial sequence
  DNA replication origin
ccatgatcatgccactgtactccagcctgagtcacagagtgagactctgtctctaaaaaaaaaaaaaagaagaagaagaagaagaaaaaaaaaacagactgggcgtggtggctccagcctgtaatcccaaccctttgggaggccaaggctggcagatggcttgagcccaggagttcaaaaccagcctgggcaacatagtgagactctgtctctacaaaaaatgcaaaaatgagccgggcgcagtggtgtgcacctgtgggcccagctacttgagaagctgaggcgggaggatgttttgagcctgggaggctgaggttgcagtgagccaagatcgcccattgcactccagcctgggaaaaactggggagagaaaaagtgagccaagccccagagcaagggctgggaagggagaacagcaagcaggagcctcaaaaactggggcggtggggacggggggtgtgaagggggtgggattgttcaaaggcacaggagcagtggtttccagggatactggggggtctggagaagggacagcaactcccaggagatgtggggaagctgtggccagcaggggacagctgcaaagcaggagatggaaggctgaggatgtgtctgtaacagatggcccctgctttccagggcgtggaggacagcacttggggagtgggtgagaagacaggagacttcagtgggtgggaggacaagatggggtgaccaagagtgtgagggtggaagtctggacaggaccctgggctcatcacatgggcctccgggcagaaccagggcagcagagcctccactcacagcctggacaccagcctctccttggaagaacccatctcctattaagaaccctgtggcacagtggatcatgcctgtaatcccagcact

SEQ ID NO: 29092 - DNA, 1183 bp, Artificial sequence
  DNA replication origin
ccattgtccgaccccggtgcggctgaggcccctttgggcagcccctccgcagatcagaattggagataaccgaggcttcggcgggggcgggaggagctgcccgaggctctgggtgggccggaggtcgcgaaatccggagccccccagaggcggtgattctgagtgcgcgggtctgggcgggacccctcctgggtttggcgggtgtcagccgggcctcgcccaccaccctgcgaaggggactgggcgtggccggaggggggtgtccgggaggccgctgagcctttcatttcggggatggggagcggcaggcccgggctggttccacggtcctcgccaccatctcccctggagatgtggtttaggggcggaggtggggcggggcggggcggggtggggtcggtgttgcagcggggtgagtgggccctgtcctttctccccagctcctgccccggagccgggccctggcgaggcaggaatggccccgaggcctccgaccgccgcgccccaggtgagcaacgcgttcctaacctcctgggcatcccatccatctatccatcccatctcccaagggtgtttggagcagtcattgttctctgcctggcgactcccttacttgcttggctcgatcggagcctcctggccatggaaaaccccaggctttggggagctggattcccaaaggggaggctgctctgtggggtagagagggccagtgtggtgcgatcttgtgggaggagttgagattggatgcgttgggaagtgtcagttttgagagtcctgaatgccacgccagttttttgaactcttgtcaataagaaatggagagagtggggtcacaggatggaacactgtagaggaggaagtgactgtcggcaagtgtggagagaggagccccagcttctgacccagggcccatagagagtccgtaaggggccgtagaagcctggttagaacatgtctaggaagaggctggagatgggctttcttgggcaaggaggcaaaaacaaaacaaaataaaaaacaaccaaaaataaaaccagggctgattctcccagagctttttgtgtctgtccttttctgctttaacaaaaatgtaatagagcaactcactccccaccgccagaagtccagccttcaccttaatgtgaggctgattcgtgaacccatttattcttgtggcaga

SEQ ID NO: 29093 - DNA, 1283 bp, Artificial sequence
  DNA replication origin
gggtgcgcgtagacctgacctcccctcgggcataaaaagcgccctgcgggagatccaggccgggagggcgcggagctcagcgagcagccccaggctttcccaaccgcgtggtccacccccagcctcagtcccagccccagctgctgggctcacccgccggctaagggaatgctcccgagataccagatgccagttgctcgttgtaccctcagccatgaaattggaggattacaacgcttctcattctcttaattcaggggatgtggggatgctagaaagagagacggctcgccagacatctgagagcaataataccaggcagcatttgggcacttgctgtgtgccagatatgatgtttagcgttttaaaccttctaatttatttaatactcatctatgagagggtaaaatactaagatcataacagccccatttgacagatgcagaactgaggcccagggggtttattttacttccccgaggcttcagcgctactaaggggtgggacctggatttgaacccaggtggggccggccttaagggcccatgctaggcctgagagagcaagacccccaccctcgcaacgcaagcaatccatggcttagccacaggcctggcggggaggaggacggatagattaccaggttagccctggaaggtcaaagaatctgtcatttaaaactccaggctgggccccgtttctcacgcctgtaatcccagcactttaggaggccaagggaagcggatcacttgaggtcgggagttcgagaccagcctggccaatatagcgaaatcccgtctctactaaaaatacaaaaattagcctggtgtggtagtgggcgcctgtagtcccagctactcgggaggctgaggcaggagagtcgcttgaacctgggaggcggaggttgcagtgagcagagatgacgccaccgtactggacgacagtgagactccatctcaaaaaaacaaacaaaacaaaaaaacctctccagtctccagtccgttcctcaaacccctaaatctgagctggggacggggagggagaaggaccaggaggtggcatccagggcttctcaaggcagcagcagaaggtgaaggaggagtgaggggacaggtgagagagactgaccgggaaagctcagctccgtggggaagggcttgtggggtagtgattgagactcaggaccgttttcatggccagagcccacttgtgtgcagcaagaggaaagcacttcgtgtctaacgtagtggaatgagagtaacgtagaagaacaacgaatccca

SEQ ID NO: 29094 - DNA, 1089 bp, Artificial sequence
  DNA replication origin
gacctcgtggcgctggaccaatcagcacccacctgcgctcacctggcctcctcccgctggctcccgggggctgcggtgctcaaaggggcaagagctgagcggaacaccggcccgccgtcgcggcagctgcttcacccctctctctgcagccatggggctccctcgtggacctctcgcgtctctcctccttctccaggtactccacagcctcgccgtggccccgaccgggaccgctccctggggggcgggcggggtccgcatggggcagtggcgtcggggagagcgcggggctgcgctccctggggccaagggagtcccggaaggcccgtgaggaccctgcggtgtggggagtgcagggccgggcacgcctggacccagcctccttcactctctgccctcgggcgcaggtttgctggctgcagtgcgcggcctccgagccgtgccgggcggtcttcagggaggctgaagtgaccttggaggcgggaggcgcggagcaggagcccggccaggcgctggggaaaggtaagatcctcagggtggaaccgcagggtaggggccgcacgtgaccattttggtgtggaccgcgcgaggggtgttcgggccggggcaagggactcctggcgccacctcagttcccggggaggcgcagaacgcgcctcgggggctgggattgggggtggtggctgacggagaaggctgggcagcagagcgcctatgacatccagccccttgtccggtagccactgcttaccttgaccccctcctccgagatgccggatggctgagcccctcacccagtctcgacgtgggaagttctcccccgctggccccagcagaggaatgcgccggccacattcttcccccaacccgcgcgcaggtgtggggatgagccgtgccccgggcagcccccttcgcccctctcgggccccctttgtgaaccgtgctttgtgtctccgacagacagaccgggtctgtttcttttctccgagcttccctaccccgccccccttcttcctcggcagctggaatgcactcttaaccctgctcttcccggagggcctgcgcccttgtagcctgcctggaaactgg

SEQ ID NO: 29095 - DNA, 1458 bp, Artificial sequence
  DNA replication origin
aaaactatggctgggcgcggtggctcacgcctgtaatcccagcactttggaaggccgaggcaggcggatcgcttgagaccagcctggccaacatggcaaaaccccgtctctactaaaaatacaaaaattagccgagtgtggtggcgggcgcctgtaattccagctactcaggaggccggggcaggagtaatcgtttgaacccaggaggcagaggttgcagtgagccgagattgagtgactgcactccagcctgggcgacagagcgagattctgtctcagaagaaaaaaggagagaaagagaaaaagggagagagagagagaaagaagaaaagaagaaaggaagaaaggagagagggaaggagagaagggaggggaggggaggagaggggaggggaggggaaggaggggggaggggggaggggacgggaggaaaggggaggggaggggaggggaggggaggagagaaggcgaggtggctcatgcctgtaatcccagcactttgggaggccaaggtggacggatccactgaggtcgggagtttgagaccagcctgaccaacatggagaaaccctgtccctactaaaaatacaaaactagccgggcatggtgacgcatgcctgtaatcccagctactcgggaggctgaggcaggagaatcgcttgaacccagaaggcggaggttgccgtgagctgggttgcggcattgcactccagcctgggcaacaaaagtgaaactccagcagagagagagagagggagaaagagaaaaaaagaaagaaaaagaaagaaaaggaaagaagaaagaaagagaaagagcaggtgtgaggagggcagtgcagagttctgggcattttgaacacttggaggcggctgggggacctgtgagtgaggaagttcaggtgcagcagggctacccaaggttacacaggtgaggaactgcacacagggctggctgcacgcagggctggctgcgcccatgccagggacggtatggtgccggtttcccacagcctctgttctgcttcccactggagaggggacggggaagtggccagcagctggagaggaagggaaaggggaagtggtggtcccgtgggaacttacatcctttatttcatcttctttgcctccccactggggtggtttcccaggaagagaagtaaaagctgaggggtgaggcctgagtagggggcacgagggcgagggcatgggcactgactcacagagaggagcagaggaaccctgcttgtgtcacctttcagtatcggacagtggagtgggaggataagaggaacaaggcagccctgtctactctgggtgcagcccagggatggaggagcagccagtgctcccaggacagccctaagatggaagttttgagagtgcaccctccaccctgcatgatcctaggaagctaggagtccagagatgttccttgtgttttgtttgtttcttgggt

SEQ ID NO: 29096 - DNA, 855 bp, Artificial sequence
  DNA replication origin
cggggctcacctggctgcagccacgcaccccctctcagtggcgtcggaactgcaaagcacctgtgagcttgcggaagtcagttcagactccagcccgctccagcccggcccgacccgaccgcacccggcgcctgccctcgctcggcgtccccggccagccatgggcccttggagccgcagcctctcggcgctgctgctgctgctgcaggtaccccggatcccctgacttgcgagggacgcattcgggccgcaagctccgcgccccagccctgcgccccttcctctcccgtcgtcaccgcttcccttcttccaagaaagttcgggtcctgaggagcggagcggcctggaagcctcgcgcgctccggaccccccagtgatgggagtggggggtgggtggtgaggggcgagcgcggctttcctgccccctccagcgcagaccgaggcgggggcgtctggccgcggagtccgcggggtgggctcgcgcgggcggtgggggcgtgaagcggggtgtagggggtggggtgtggagaaggggtgccctggtgcaagtcgagggggagccaggagtcgtggggacgatcttcgagggaaggagaggggcatccgtagaaataaaggcacctgccatgccaagaaaggtcgtaaataggagtgagggtcccggggataagaaagtgaggtcggaggaggtgggagcgcccctcgctctgaggagtggtgcattcccggtctaaggaaagtggggtactggagaataaagacatctccaataaaatgagaaaggagactgaaagggaacggtgggctaggtcttgagggggtgactcggcggccccctcccgggagttcctgggg

SEQ ID NO: 29097 - DNA, 941 bp, Artificial sequence
  DNA replication origin
cccggggataagaaagtgaggtcggaggaggtgggagcgcccctcgctctgaggagtggtgcattcccggtctaaggaaagtggggtactggagaataaagacatctccaataaaatgagaaaggagactgaaagggaacggtgggctaggtcttgagggggtgactcggcggccccctcccgggagttcctgggggctcggcggccgtaggtttcggggtgggggagggtgacgtcgctgcccgcccgtcccggggctgcgggctggggtcctcccccaatcccgacgccgggagcgagggaggggcggcgctgttggtttcggtgagcaggagggaaccctccgagtcacccggttccatctacctttcccccaccccaggtctcctcttggctctgccaggagccggagccctgccaccctggctttgacgccgagagctacacgttcacggtgccccggcgccacctggagagaggccgcgtcctgggcagaggtgagggcgcgctgccggtgtccctgggcggagtagggaggggttggaaaggggccgagaaattgcactcccacacccctgggttgcaatgggcaagctccctccttggctcaaacgacaccccttggaatttacgcagatttggggatccaaacgtttacgactgaacactgtggtggagggggtaaccctgcctggttgttgactatgttataaagaagaggaggttgagggcacttactagaagccttcgtatttctcttattgccctcagcactgtagagacagtctctcatttcagactgcaaaaacctggtgggtgggaaggcctggcaggagtattcccgttttacagttgagcaaaccgaggctaagagagtgacgtccacttgctcagggtcagcagagcagatatctgaactgggatctgactcccaggcccca

SEQ ID NO: 29098 - DNA, 1204 bp, Artificial sequence
  DNA replication origin
ccccaacccgcctccccgcgccggacgcggcgcccgcagggctgggagctggccgggtgcggggggctcggcgagaggcacccctgccacccggcgcgccccggcctcggcgcagccccgcgcggccctcccctcctgggtgccggccggcccgcgctcaccgtgccgccggctgccgcgctccggagctcagcaggcccgcggcggctccatgcccctcctcccgctccgctccgcgccgccgcgcgctccgactgccgcctgcccagccgagccgcccttaagtacccggcgcgtgcccgccaggagaggcgcctcccccggccctggggccgggaaagttgaccagagtgggagggcccccgcgggcgcacccccgaccccgcgcggtcccagggagcgccacaagccagcgctcggcggggacgcctagtcccgggtggacgcggctccggctcgcaagactcgcagcccctgcgccctctccgaagctgggtcccccgagtggggccgaaggccacgcggctctgcaatcgccctgggaccagctgccaaggcaagacggtcattgggctcaacctagaacctgaagcgtcgttaactttccagataccacgcagggacttccaaaattgttactctccctccccgcccccacgccccgctctctaacccgcaaaacctactcaccctgcaaggaaggcgagctgagagcactcttccccgacttctgcacgcgaaggggcagttcgctgtctagggggctcccgaaagccaaggcagcaaaaccttcctgctggcaggaaagaggcgctgaagagaattgtcaaatgtaaaaaggctggtcaaagaaggtgttaacaattgtgacagcttagctttgaattccgcagtggggcgctgatgactttaaggcggtttgcaaaagctgcaaacggttttgtaggaaccttggaggttccggtgtcttaaagccaaaacaattcctcctcttctttttcacacctttatttccgacatccatgacctcctaaattcccaactgaccttatcgacagtagttttcaggtccctaaaagatagtgctagactcgagtaaagtgagatgaagtgagttggggtgcactggggtggggtgagatcgaggaggggggagagttgttagcagagacaagaagtttagaaccagctgaaggcgatgagt

SEQ ID NO: 29099 - DNA, 1119 bp, Artificial sequence
  DNA replication origin
ggcaggggtgcctctcgccgagccccccgcacccggccagctcccagccctgcgggcgccgcgtccggcgcggggaggcgggttgggggcggcggcagccccgggcttcccggcggccgttcctgcagccccctccccactgacccctcctccctttcttcctgcatcctctcctcttccagcctcgcctccctcctccccggcggctcctgttttgtgaatgaattaggaggcggacgccggtgcggggctccaggctggctggggtacccctcccccgcaccttctacgacctcccgggggtttgcacctgtccgggcaccaaggtaccaggcgcccacgttcctgcgggttagccgggccgcggcagcacgtgtccgggggagtgggctcccctcccctggccggcctggaggggcccggagggcggccgggcacaagaggaggagccccgttgggcgcacaagtttccatgccgctgcgtgtggccctgccgcggggcgcacctgtcagcgggagagacgctgcacaccagcagcccctcaaagtttcggaggcttgatggagaagcgtgcgtccttgactgggggttctccttccgtagtcctgggagccggacttgagagcgcccccaaccttgtgcccttgaaagccgagtgcgcgttagtttgcctgggctgggctcccgtggatgagcgaagggcatgaggaggcggcggtccaggctgtaggatcaccccacagcctctgccggcttggggtgacacagccccccgccccaggtctgggcaggagaacctcgaccacagcctgcaccagcgcctgattgcacgtggggtatctggctgagggacattttgggggcctctatttgggggtgggggtagtaacctgggtaatgcctctaattcctgcgggggaggggtcccgcccagggaaggagagggccggctacaccggggatgcgcctttgtctacaggcacactttgccaaggtagctggggtaccaggaagagcagggcctggtccgactgggatcccttgggttttccgttccttcccggttgggtcgtgggaaagcggcacgtgggtgtggccggcgccgcctttgccaagag

SEQ ID NO: 29100 - DNA, 923 bp, Artificial sequence
  DNA replication origin
agggccggctacaccggggatgcgcctttgtctacaggcacactttgccaaggtagctggggtaccaggaagagcagggcctggtccgactgggatcccttgggttttccgttccttcccggttgggtcgtgggaaagcggcacgtgggtgtggccggcgccgcctttgccaagaggcgaggctcgagcggggatgagaagcgtggcgagtgcgttcgcggctgctttgacctggtgggcgccgcctccggcactgcaccgaggcggggcgccagcgcccaggttgctgggctggccttggcgcccccttcccctacccagagcgcaggcaggcaggggggtcccgccgcgccccttcagcatgtaagctccggaggggaatgggggcgctcctaggctgcggatgcaggcctggggactcctgggccgcaggcgcgagcagtagggtggcaacagggagggctgggagtcctgtgaaggaagcacacggcgggctccccgggacggtggggcagagcgcccggaggccgcgcttcccggagaggctaggctgccagcagctcttttcgggccaacgctgctggaaggctgctagtgccggagtctcaggtcgatttaggcagtgactgcgtgttcttcgtcccttctacgtgagaggcgtcccgacaggaaagtgtgtttgttttgggggctccgtttcctgagacctaagagttggagcaagcttggaagcgaggcatcattgtctgtagacctcagtgaacatggggttctctagatcaggcaggtggcagagaggagatagtgtgggtcagaatgggaaggccggcagccatccttgccaccttttctttcccctccctcacatccccctccccacctgctctggaggaaaccacagtcaccctcaccactagggtagc

SEQ ID NO: 29101 - DNA, 1045 bp, Artificial sequence
  DNA replication origin
tggatgaactggtagcccgtcacataggctgccaggatgccacccagcactgccagggcaaacaggctggtgcccaccacacgcagggctgtcgtcagctgcaccggcatctggcgagagaaggcaggagatgaagggtcaggcaggaggcagcatttccagtccgtgggagcatgggtgttctctgttactagtggacatgacccactgatcaaaaccgttaccgcttactgagcataagacttggtagactcagaagccagactactggggttcagatcccagctctgccacttgatgtctgtgcccccttacgtcatctgtaaaatgtgggttgcaggactaacctcaaggcatctttgagggttaaatgggcgacacatacaaagcccttagtgtagcactggggtagacaagccaaggcccagagggtcacgtgacatctggctggtgggtggcagaactgggctctacctggcccaaagcgctgaagaggtaagcttcaagggggtgagcctgaggcagctctgggcacctgagggccagggaggcagccagtggcctaagagcttccccctaccctgcacccactcctggaggggatattcaccagtaaagtgcagccaccagtaagacccaagaagaaagtgcaggagcaaaagaaacagcaaacaaaggggcattgggaaaaagcagcagcttccctttctcaagacagttattagagaaactttccctgtgtcctccactttctcaccttttacttgagaggcaggaaagaaagggaaagcagggggagaggcagaccaggaaatgcaagctggggagtggacagcctcctagagcccagggctgaagaaagcacagggaactgcagccaccactgcagcagcctccacagtggctgcctgggcatcccatccgcttggtcctagtgcccgtgcagcatgcgtctctgtgcgtgtccccctgcccagccactcctggaaacaatgcccggtttccatttgcaactaagtcagggctcctaacatctcccctgttg

SEQ ID NO: 29102 - DNA, 2130 bp, Artificial sequence
  DNA replication origin
ccaccttgtaagacccccccagctctcgcagccgcttcccacgccccttccccaactcaccagcggccccacgctccccttcccggtgctcgcctctctccgccccggccccacgtgcgcgcgcgctctcaggctctgccccggaagtgctcctggcgcatagtcggaagtgcgcaggcagtgctcgcggcggcggcgacggcggcgggaggttcggttgtcgcccgttggccgcgcggcgccgcgctcggcggccgccattgcaggtcaggccgcgggcggggggcacgggaggctgcggggagcgagggccgagccgggattgggggcgagggcgcgagggagcgggaagctagggagccggggccgggcggggcgcgcggctcggagagaagaatggcgagccgaggggcggggagcgcgggcgggggaggggtggccgggaagggggagggcggcgggagggcggcgcggaggtgggggcaagcccggaggggcctccggggtgggagggccaggagtgtgggggaagggagcggtgtggagacggaaggcggagggaaggaagggagcgagcggggcggagcgggagaagggcggaaagggtggccgagcgcgggcggaggacggagaagggggcggcgagggccggaatctcgaggtacgtgcgggaaggggctcttcccggggttgggagggagcccagcccgctatgcttgcgggagcggagtagaactggaacctaggaagtagcgggaagagcagaaaggggagttcggggtgggggttaggaccgtgaggttttgttccaggtaacatttgtaatcgtggaggggggaggcttctgggagaggtaattggaagggtggttggagagtcattccaggttcttttgtgggagggaagccgagagacgagtggggtggggtcctggaggagtggagtacttgagaaccgggaacaatttggagaacgagggtggtagagaaaggacgtttaaagagtaatctttgggaagagggtgaacggtttggaagaccactccagtgggtggtgtggaggaaggcggtttaaagaatagtttccctgggaggcaggaaaaggggttaaaacagcttgtaatttggaggggggtggagaagaggggggaagcggattgagaagtcccagaaagtgggtgggactagaaataggaagtgtttgtagctctagcagaaagggtgggagggggccgagagggagtgggtggagaagatgggggtgggtgggaggaagagcacagagggagactctacgccgggctagaaaggaaagggtttgggggagtacagggggccgtaccattaagaggaggacaggctaagatggggctgcagagtagcagaagatggagaaaactgcagtaactcagatcgactgaagccatcttttccacccattgctacaaataccagtaattgattccctccaacgtgggaatcctaaaatgtgatgggaagtatcacgtgtatgcatagcatccacacacgtttttgaacacacttcactaatgtaaagtttggaagcattcaattccaccaaccctccataagcccctttttggaggggagcaagattctcatttggaaacaggattttagacttagtaacataagcctttcaagagacaagatccccttcaaaagtatagacctgtccccttcagttacaaaaccacgataacactacaaataaaaataatctgtattcggttgtatgtaaaacgttctgagttgttcacttggtagaaaggcacatagagacatagtcatcatatttagagaaattaccttccagaacttaatccctgaagcagtttggtgaaccacaactgccatgtttgaattctactgttatgaaaacttgattttattctgatgacctgctgctttcgtagaatgctttagtccgttataaacattaatatgctaacacagtgtagtattaagacattctatttgatgaatactaagaaaatgccacctttctctgggaaatcgatagcttgaccctgaaggcttaccatgtgtcagacaatgtgctaaaagctttacattcattactcgttcttgcaacagcctttcaaaatag

SEQ ID NO: 29103 - DNA, 1228 bp, Artificial sequence
  DNA replication origin
gtctccacaccgctcccttcccccacactcctggccctcccaccccggaggcccctccgggcttgcccccacctccgcgccgccctcccgccgccctcccccttcccggccacccctcccccgcccgcgctccccgcccctcggctcgccattcttctctccgagccgcgcgccccgcccggccccggctccctagcttcccgctccctcgcgccctcgcccccaatcccggctcggccctcgctccccgcagcctcccgtgccccccgcccgcggcctgacctgcaatggcggccgccgagcgcggcgccgcgcggccaacgggcgacaaccgaacctcccgccgccgtcgccgccgccgcgagcactgcctgcgcacttccgactatgcgccaggagcacttccggggcagagcctgagagcgcgcgcgcacgtggggccggggcggagagaggcgagcaccgggaaggggagcgtggggccgctggtgagttggggaaggggcgtgggaagcggctgcgagagctgggggggtcttacaaggtggccggcccagggtcggcgtccggctgagctccttgtcccgagggtctccttgtcccgaggcggggtgggggctactctgtagactcggggagagggaaggggaggcgaagaccgcgcgcgcctcagacgccccggcccgaccgaacgcgcttgctctgtctgcgggttcctaaccttgaagctaggccagtgaggggcgaacaagacctggtctctactctcggccagtatatatgttggcgggcgtcggggggacggggtagggtaagtgacagacgtcagaccaggcagccagattaagtcaaaccctgtcgtttcttcctcaagaggagctcggttctgcctgccccatcagcctcactgtcactacctcagtttaggtctgttgtttgcaaacttagcaatagagttgaggagagatgcttgctaaaatgcggattcctaggcgccccgagataggaactctggagctatggagtaggaccctttttgattttttgctgaagcctccttattattcaagccattctgagcttttgaagattgagtaattcttgtggggggcattgttagcagccatttggaaatgaacttcagggagatgttgttggagccttccagccagaacagtgatattaaggaactgaatactatatgtgacatactgcagttaacatatag

SEQ ID NO: 29104 - DNA, 1359 bp, Artificial sequence
  DNA replication origin
ccgcccgcctcttgcttcaccacccgcacccggcgcacgggcggcgacgcgcccgcctcacccgcggggccccgaggcggcgccggcgggctcgggggccccaggccgcggcttgggctcccgggcagcgagtcgcccgcgccgccgccgtttgggaggccgttgaaggcggcggccgcgggtcccagagcgggctccagctcggccgcggcggcgtcgcccgtcaggctcaggctctccccgctcagctcggccaccactcggacccagcgctccctcaggagcagctccaccagccccgctttggtggcccgcgtccacaccgccatggccggccccgctccagccgccgcagtcgccgcagctaccctcattccagtcaggcagcctcggcgcttccctcttcccgcccggaggggcgggcccggcccctcccccgcacgattcattattcatgaggccacgcctgcctctggaggggcggggccggcgcagccgcttccgggaggtgcagaagttgtccgatcactcgcctctcgccggacgtgggcaacccgaatgcggtgggactgcatttctcctcatccttccattggctccccacggaccccccagaaactcctgacctctaccgtgcaattcacgggagctgcccgggcacggaaagcaaaatcagcttggagaaacacttctcaagcctgcaagacccggtggcacgttcattcttgcattgattggttcgtaccctgtgtactgagcgcttagccctgtactccggctccttttgaggccctgtacttaagctcaatagtaccaacaacagctgagagtttgcggtctagtggggaaggaaaatgcagaaccaaccaactaggtgtgatactatgtggttaagtgacatgcagaagacgtccccagaacagcataaaaggaacatttggttaggcctggggtcagcttcacagaggtaacaacggacggtgaacagctcaagcaaaggtccaacagcatgatccaagcctttgtcaatgttttgtaatctcgtttacttgcctgtaattcaagagggaaccatgtcttcttaaaccctgaagccacaattggcaggcctcaaggatatttgcagaatgatggtgtcttagggttcttcagagaaaccaaccaataggatatatagagatatataaatttattattattacaagggactggccacgagattatggatgctgagaagtcccacgatctgccatctgcaaactgcaggcccaggaaagttggtggtgcacttccaatccaagcccaaaggcctgagacccagaatcagtggtataaacctgagattgaaagtctgggccg

SEQ ID NO: 29105 - DNA, 1102 bp, Artificial sequence
  DNA replication origin
ggccgccgccttcaacggcctcccaaacggcggcggcgcgggcgactcgctgcccgggagcccaagccgcggcctggggcccccgagcccgccggcgccgcctcggggccccgcgggtgaggcgggcgcgtcgccgcccgtgcgccgggtgcgggtggtgaagcaagaggcgggcggcctgggcatcagcatcaagggcggccgcgagaaccggatgccgatcctcatctccaagatcttccccgggctggctgccgaccagagccgggcgctgcggctgggcgacgccatcctgtcggtgaacggcaccgacctgcgccaggccacccacgaccaggccgtgcaggcgctgaagcgcgcgggcaaggaggtgctgctggagggtgagcggggccgggcgggagggtgggcaggccgcggcggcctgggctcgcgggagctcactttgttcctgccccgccggcggggcgagccggttctctccccgtctctctccaaacccgggtttctggagctttcagtgtggaaaaacggatgcttcttgcaggaaaagttgggcagccgccgaagtgtggcttgcagcccctagggaagactcggctgagattgagtaaaaagcagctgcctatgaagccccacctcggcccgataagctgacactaagaacttgagggagagcgaacggctcgagtgggtctgtctccgtttgcccgctgagaagtgccgggttggcgcttaactcactcacctctggctcctcggggcgggcgggtctattaaaaaaaaaaaaaagtccatcttcaccgatgccagcggtatgctcgggcaaaccaccaaagcgctggttaatttatgggaatttaacccatcattggctctcaacaataaccaaaggagatcatagcatttcattgaagccagaaagctgaaacagcaagtctgtgtggttaacgaaccttgtttaacagtggaggctcacgtgtttgaacatttactgccaactagagttttgccccttttgcaagtctgctgccagcttcctaccactcacaggcgcgctgcttcaagactcttggggtttttgtaagaaacttgaaatggc

SEQ ID NO: 29106 - DNA, 938 bp, Artificial sequence
  DNA replication origin
acagtgagccaagactgcgccactgcactgcagcctgggcaacagagcgagactccgtctcaaaaaaaaaaaaagagagaatgaaaagacaagctgcggacaaaaaaattttgcaaaacacatatctgatacaggactggtatccaaaatatataaagaactcttaaaactgaacgataagaaaaccacccagttaaaaaatgggcaaagccggccgcccctactgggaagtgaggagcccctctgcccggccagccgccccgtccgggagggaggtggggggttcagccccccgcccggccagccgccccgtccgggagggaggtgggggtgtgagccccccgcccggccagccgccccatccgggagggaggtgggggggtcagccccccgcccagccagccgccccgtccgggaggtgaggggcgcctctgcccggccgcccctactgggaagtgaggagcccctctgcccagcaaccaccccgtctgggaggtgtacccaacagctcattgagaacgggccatgatgacaatggcggttttgtggaatagaaaggggggaaaggtggggaaaggattgagaaatcggatggttgccatgtctgtgtataaagaggtagacaggggagacttttcattttgttctgtactaagaaaaattcttctgccttgtgatcctgttgatcggtgaccttacccccaaccctgtgctctctgaaacatgtgctgtgtccactcagggttaaacggattaagggtggtgcaagatgtactttgttaaacagatgcttgaaggcagcatgctcgttaagagtcatcaccactccctaatctcaagtacccagggacacaaacactgcggaaggccgcagggtcccctgcataggaaaaccagagacctttgttcacttgtttatctgctgaccctccctccac

SEQ ID NO: 29107 - DNA, 1456 bp, Artificial sequence
  DNA replication origin
gctgggaggcgcccacctgaccacccgcccgccgcccggctctgcggcccgcaggccccgctgccttcggcctccgaagtcgggccgggccgcacgaagtacctggagggttgacgttgtcatttcatctcctgggtccgccccacaccccgcggcgctgcttgcggcctcggtccggccccggggagccgaggtactgggtccggcgcgggaagcccggcggtgggcgctgagcgcggtgcgcgggcagggcggccgctcgcagcgggagccgagtccgagggcaagcgaggagcgcagcccagagcggtcgggcccgagccgagcggctgccccctagcgtccacggctcgcactgcaggcacctctccctgcctcggcgaaggcagggggcggttcgagaggcaggactgactggggacgaggaggtgggactagggcgagacggacagggggcggggacggggtgggtgggacaaggccggggcggggcctggcgggacgtacattctcggggcggggccaggggcggagcggggtagaatccggaaatcctgacctcgcttggaataacagcgcccattgagcagttttattctcacaataaaacgaacttatcagagcgttggtttctccatgtttaatatcgcacgatcataattagtacctgccttgtctggcttttgtggggaataaatgagctagctaatgtaaacagagtgtgccccacactggggctcaatccctggtgggatgccgctgactgttcaaagccagttttgttttgcttggattgattgactgattgattgatacggagtcttgctctgtcgcctaggctggagtgcagtggcatgatctcggctcattgcgacctccgcctcccgggttcaagcgattctcctgcttcagcctcccgagtagctgggattacaggcatgcacacctactgtgtgcagcgttgtgtgctagtttctggggatacaatgatcaaagcagttctagggctgggtgtactggcccacgcctgtaattccagcactttgggaggccaaggcaggaggattgcttgagccgaggatcaagaccagcttgggcaacatagtaagacctcgtcgctaaattaagaaacaaaacaaaacaaacaaacaaaaaaacgcaccagaggcaagtgatccatttgtccacaagtctatcctgtgagagaaaaaaaatggagggcaaaaaacatccaagttgaggctgggtatgggggctcatgcctgtaatcccaacactttgggaagccgaggcaggccgattgcttgggccgaggaattcgagaacagcctcggcaacaggtgaacccccatcgctacaaaaaataaaaaacgtatctgggcatggtggcgcacacctgtagtcccagctactccgtaagctgagttgggagaattgctggagcctgggaggtcga

SEQ ID NO: 29108 - DNA, 1226 bp, Artificial sequence
  DNA replication origin
tccagcctgggtgacagaatgagactgtctcaaaaaaaaaaattaataaaaacaaaaatatataacgggtgagttatatggtaagcacgcaagttataccttaataaagctgtgtttaggccagacccgtggctcacacctgtaatcccagcactctgggaggccgaagtgggcagatcatctgaggtcgggagttcgagaccagcctggccaacacggtgaaacccggtctctactaaaaatacaaaaattagccgggcgtggttgcgggtgcccgtaatcccagctactcaggaggctgaggcaggagaatcgcttgaacctgagaggcagaggctgcagtgagccaagatcacaccactgcactccagtctgggtgacagagtgagactccatctcaaaaaaataaataaataaaatttaaaaataaataaatacacctgtgtttgaaactgaaaaacattctcggttcacgggccataaaaaacctgcctgggcagacgggatctgcggcttctgctggtggtacggtgggatctggctatggactcttaattcctaacctggtaccccaactcattccatgtctgctcctacttctgccctcctccacctccaggtctctgaatgctactggaactctgatgtcccttcttccatgaagtcttgcctaactctcccaggcactttgttggctgtcacttaatggacacctactatgtgccagacatacaagaatgctttaccgtaattattcaatttaaagctatcatcacaacaacctagagggcattaccccattttacagaccaggaaactcgagacccgaagatgaaaaaaaaaaactagcccaaggtcacttgctggtgagtggcagagctgagattcaaaccccggaatgaggcctgagcatgttgatctcttctggccccgcaggactgacagcacctagagggtgggtcagttgttcacccaggtggcgccatcccagcaccaccctgcaggatctagggaatgaatgaagggtcgctggccgagaagaggaagtcgaagattggggaaggggccggggcttgttcgaagtgaggtcgagggacttccaggacccgggacaggagaggagggagcgagacaggagaggagggagcgagcatcgctgtctgaacgcccagccggaccccgggccgagcttcctgagggtgcctgtgcggctcgggtgaggctga

SEQ ID NO: 29109 - DNA, 2162 bp, Artificial sequence
  DNA replication origin
ccgccccggacggcgtcgagggcccggcgctgcggcgctcctattggcgccacctgaggcgtctggtgctgggtcctcccgaaccgccgttctcgcacgtgtgccaagtcggggacccggtgctgcgcggcgtggcggccccggtggagcgggcgcagctaggcgggcccgagctgcagcggctgacgcaacggctggtccaggtgatgcggcggcggcgctgcgtgggcctaagcgcgccgcagctgggggtgccgcggcaggtgctggcgctggagctccccgaggcgctgtgtcgggagtgcccgccccgccagcgcgcgctccgccaaatggagcccttccccctgcgcgtgttcgtgaaccccagcctgcgagtgcttgacagccgcctggtcacctttcccgagggctgcgagagcgtcgccggcttcctggcctgcgtgccccgcttccaggcggtgcagatctcaggtgcgggcggcggggaccggggctgctggagcagcgcgcgcgtctcttctgcccgactccgcgagagcgcagaagtggtcgcggttcatacgccggacctcccgcaggagcgaagtgggatgcgggagcggagaggcctcaggacggatagaagctcctgtggggtagagcccgctcagataggacgcaggggcgaggagaggtcccctagttccgctgttacctgacagcctggcgtctgctttctgctcccttgctctctgaggcaaacacgctcttcggccccagttagatccgccacggtggagttggagaagtgggggttagcccccgccagcctgacccagcccagggggctaggccattcccccgtggtaccacaggatgcctcgcggaatgcgggctctgctggggtcggggtgattgttcctgcacagcaagcccgtcggttcaagatggtcagaaaaacaagtggggtctcaagctgcagaacctctgttaggagttgggagcccacaggtacctcagaagtgggaggagtgttcggaagggtcgcaccgtagaaagatgatttctcatctcagctctacagtgagctcgataacctaattaccagagttgggaaccaggttgaacgcttggtaatggaccgagatgagggacgttttccagttagaagaggagctgctgtctacatttgccatctgctgttgcctcttgtcaatgggaacagccaggaccgggggcaggggtagggaggttgaggatgatgcagttcagctgttcccactcaccagggctgtaacttcctttgcagggctggaccccaatggagaacaggtggtgtggcaggcgagcgggtgggcagcccgcatcatccagcacgagatggaccacctgcagggctgcctgtttattgacaaaatggacagcaggacgttcacaaacgtctattggatgaaggtgaatgactaaagctttgctactggggctgaggattccggataccaagacgcaaacactttcactttgagctgggcaaatcttacttggcatcaacttggatggctcgcatatgacaggaaactggattgccaaggcatggcagactgagctggaggaagatgtcagaaatgtttgccctgaaatcagttacggacaaaatgttggctacaacttgaggagaaaaatcacccccaaaggagtggacatttcctaacaattctgtatggaggaaggtggggtaattgcattcgtctgcagtagacacgagttcctcggacctgtataatctcccaaagccaaggtttggtaataatgtagtccccaaatacctgaaagctgtctttaaaaatgcaggtaagcatgtgactggccatttgtgccgagttcttatttttacggagggcttgtggccttagacgccagtttgcttatggaaatgaaagagaatagtccctgttcaaggatgtgtttcatgacagcacgagtgtaaatgagtgcccacacattttaacagccttgggcaggattttgctgctgagatccctagagcagctggttcttggctcattcttggggtagaggccgtggatcagggctgggggcaggggtgacaattgagaagtgcactgagccctttcctgttaacaattgggcatagaaagcaggattagtacttcctggtt

SEQ ID NO: 29110 - DNA, 1615 bp, Artificial sequence
  DNA replication origin
aatggattaataaagcgctcagcagagaacctggaacgtggtaaacgctttatgtgttagttatttctaccatcgtaaatgtcagcttttacagttataaaacccctttagcgccaggcgcgtcgcacctgcagctctgctggaagctgggcaaacggtcgagcaggcggccgagcgacgcctccacgtcgccaaacaggcggtggatgcgctcggtgcactcggcgccgcggatgaaggtcttgtagttagcgaaggccaagtcgcgcgtctgctgcagcagctgcgcccgctcctccgccaggcgctcgggctcgcgccgcagccgctccagccccgagccgctcaactcccggaggtagcggcccacatcgggccgctcgcgccactgggcctcggggaagcggtcccggaacagcgacgccaggagcccttcatcctccacctcgccgagagccgctgctgtggccgtggctaccgatgggatagtcgccgcggtcgccatcttcccagcaacaacgtcacttcccttccggaccacaaggggcgctgactccgaacttaggacaggaagaaacaggcacatttccggtctctatgctttctcatccggccggcttgctttcccctgcggtcgtccagactattgggcgctagcgagacgaactattggtacggggctagagaggaaggctttgggattgccggggagcagcgagcgaccgacttccgtttccagttaccaaggcacgaggatccggtgttccaacccagggggaaaaatgcggcctttgactgaagaggagacccgtgtcatgtttgagaagatagcgaaatagtaggagcgcgcggggcggacgcgggagtgtgtgggtgtggtggccaagggtggagtgggggcgcggtgccggagaccggttcgttcgggcgcggtctccagtcctctttttgccctcagcattggggagaatcttcaactgctggtggaccggcccgatggcacctactgtttccgtctgcacaacgaccgggtgtactatgtgaggtgaggcggggccgggcaggcagcatggacccaggggagaggggtcctgggtcccacgagcctccttcatccgcaaccttgctccccctttacccttttagtgagaagattatgaagctggccgccaatatttccggggacaagctggtgtcgctggggacctgctttggaaaattcactaaaacccacaagtttcggttgcacgtcacagctctggattaccttgcaccttatgccaaggtttgtggggcggtttccaattctgccacgggcgatgaagtcaaggattaggcagattgtccggcagcttctctcccacagagtccctgacagtgtgcttggaggagtttcagcacatggagatgtgtagaggtcttgcagcttgagcatggtcagggctatgggataggaatgctatgtggctgcgtagggttagttttctccagcgaagtagaagagcctagggagacccagctagagatcagaaagcaaataagtggcagcaatgaagacaccggggtccagaaaaagagctgttaacctggccatggaggatgatccttgtagagt

SEQ ID NO: 29111 - DNA, 933 bp, Artificial sequence
  DNA replication origin
ccggtcctttccctcccagaagcccgcgggcggctcggaacgctgtttctatcatggccgcgggagccgggacggcgggccccgcttccggcccgggcgtcgtgcgtgacccagcggcgtcacagccgaggaagcggcccggccgggagggcggggagggcgcgcggcgatcggacacgatggcgggaggaggcgggagtagcgacggcagcgggcgggcagctggcaggcgggcgtcccgcagtagcgggcgggcccggcgggggcgccacgagccggggctggggggcccggcggagcgcggcgcgggggaggcacggctggaagaggcagtcaatcgctgggtgctcaagttctacttccacgaggcgctgcgggcctttcggggtagccggtacggggacttcagacagatccgggacatcatgcagggtgagggccgggccgggggaggggggttggagcgccggggaagggggtccgggggaccgggagtcgggactgggggtcgcccagccaacgatgtcttctctcccagctttgcttgtcaggcccttggggaaggagcacaccgtgtcccgattgctgcgggttatgcagtgtctgtcgcggattgaagaaggggaaaatttaggtatggctatttttgtgttcttctctgggcttacttgcgtagggttttgttttaaaacttatatctagaactgaaggattccaggttaaagtgcgatagtttccatcagagtggtctttttcattctacgatgggtctgttttctggctcgactggctctagttttctccggttaaggttgtcttggctgcttttctgtgttttttttaaatcttctcccacctgttaattgctcaccccaactttgctcctgtctaaagtgagttatgttcatatggacatcttttttcccccatggt

SEQ ID NO: 29112 - DNA, 1067 bp, Artificial sequence
  DNA replication origin
accgaaccgggggcggcgacgcgagggcggctgccgctgcctcctcctcgagggtagtgacttccactgggccgaggaccgaggaaacgatggcgaggtggagggggaactccacggggactgattctcggtgaccaggagaggggttcaggacggggaaggggaagggggagagccaaagggtccgtttcgtgtttctcctcagcgaaaactgacggtcgccgccaccgccgccgccgctgacaggaatctgagccccgcccccgtggggcacagcgcaggcgcggaggggggtgcccgggagcgcggaagagccgtggcggcccccggagggcggggaggcgcgccagggaacagcagcaacatgggcctcgcttcctgccggcgcggcccgggctgctgctgttcctgagccgggaaagggccccgctgccagggtgggagggggggaggctgggaggtggccgcgcgctggggccccggggagggaaaaggtatttgcaacgacctggtggcggcgagcctgaggcggccggccccgagcagagctgagcgcaggagacagagccgagagaagcgagaggtctgcgcgagccggggacggaccccagaggccggcggcggacgggcctggctggcccggggtctcgcaggggaccggagtgtcatcgcccggacagccgccaaccctttggggtttgcatagcagtgtgtacaaagggactgtcaaacccatttcttaattaggaaatggcaaaccgtatcccaaaaacctcgagttattgatttttaattaaagtactttctcccctaacactcccctcctacctttggaggctgaaattttttttaaaaaaaacgatctctctgattgtgctggggcatccgggttattcggagtgggacatagaagacaattaaaaaattggatcatgtgaatccacctggctgttctagaggaaaaacaggtaaaaagcaaacctcaacgctactcttccaaacagtttttcttttttctgtttctttttttttccttttggactaggcaaagatggaggaagaacgca

SEQ ID NO: 29113 - DNA, 1404 bp, Artificial sequence
  DNA replication origin
cccctcccgctgccctcgggccgggctgggtcgagctgcgatgccctcggacttcatctcattgctcagcgcggacctagacctggaatcgcccaagtccctctactcgcgaggtgagtcaggctgtggggggtggggcgtgggggcggggagacagggagacagggagacagggccaggggaggcgaggggtccccgtcccgccgggggcggctgagccgcgacccccatggcttctttggccggagcgggcagaggccgaagggatcggggtgacggtggagggggcgggcggagcagtggcggcccctcccccgcggagccgccggccgctcggggcccagattccgtcggcccccggggctctgcggcaccggtcgcttctagccgctctcagcccgtccggccccgccaggctccgcgagccgccggccccggcctcccgggctcggggatggccccagactgggccccgcgctggggccaccgcgatcggggcgccgcgtcttctcttaccgggaccctcctccccagcaaagttgcccccaagcgggcggcgtggcctggagccggttctgagtgcagggtcaccattttcctccctttccagcttgtttttgcgccgtcgttccaccccctctccctccggcctagtccactccctccccatgttgggacagcccccctcgaccaggcgttcttcctttcctcgtcatcttcttgctggaaagggcccgatggaaagggcccgaattttcttttctttttttttctcttcccacctccgtggcattctaattacttctcccttctcctttacaaagatgggggtgccctctctggattggttttattcctctcctctcccaggaggaccagcccaggcacagacgctgtcctttgagaattttctctgcttttccgttcaagggctggttgcagggagggagctcaggcagagacttttcatttaagaactcttttggctaaggcctgcaggggattcccagcatctgaaatattagcactggagctgatccctactcaggtgaaattcctttactggacaccacaagaatgtgtcagaacaggttccctgtgcaaggggcttcaaaaccaaaatattcccactgcgctctttacgctttttaaaccaccgggagggggcaaaagacataactgggttgttaactattcatttcaccgtgtaaaaaaaaatgtaggtgtttcttctgcttttggtttgatgtatccatccatttgcttattccaccccctccaaaaaagggacttcaccttcctactagtgtatctaaattgtttaagtgaatcagagtgagatggtttactctgaaaggtgctggactttacagactgaccattgattttgtacacagagtccta

SEQ ID NO: 29114 - DNA, 835 bp, Artificial sequence
  DNA replication origin
tcagtgagccctcaatttatttgattgcctgggaccatccggtgagcagaaacccttccactttcaactacagagacgataaaaaggcctcctcgaggccagaggtgcccaggccaggcctaggtggcccgcacctgcgagcctggccagcctcttccgggtcaggtgaccgcgcgcggtcacgtgacccggcccgagtgcgggcggtggaaggcggaagtaggagaggagttcggcgccgcttctgtggccacggcaggtagcgagcgctggcgcggggggcgcggtgggctggctgcctgcacggggcgggccgggggcggcgggcggcgcggggtgggccgggggcggcgcggcccgggcgtcggggggcggcggcttcctgtgggaggggcctggcgcggcggttccggcctccgaggaggggtgtcccggctcccgcccgagtggggtgggcgcgccgcggcccgcgcgggggttgctccgaaatgggtgccccggccgccaagggtgcagctggagcgagtcctcccggaaggggagaggagcttaggttcccaggcatggagaggagcgatctttgtggagggatcgggaccaggggaaggggcgacttggaactgagctggaagggggtgcctgaaaatgggtttatggcgtggagccagagggaaaaagatgctgcctggaccccctctgagagtctctcccttccttcctgtttggaaatgattgttacccgagactttgatgacggtcccattcagtttttaaacttcaggagggatcacagaatcttgatcgtcttgcttccctcgcgcccacttagtcctgc

SEQ ID NO: 29115 - DNA, 895 bp, Artificial sequence
  DNA replication origin
tggggtgcagccccgaggggcccccctccctgcatccactcagtgcttgtgagtcctatcctgcaggcacctccctgctccgtttacagatgagctcagggagtctcgggagatcaggggactgcaccaagtcacccaggggtggtgattgccaggcccacttgtttaagaagagggagggggctgggcacggtggctcacacctgtaatcccagcactctgggaggctgacacaagcagatcacctaaggtcagcagtttgagaccagcaatggccaacagtgaaaccccgtctctactaaaaatacaaaaattagccaggcgtggtgtcacatggctgtaatcccagctgcttgggaggctgaggcaggagaattgcttgaacctgggaggcggaggttgcagtaagccgggatttctccactgcactccagcctgggcgacagggtgagactgtctcaaaaaaaaaaaaaaaaaaaagaagagggagggggcggggtcagctgtgcgtggtggggagcatatgaggccgggctcctgggggcaggagactagggcagagaggcgtggctgtagggctttttgcatcacaggagggcagcatggccgggtgggagcagtggagcctttctgacaatggccagggcccaaacacagaaccagtctgcaacgcgtgggcactgctcacatgaccagatgggagaaagacagcaggagcgggtcccattgcctgggcagggccgaaggatgcccacgacaggatttggagatggaggctcagtcgtgagaggagctgggctcctcctggagggacatcagacaacaccagtgcttcctccagcaggactcctcatccagtgctctctttgccacctgacctggcacccggtggatg

SEQ ID NO: 29116 - DNA, 1149 bp, Artificial sequence
  DNA replication origin
gcagatgtaacggtttcgggttttgcagcgctggtcgttccagttgaaggcagctgaagcctgcagctccacgcagttgccaaacctgcaggccatggtgtggtggtcaggaggcaagagtgaagtcagggaccgggagaggcctaagccctccacccatcaggaccctgcatctcaggggctccagtgcccccacctgccgacggggctgccgggagccaggcccgtccccaagcccccagccctgctccacttctcagggaagccccttcctggggtaacagctctgcctaccccatggcagcactcagccacaccagcctgtggggatggtggggactggaatagacagcccacttgagaggtacacctgggaacccaacaaggcccagacttcctccaggcaagaggccaggggcacaggccggctgttggcaaggagggctggctgaaatcgctggagcccttggtggcctcgcagccggaccacctccaccctggccctgggcattgctgggctttgaagagcagggtggggccacgtgaccagagggttcttgctacaggatggctggtgggtctgcaggtgcagggttgtattgtgaatgagtgcaggtgggtgacagctaaggaatgctggcatcagtgtaactgatgcaggcagagggcatgcagacggaggggtgagtggatgagaattggagggatggagtcacaccaggggacactggggatggacagatggatggaggcttcctgggtccctctctcccccacgtgacgtgccttccggcttgcatctccctcaccccaccaccggcccacaccagctgtgcccacaactctctggcacctgggcaggcaccagggaaggatcagaccctcaaagggcccagccaggcagcgggatggggggctccaccaggcaggcccaagtgagaaggaggcccaggggagggaggcaccccacacttacccgtggttgtcaggctgcccaaaggcaaaactggtgaaggcctggtgctcccctgtggcccagcggaaggagtccttggcggtcttgtaggtgagccctgggccggggtagtcaaggttggcccactcagaccctggagtctgctgccagctgcctttctggcccctcttccc

SEQ ID NO: 29117 - DNA, 798 bp, Artificial sequence
  DNA replication origin
tctgcccacctgtctggaacaagggccaggttaagatcacatgcctcatgtccaaagaggtctcagaccttgcacaatgccagaagttgggcagagagaggcagggaggccagtgagggccagggagtgagtgttagaagaagctggggcccttcgcctgcttttgattgggaagatgggcttcaattagatggcgaaggagaggacaccgccagtggtccaaaaaggctgctctcttccacctggcccagaccctgtggggcagcggagcttccctgtggcatgaaccccacagggtattaaattatgaatcagctgaacctgtgcatgctcatttcaaagggaaattcagatgatccaggatgaccctggagagaccagagggggcctgaggcttcactgcagcggcctccacccacctattccctttcctggtcaccttcatggtccaggacactctctggaagttctgggtctccccaagaagaggaagaccagactctgcctcagtgaggagctgttctcatggctggggcccaggcaggcagggtattaatagaagttgctctgaatgtctgggagacgacgcgtgtgtgttgcccccaccggcggagtgtcatcgcaccagggccaatggtagtcagagcctgtgcagtcccgctccctcacccagctcctcagacatcacccacaaggggttatcactatcccagtttacagcagaagaaatgaaggcagagagattgagtaacttgcataagatcatacagctgggagtcaaacccagtgagtctggct

SEQ ID NO: 29118 - DNA, 1159 bp, Artificial sequence
  DNA replication origin
cctcttccaccccacgcggatccctgccccgacgctgattcagggggtcaaagcctcgggcggggcggaccgcggcggtgactggaggcgccccagtttctctgggtgtggcctgcggaccccctcgggagcaggtcgtcccgcaccagtgtctgcccccggcccccagggacacctgcacccgccccactcacgacggcgcgtcaggtccccaaccaggcgtggggcggggtgggaaggtctcggctcggccgccccgcctgtgctgtccccaccgccccccggcctcgggcagcgcgcgcccgggtcacccacctcccgcgggcatgcgcagggcggcccctccgggcgctgcggccgtggccccggacaaggggcgggtcccgggtccgggaggaagaggcgcggctgctggctgacccgggaaccagaccgagccggagagcgggccctcccgtctcccaccgggcaggaaggcctggcgctcgcaggcgaccttgcgccagtgcccgggcagggatcagggggctcagcgccttcgcgggaggtagagagagctgggggcatctgtgtgatcaccccgcgtaggtccgcgctgagccaggacacaggacaactgcccgcgcccggttagacaggcgaagccatgggaagcagtgggagagggaaagactgggccggcgccgggcctcatgcctgtaaccccagcactttgggaggcccaggatggcggatcgcttgagcacgggagttcgagaccagcctgagcaacatggtgcaaccccgtccctacaaaaaacacaaaaaatagcggggcgtggtggtgcggacctgtggttgcagctacttgggtggctgaggcaggaggatcgcttgagcctgggagttcgaggctgcagtgaagcccgattgcacccctgcactccagcctgtacgacaaagcgagactctgtctcaaaaaagaaaaaaatagggccgggcgcggtggctcacgcctgtcatcccagcactttgggaggccgaggcgggtggatcacgaggtcgggagatcgataccatcctgggtaacacggtgaaaccccgtctctactaaaaatacaaaaaacaaattagccgggcgtggtggcgggcgtctgtagtcccagctactcgggaggct

SEQ ID NO: 29119 - DNA, 2001 bp, Artificial sequence
  DNA replication origin
ccccacctccctcccggacggggcggctggctgggcagaggggtcctcacttcccagtaggggcggccgggcagaggcgcccctcacctcccggacggggcggccggccgggcggggggctgacccccccacctccctcccggacggggcggctggccgggcagaggggctcctcacttcccagtaggggcggccgggcagaggcgcccctcacctcccggacggggcggctggccgggcggggggctgatccccccacctccctcccggacggggcggctggcccggcagggggctgaccccccctcccccctcccggactgggcggctggccgggcggggggctgacccccccacctccctcctggacggggcgactggccgggcagaggggctcctcacttcccagtaggggcggccgggtagaggagcccctcacctcccggacggggcggctggccgggcggggggctgaccccccccacctccctcccggacggggtggctgctgggcggagacgctcctcacttcccagacggggtggctgctggacggaggggctcctcacttctcagacggggcggttgccaggcagagggtttcctcacttctcagacggggcggccgggcagaggcgctcctcacatcccagacagggcggcggggcagaggtgctccccacctctcagacgatgggcggccgggcagagacgctcctcacttcctagatgggatggcggcggggaagaggcgctcctcgcttcctagatgggatggcggccgggcagagacgctcctcactttccagactgggcagccaggcagaggggctcctcacatcccagacgatgggcggccaggcagagatgctcctcacttcccagacggggtggcggccgggcagaggctgcaatctcggctctttgggaggccaaggcaggcggctgggaggtggttgtagcgagccgagatcacgccactgcactccagccttggcaccattgagcactgagtgaacgagactccgtctgcaatcccggcacctcgagaggccgaggctggcggatcactcgcggttaggagctggagaccagcccggccaacacagcaaaaccccgtctccaccaaaaaaaaacgaaaaccagtcaggcgtggcgacgcgcgcctgcaatcgcaggcactcggcaggctgaggcaggagaatcaggcagggaggttgcagtgagccaagatcgcagcagtacagtccagcttcggctcggcatcagagggagaccgtggaaggagaccgtggagagagggagggggagggggagggggagggggagggagagggagagggagagccatacagctattttggcattgcccacagctattgaggataagaaatgtgatgaagaaagtggtagctgccatcagtagaagcttatgaagacgctgtttttagttttaagggatcagttaatctacaacttttcatagagcattcattggtttagatcttaatattatcctgaaactggataatactttatattttgaattatccaattaatgcaacaaacacgtgagggtctatggcattggagtcattgttcacatttattcacccaaacttaactatcagtgctgcttttcctacccacccactcccccctgggcttactccctgaagagcaagaacgatttatttatttttatttaattttttgagacagtcttgctctggcgccaaggctgaagtgcagtgtcgcaatttcagctcactgcagcctctacctcctgggttcaagcgattctcctgcctcagccttccaagtacctaggactacaggcatacgtgaccatggccagctaatttttgtatttttagtagacacgggattttgccatgttggccaagctggtctcgaactcctgggcctcaggtgatccgtccacctcggcctcccaacgtgctgggattataggcgtgagccactgcgcccggccagcaa

SEQ ID NO: 29120 - DNA, 1154 bp, Artificial sequence
  DNA replication origin
tactgggaggtgaggagcccctctgcccggccagtcgccccgtccaggagggaggtgggggggtcagccccccgcccagccagccgccccgtccgggagggaggtggggggatcagccccccgcctggccagccgccccgtccgggaggtgaggggcgcctctgcccggccgcccctactgggaagtgaggagcccctctgcccggccagccgccccgtccgggagggaggcgggggggggggtcggccagccaccccgtccgggagggaggtggggggggtcagccccccgcccggccagccgccctatccaggaggtgaggggcgcctctgcccggccgcccctactgggaagtgagcccctctgcctggccagccgccccgtccgggagggtggtgggggggtcagccccccgcccggccagccgccccatccgggaggtgaggggcgcttctgcccggccgcccctactgggaagtgaggagcccctctgcccggccacgaccccgtctgggaggtgtgcccagcggctcattggggatgggccatgatgacaatggcggttttgtggaatagaaaggcgggaagggtggggaaaaaattgagaaatcggatggttgccgggtctgtgtggatagaagtagacatgggagacttttcattttgttctgtactaagaaaaattcttctgccttgggatcctgttgatctgtgaccttatccccaaccctgtgctctctgaaacatgtgctgtgtccactcagggttaaatggattaagggcggtgcaagatgtgctttgttaaacagatgcttgaaggcagcgtgctcgttaagagtcatcaccactccctaatcgcaagtacccagggacacaaacactgcggaaggccgcagggtcctctgcctaggaaaaccagagacctttgttcacttgtttatctgctgaccttccctccactattgtcctatgaccctgccaaatccccttctgcgagaaacacccaagaatgatcaattaaaaaaaaaaaaaaaatagctgtatgatcaacattaataaacaacaccagggcaacagccagacacaaacctaaatgaagaattaaattgtataaagatgtataaagatgtctattagttagtacataggaaac

SEQ ID NO: 29121 - DNA, 1696 bp, Artificial sequence
  DNA replication origin
accatcaggttcggcagccggcggcgccgcctggcagctcctcctcttctccgccccgctggccgcgggcgcgggggacgtcagcgctgccagcgtggaaagagctgcggggcgcgggaggaggaagtagagcccgggaccgccgggccaccaccggccgcctcagccatggacgcgtccctggagaaggtgcgtgccgggagggggcgatggggacggtgctgcggcccggggctcccgcttccgaggcaactatttcccagtcgcgagctgccattgtgacccggacagggggacgcgggctgacaggcctcgcctgaggaggcctcgccgggagggcggctggggcccgggcgcgtcacggggccgggtgtctcttgggtccccgtgggccgaagaggctgggcggggttccgtgggggccgcgaggggcccggagcccaggactgggaccgcggggccgaccttgggccctgccgaggttccgcgagtggccggcctgagctcggctggccctttcggaggaccgggagctctccgttggcggccccagatgctcccggaaagaagccgcagttatttcagagccagctgcaaacctgtgggtttttcttggtctccgagttaggaatgaaaattgctaaagcagtggttttccaacttcagcctgagtgggaatcacctggggcctttggtaaaatgcggagattcagtcccggggtcagaacctctgggggcgggaccgggaactgcgtgtttaacagccaccgcccccctcccactccgccccacgcaggtgattctgatgctgagcctgcgatcactgggcgagaacctctgagttccagaaaggggtgggtgttgcgtagattgcgaattgagtttcggggatcgcagctgctccacaacttcctggttcccccattccggtggcgaggagggatccccgagtcaactcgaaatccactggtaacagagcctacctctggtttccccttgggggaacagcagcgtggtgtacctggctgactgctctaccatgtgaaacggattctcattgtcccagtgttagggcttgtaaatggaaaccggtttgggtttcttcacggattcctgctttcggtacctgacattctgccctccctcaaagcccttctctctgttccagcttgggagtctgcttgtccaatccagtgcatacccggtttttcatgcatgtggcattcaggagcaatgctcgtgttttaagacggctacattttaattttgagctggtaggaataatatattttgtcttttttcaaggcagcagctgctgtagattttgttcacttgtcactggagagttgaaggcaataattgtaaaggttgggccagatgtcttcatgtgctcacagtggtatagcctgctcctgggttgcttagcataaattgggtggaagacaagaaaaagataatatggttttcttgtgccatctctggggtgaatgttacgtattttcctggctgggaataaagtcttcccggtcgtctgattagcagggtgtctaccttttggtactttgagtttgtccagatgagtggttcttaaagcagggggcaatttatttccccaggggacatttggctatctctggacatatttttgattgtcacaatgggggcagggaggtgctgccggtacctagtgggtaga

SEQ ID NO: 29122 - DNA, 1405 bp, Artificial sequence
  DNA replication origin
gcagctgaagcctgcagctccacgcagttgccaaacctgcaggccatggtgtggtggtcaggaggcaagagtgaagtcagggatccgggagaggcctaagccctccacccatcaggaccctgcatctcaggggctccagtgcccccacctgccgacggggctgccgggagccaggcccgtccccaagcccccagccctgctccacttctcagggaagccccttcctggggtaacagctctgcctaccccatggcagcactcagccacaccagcctgtggggatggtggggactggaatagacagcccacttgagaggtacacctgggaacccaacaaggcccagacttcctccaggcaagaggccaggggcacaggccggctgttggcaaggagggctggctgaaatcgctggagcccttggtggcctcgcagccggaccacctccaccctggccctgggcattgctgggctttgaagagcagggtggggccacgtgaccagagggttcttgctacaggatggctggtgggtctgcaggtgcagggttgtattgtgaatgagtgcaggtgggtgacagctaaggaatgctggcatcagtgtaactgatgcaggcagagggcatgcagacggaggggtgagtggatgagaattggagggatggagtcacaccaggggacactggggatggacagatggatggaggcttcctgggtccctctctcccccacgtgacgtgccttccggcttgcatctccctcaccccaccaccggcccacaccagctgtgcccacaactctctggcacctgggcaggcaccagggaaggatcagaccctcaaagggcccagccaggcagcgggatggggggctccaccaggcaggcccaagtgagaaggaggcccaggggagggaggcaccccacacttacccgtggttgtcaggctgcccaaaggcaaaactggtgaaggcctggtgctcccctgtggcccagcggaaggagtccttggcggtcttgtaggtgagccctgggccggggtagtcaaggttggcccactcagaccctggagtctgctgccagctgcctttctggcccctcttcccagcgctggcagcccccatgtgctccctacctgggcccttcccgggaaagggggtgagcagctggccccgctctgggctccaggccctcaacacacccttgccatctgctggcagccgccatggcccagggttcctgcagcagggtggggcatcacaaccccttactcgccatacccccaatcagctgggcactcaccgatccagaagttcctggtctcgaagtcactgtcaatcacctcgttggtggtctccaggcggcccagatagaaggcgaggatgtcctgcactttctggctcttgatct

SEQ ID NO: 29123 - DNA, 831 bp, Artificial sequence
  DNA replication origin
tggaacaagggccaggttaagaccacatgcctcatgtccaaagaggtctcagaccttgcacaatgccagaagttgggcagagagaggcagggaggccagtgagggccagggagtgagtgttagaagaagctggggcccttcgcctgcttttgattgggaagatgggcttcaattagatggcaaaggagaggacaccgccagtggtccaaaaaggctgctctcttccacctggcccagaccctgtggggcagcggagcttccctgtggcatgaaccccacagggtattaaattatgaatcagctgaacctgtgcatgctcatttcaaagggaaattcagatgatccaggatgaccctggagagaccagagggggcctgaggcttcactgcagcggcctccacccacctattccctttcctggtcaccttcatggtccaggacactctctggaagttctgggtctccccaagaagaggaagaccagactctgcctcagtgaggggcagttctcatggctggggcccaggcaggcagggtattaatagaagttgctctgaatgtctgggagacgacgcgtgtgtgttgcccccaccggcggagtgtcatcgcaccagggccaatggtagtcagagcctgtgcagtcccgctccctcacccagctcctcagacatcacccacaaggggttatcactgtcccagtttacagcggaagaaatgaaggcagagagattgagtaacttgcataagatcatacagctgggagtcaaacccagtgagtctggctgtcatttatttattttttttcttttcttttctttttttttttttttt

SEQ ID NO: 29124 - DNA, 1189 bp, Artificial sequence
  DNA replication origin
gcggatccctgccccgacgctgattcagggggtcaaagcctccggcggggcggaccgcggcggtgactggaggcgccccagtttctctgggtgtggcctgcggaccccctcgggagcaggtcgtcccgcaccagtgtctgcccccggcccccagggacacctgcacccgccccactcacgacggcgcgtcaggtccccaaccaggcgtggggcggggtgggaaggtctcggttcggccgccccgcctgtgctgtccccaccgccccccggcctcgggcagcgcgctcccgggtcacccacctcccgcgggcatgcgcagggcggcccctccgggcgctgcggccgcggccccggccaaggggcgggtcccgggtctgggaggaagaggcgcggctgctggctgacccgggaaccagaccgagccggagagcgggccctcccgtctcccaccgggcaggaaggcctggcgctcgcaggcgaccttgcgccagtgcccgggcagggatcagggggctcagcgccttcgcgggaggtagagagagctgggggcatctgtgtgaccaccccgcgtaggtccgcgctgagccaggacacaggacaactgcccgcgcccggttagacaggcgaagccctgggaagcagtgggagagggaaagactgggccggcgccgggccgcatgcctgtaaccccagcactttgggaggcccaggatggcggatcgcttgagcacgggagttcgagaccagcctgagcaacatggtgcaaccccgtccctacaaaaaacacaaaaaatagcggggcgtggtggtgcggacctgtggttccagctacttgggtggctgaggcaggaggatcgcttgagcctgggagttcgaggctgcagtgaaccccaattgcacccctgcactccagcctgtacgacaaagcgagactctgtctcaaaaaagaaaaaaatagggccgggagcggtggctcacgcctgtcatcccagcactttgggaggccgaggcgggtggatcacgaggtcgggagatcgataccatcctgggtaacacggtgaaaccccgtctctactaaaaatacaaaaaacaaattagccgggcgtggtggcgggcgtctgtagtcccagctactcgggaggctgaggcaggacaatggcgtgaacctgggaggcggagtttgcagtga

SEQ ID NO: 29125 - DNA, 1311 bp, Artificial sequence
  DNA replication origin
gggggctgacccccccacctccctcccagactgggcagctggccgggcaaaggggctcctcacttcccagtaggggcagccgggcagaggcgcccctcacctcccagacggggcagctggccgggcggagggctgacccccccacctccctcccggacggggcggctggccgggcagaggggctcctcacttcccagtaggggcagccgggcagaggcgcccctcacctcccagacggggcagctggccgggtggagggctgacccccccacctccctcccggacggggcggctggccaggctgaggggctcctcacttcccagtaggggtggccgggcagaggtgcccctcacctcccggacggggcggctggccgggcggggggctgacccccgacctccctcccggatggggcagctggccaggcaggggctgaccacccccacctccctcccggacggggtggctgccgggcagagacgctcctcacttcccagatggggtggctgccgggcggagaggctcctcacttctcagacggggcagctgccgggcggagggcctcctcacttctcagacggggtggttgccaggcagagggtctcctcacttctcagacggggcggctgggcagagacgctcctcacctcccagacggggtctcggccgggcagaggcactcctcacatcccagatggggcggcggggcagaggcgctccccacatctcagacgatgggcagccgggcagagacgctcctcacttcctagatgtgatggcggctgggaagaggcgctcctcacttcctagatgggatggctgccgggcgcagacgctcctcactttccagactgggcagccaggcagagaggctcctcacatcccagacgatgggcggccaggcagagacgctcctcacttcccagacggggtggcggccgggcagaggctgcaatctcggcaccgtgggaggccaaggcaggcggctgggaggtgtaggttgtagcgagccgcgatcacgccactgcactccagtctgggcaccattgagcactgagtgaacgagactccgtctgcaatcctggcacctcgggaggccaaggctggcggatcactcgcggttaggggctggagaccggcccggccaacacagcgaaaccccgtctccaccaagaccagtcaggtgtggcggcgcgtgcctgcaatcgcaggcactcggcaggctgaggcaggagaatcaggcacggaggttgcagtgagccgagatggcagcagtacagtccagcttcggctccgcatgagagggagac

SEQ ID NO: 29126 - DNA, 962 bp, Artificial sequence
  DNA replication origin
ggggtcagccctccacccggccagctgccccgtctgggaggtgaggggcgcctctgcccggctgcccctactgggaagtgaggagcccctctgcccggccagccgccccgtccgggagggaggtgggggggtcagccctccgcccggccagctgccccgtctgggaggtgaggggcgcctctgcccggctgcccctactgggaagtgaggagcccctttgcccggccagctgcccagtctgggagggaggtgggggggtcagccccctgcccggccagctgccccgtctgggaggtgaggggtgcctctgcccggccgcccctattgggaagtgaggagcccctctgcccggccagccgccccgtccaggagggaggtggggggggtcagccccccccgcccggccagccgccccgtccgggaggtgaggggtgcctctgcccggccgcccctactgggaagtgaggagcccccctgcctggccaccaccccgtctgggaggtgtgcccaacagctcattgagaacgggccaggatgacaatggcggctttgtggaatagaaaggcgggaaaggtggggaaaagattgagaaatcggatggttgccgtgtctgtgtagaaagaagtagacatgggagacttttcattttgttctgcactaagaaaaattcttctgccttgggatcctgttgatctgtgaccttacccccaaccctgtgctctctgaaacatgtgctgtgtccactcagggttaaatggattaagggcggtgcaagatgtgctttgttaaacagatgcttgaaggcagcatgctcgttaagagtcatcaccaatccctaatctcaagtaatcagggacacaaacactgcggaaggccgcagggtcctctgcctaggaaaaccagagacctttgttcacttgtttatctgctgaccttccctccactattgtcccatgaccctg

SEQ ID NO: 29127 - DNA, 908 bp, Artificial sequence
  DNA replication origin
ggcgtgatctcggctacaacctccacttcccagccgcctgtcttggccccccaaagtgccgagattgcagcctctgcccggccgctaccccgtctgggaagtgaggagcgtctctgcctggccgcccatcgtctgggatgtgaggagcccctctgcctggctgcccagtctggaaagtgaggagtgtctctgcccggccgccatcccatctaggaagtgaggagcgtctctgcccggccgcccatcgtctgagatgggagcgcctctgccccgccgccccgtctgggaggtgaggagcccctctgcctggccagccgccctgtctgggagggaggtaggggggtcagccccccgcccggccagccgccccgtccaggaggtgaggggcgcctctgcccggccgcccctactgggaagtgaggagcccctctgcccggccaccaccccgtctgggaggtgtacccaacagctcattgagaacgggccatgatgacaatggcggttttgtggaatagaaaagggggaaaggtggggaaaagattgagaaatcggatggttgccgtgtctgtgtagaaagaagtagacatgggagacttttcattttgttctgtactaagaaaaattcttctgccttgggatcctgttgatctatgaccttatccccaaccctgtgctctctgaaacatgtgctgtgtccactcagggttaaatggattaagggcggtgcaagatgtgctttgttaaacagatgcttgaaggcagcatgctcgttaagagtcatcaccattccctaatctcaagtacccagggacacacacactctgcctaggaaaaccagagacctttgttcacttgtttatctgctgaccttccctccactattgtcctatgaccctgccaaatccccc

SEQ ID NO: 29128 - DNA, 1051 bp, Artificial sequence
  DNA replication origin
tcaagcatctgtttaacaaagcacatcttgcaccgcccttaatccatttaaccctgagtggacacagcacatgtttcagagagcacagggttggggataaggtcatagatcaacaggatcccaaggcagaagaatttttcttagtacagaacaaaatgaaaagtctcccatgtctacttctttctacacagacacggcaaccatccgatttctcaatcttttccccacctttcccccttttctattccacaaaaccgccattgtcatcatggcccgttctcaatgagctgttgggtacacctcccagacggggtggtggccgggcagaggggctcctcacttcccagtaggggcggccgggcagaggcgcccctcacctcctggacggggcggctggccgggcggggggctgacccccctacctccctcccagacagggcggctggccaggcagaggggctcctcacctcccagacggggcggcggggcagaggcgctcccatctcagacgatgggcggccgggcagagacgctcctcacttcctagatgggatggcggccgggcagagacactcctcactttccagactgggcagccaggcagaggggctcctcacatcccagacgatgggcggccaggcagagacgctcctcacttcccagacggggtagcggccgggcagaggctgcaatctcggcactttggggggccaagacaggcggctgggaagtggaggttgtagccgagatcacgccactgcactccagcctgggcaccattgagcactgagttaacaagactccgtctgcaatcccggcacctcgggaggccgaggctggcggatcactcacggttaggagctggagaccagcccggccaacacagcgaaaccccgtctccaccaaaaaagtacgaaaacccatcaggtgtggcggcgcacgcctgcaatcgcaggcactcggcaggctgaggcaggagaatcaggcagggaggttgcagtgagccgagatggcagcagcacagtccagcttcggcttggcatgagaggga

SEQ ID NO: 29129 - DNA, 864 bp, Artificial sequence
  DNA replication origin
ggcgccgcgctcccccgggcggctgcgaggagcgtgagctggcgctggcgctgcaggaggcgctggagccggctgtgcgcctgggccgctacccgcgcgcgcagctcgaggtgtcggcgctgctgctggaggacggtggctcggccctggccgccgcgctcaccgccgccgcgctcgccctggccgacgcgggcgtggagatgtacgacctggtggtgggctgcggcctcagcctcgcgccggggcccgcgcccacctggctcctggaccccacgcggctcgaggaagagcgcgccgccgccggcctcaccgtggcgctcatgcctgtgctgaatcaggtggccgggctgctgggcagcggcgagggcggcctgacagagagctgggcggaggccgtacgcctgggcctcgagggctgccagcgcctctaccccgtgctgcagcagagcctggtgcgggccgcccgccgcaggggcgccgccgcccagccctgaaccagaagcctgagcaactacggacgcaagccgaggaccgtgctgccgccgtccacgaaaagacccgcgccatcggcctccagtttgcgtcgagaattcctggaagggccctgatatgactgtggttggactgacctgactgccagatggtgggacttggtctggagcagggactacttggaatgataaaggcaaaactcaacagcccctggagctgcgcttgtggtggagctggaccctgaaattacctggaccttttttttagagacagggtttctttctgcagtctcaaactcctagccttgattgatcctcctgccttggcctcccaaagtgctgggactacaggtgcatgcaaccacacctggct

SEQ ID NO: 29130 - DNA, 2093 bp, Artificial sequence
  DNA replication origin
cagcccaccaccaggtcgtacatctccacgcccgcgtcggccagggcgagcgcggcggcggtgagcgcggcggccagggccgagccaccgtcctccagcagcagcgccgacacctcgagctgcgcgcgcgggtagcggcccaggcgcacagccggctccagcgcctcctgcagcgccagcgccagctcacgctcctcgcagccgcccgggggagcgcggcgccggcggcccgcgaagggtgcgcggcggaagtcgcagagcaggcgaccgcgcagcgcggccggggcctcgccgcctgctccggccgggccgccgccgcgctcgccgccctcggcctgtcgcgggcccgacacggcacacagcaccttggtgcctcccgcctccaggtaggccgagcccttggcctggctcagcagcccggcgcgcgcgtacacgggccgtagccgcgttgggtcgcgggtgccgggcgcctcctcctcgtcggccgcgtacagctgcggcggctgcgattcttcagggccgcggatgcggcggtgatccccaggcatggcggttcttggcgtgcgaaccccttccgcccaacgccctgccgcatccactggttcttccgttgtttaaagacgcgcggctgcgcatgggctgtcgagagagcggcgggaggcactacagcgcccctggaggcccggagggagaacggcccggtcccagttgtgcagggtagccggatccatccatcttgctggaagggaggggggagagcagctccaagaaaggcttctctgcttccaactacctccacccctcatctactgaattatgaacgccttgctccaagtcaccccacctatttggcctccacctccacagacgtttgaggcagccctaggggctgttcccaaaattttgggttctggggctggactaggtgaacaccacagcagccagcaggagccacagcatttattctacagacgccaaaggctgtcaaaagagccagcccctattgggaagagggatagagatcatgcggcattaagtattgcacgtggtccttttattctctgcagcaaaaacgattcctacttgctgacgcggaaagctcaggtctggagagccgttatctatagatgcgagcgtgacgatcaacagcaatgcggggttagtggttctagaccgatggcactgacgtggagggctcagggcagaaatttaaggggcactgagacataggactgctcccaagtgtgttccagttactgctgggttaggaggggctctttaaaggtcccaagattcaaatgttcttgtagcagatgaagagctcttggctggacggatggatccagtgggagcctcctccttccccactcagttctttacatccccgaggcgcagctgggcgaaggaagtggccagctgcagcgcctcctgcaggcagccaacgttcttgcctgtggcctgtgcagacacatccttgccaccacctttaccgtccatcaagcctgacacctgctgcacccactcgctggcttttaagccccgattggctgcattctagaagacaggaagggaagggggagtcagcacagaagatgggattgagggaggaatgcagggaaagaaaggatggaggagccatcacccactccttgccctgggtgatactgctggaggccgagacagactttacggctggtacagggggcggccatggccactgccaggacaggacagagtggcaaagccaggtatcaaccagatgtcttcaccaataagaaggcctgggtaaggggtactggcaaaggtaaccaaccggtgggcagaaaggctgtttcgaatgcaggctgtacacacacaggcctcagccaacaaccttaagacctaacacttcccactggtgcgaggtggtgctgacctggggaacttgacacaggcacgtgatcttgccagcctcattgtccaccgtgaagagcatggcagaagtctgaggggagtgcatcttgaagagcttcaaggcttcattcagggcctgtggggaggacctggctcaggccacggtgctggagcagggaccctcactagtgtgagcattt

SEQ ID NO: 29131 - DNA, 1696 bp, Artificial sequence
  DNA replication origin
tcgagaagagtggtccttaccctgaggcttggccggagtagaaatgctcccctgaggccatagccagtggctctcagaagcttggctttatctgggatttgcactccaaaagttcccaggagccatcagcgtgccacagcacatcacaacaatgcgctcccaggcagggtcactcccacaggcccctgccagacttgcaagcaagggtgcagaggcagacataaacacccacacagacagttggccccctggcctcccttcctccattctcaagttacaaggttaaaagcatccaattcacagccaagggggagggctgggaagggggttgctgaagcagtgaaccatctggttcagatcaagattgctccttcaggaacccacataactcctagagcctcctgtccctcctttcctccacccaacccactgggaaactggggattggggtagaatggatgactatccccctctgccccccccgcaaaaaaaaaaaaatctgaagaggacaaaacaaaaaacctgaataatacaggcaaatctgtgccacctctctgagccctcgttccctctaaatcctgagtcccacgactaaacttgagatcaccgcccacatactctgtgccttcctccacagagagatcagggcagccagcaggcatccctccctgaaagggcaacccctccaaagttagcagcagaagcaagatgaagcttaggggtgtggtctcccagactcctcttatgccaccatctctctaaaaaccagcgataccttccacctgagaagggcttcagagcccaccaggcaaggaaggggtggccaaccagcttccaaacatccgtcccaaagacgaggcgggagtgtgttactggccagaggtcccagagtgccctgtactcccccggaggctttgactgaaaagaggccccaggtccctgcctgcccccagcacctctctagcccctttctccaacaccacctttgactcaatcctccgctcctttacgcagctgtaaagcaagagggaagatgggagacgggagatggatgcagttggcaaaagataaatcgaaaggctaacttgagcaagcaagcaattggtgctgactcctctacaggcagagggaacccggagtgggttatgcgaaggagggaaggccaacaggagcggcaggaagctaaggggagactcaagtgagctcagcccagagctgtagcagggggtgggaagtttggtccagtcacaggggaatgactgggggtaagaaatgacttccattccaaggcagagaaggaacaggagagaggagagacgaggttcagaccagcctccacgggactggcgctttggccaagtttctggcttcagccgtgcctcagtttccccaaagtaggaaggtcgagccgtgagaactgggccactgaggatggttagggggcagtgccaggtaggggaaagatcacaggggagagaggaaagaggagctgatggggcagacaggctctggccaagagtggggccggggtctcccaggtggagcagaggccgggagacccagggttagcggtacgaactagggagtggactggaagtcgggaccagggcagagagctcttccgagggctggggctggggctggggttggggttgggggctgccggcaaaggagcggagcgggagccctgggaggc

SEQ ID NO: 29132 - DNA, 1495 bp, Artificial sequence
  DNA replication origin
tggaacgggccggtctgggccgctgggccgcgccagctgcccgcgcaggggaggtctgggcagccgggggcccggggcgctctgcatcccgcccgccctcatcccacccgcgcacctcagtcagcgcccggcgccgcgcgggccatgctcgccgctccggccgccgccgccgcccgcgcagaaagccgtcgccgccgccgccgccgccgccgccgtcgtccggacccgttagctcgcagctctctcgtccgcccgccgtgggctagtcccgcccttgcctggcccaaccctccccgagcgccgccgccgccgccgcctcagcccggcccctccccccacccctgcccggcttgaagggaagggtgggggacaggggcgactgcccccaccccattcacatcctccccgtctctccctccctccgccccccgcacgcgcgccggcatgctgggatatggagtccagcgggcgctgggtcgctaggggcgccccgcatccaggactacatctcccagaagacagcgcgcgcatcccagggattgtgggctttgtagtttcgctagggctcagggggtccgccgtgcaggaggggagacggagggggatgggaagtcttcattctcagaaggccgggctccagcggctggagcagacggccccgagccgggttggatacgtgggttcctagggaggtgcacactagccgaggacgcctctcagatgctgctgtggccagctgctgacgagcccggccggagggcactgttcccactcgcgctctcaaagagccgcgacctgaggccagcttggcttcacgcccgggctctgaaagcccgagctgcggtggggccgctgcgccctggcctgaggggagagagaccccatcagcggtgcgagcgggggtttggcctcgctggactttgtgttccccacctaggaaaagaggaaaagggggcagagtgtctattggttcctcatccaccggggcatctcccccttgcaggctctctcttagatgcccgtagcttcctgctgttgagggtaaagtgaatgcattttaaatatttgccatgtcttttattagcccatcctttccctaacttccgcacctatttcaaaacctttatgaaactccaggtagactgcagtttcgccctccaacaggctgaagtgaggctgaagtggttctgaatttttggtgtgtatgggatcctcttggccagcttgtttaaacgcagattgctgcccccaccctcagcttctggttcttttagctctagggcaggccccagaattggcattgctaccccgtctccaggtgttgctcatgctgccggttactaccttgataacctgataacctctgctgttggtgtttgctgctaacacaccggtatcctctttcaaggatggcccttgtgtgggataattaataatggccctgaagagccaaacccggaaaggcagggtcccagtctagtcccctttagcacag

SEQ ID NO: 29133 - DNA, 1613 bp, Artificial sequence
  DNA replication origin
ctagagctcagctgccaggcctcaacctctgaccaaaccccactgacaaggatgaacatgcctcaacctcagaccaaaccccattgacaaggatgaggccttccagaatcctaaaagtaaactccagcatgccccttccctgcttgagcacctcatggtcccctagtcccctcaggggatggcccagaggacagggagggcaggtgcccctggcctgattctgcagcactaccagcctgcacactcaccctggtccagcgtggccagcaggggcccggggcagccctcgcggacagcagcccagatcagcgggcgcaggctgaggtcctgccgggcctccagcacgtgccgcgccttatgcagggcctggcggaagaacaggtcccggcgagaggccagcgtggcagcccgatccaggcacggctgcagctgctcccaggacaggcgccaggaggcccgccaggctcgcagggcctcgcccccatcctcctggtggtccagcatccacagcaggtcctggggtcccagctccctcgaggggtggagcacaggaaagaggcgggcgctgggaaggcagtactctgcgggcagcgtctcagggtcccacaggtcccaggctctgatgtggggagaaggcacattcccaggagggaagcaaaagctccagtctcttccccaagccctgagccgcctgtcagttcatggggacaggacagactcctccgaggtagcataagtgggcaattcaggtcgggggccaggctgcctggcatcctttcccagaccattgaacaagaaagccaaagtcagcacagccagagactgggagctgcccgggggaaagtactggagagaatccggctgcccaaaaccacccaggcccctggatggtaacacggcccgtgctgctctggggcaggggagggacacacctcaaagagcagcagccaccccagctgcccaggcccacagaggccctaggggtgtccaccttaccgaacacctgtcctcttgaagaattcactccagggcacgttgagatatgtgcctgccccctgtctctgggggagaggaagaagcagtcagggctgcaggggccacaggaaagggttagagacactcggccagggggccaggagctgctcaagtgctcacatgagggcaggaagacagacaaagaacatacttgacccacccaggctggagtgcagtggtgtggtcagctcactgcaggtatgaactcctggcctcccacctcggcctcccagagtgttgagattacaggcatgagccactacacccagccatggagcaatttctgaaattgttttcagccctgcagccccaacactcccgccaaggtgcctgaaatctggagcagaaccctgggttccaggcccagcccaccacaacaggctgcagcccaaggcgggttacctccctctctgaatcccagtctctagcctgtcaaataaggataaaaacccccacccagccgtgcgcggtggctcacacctataatcccagcactttgggaggccgaggcaggcagatcagttgaggtcgggagattgagaccatcctggctaacgcggtgaaacctcatctctact

SEQ ID NO: 29134 - DNA, 1929 bp, Artificial sequence
  DNA replication origin
tgaactgacaggcggctcagggcttggggaagagactggagcttttgcttccctcctgggaatgtgccttctccccacatcagagcctgggacctgtgggaccctgagacgctgcccgcagagtactgccttcccagcgcccgcctctttcctgtgctccacccctcgagggagctgggaccccaggacctgctgtggatgctggaccaccaggaggatgggggcgaggccctgcgagcctggcgggcctcctggcgcctgtcctgggagcagctgcagccgtgcctggatcgggctgccacgctggcctctcgccgggacctgttcttccgccaggccctgcataaggcgcggcacgtgctggaggcccggcaggacctcagcctgcgcccgctgatctgggctgctgtccgcgagggctgccccgggcccctgctggccacgctggaccagggtgagtgtgcaggctggtagtgctgcagaatcaggccaggggcacctgccctccctgtcctctgggccatcccctgaggggactaggggaccatgaggtgctcaagcagggaaggggcatgctggagtttacttttaggattctggaaggcctcatccttgtcaatggggtttggtctgaggttgaggcatgttcatccttgtcagtggggtttggtcagaggttgaggcctggcagctgagctctaggtcctaggcacatcggcaaaccctgcgtgttctgtactgggtgccaggatgtgggtgcagagcgtggcgaggggacagagcccccaggggacatggtcatctctgcatgaggtcccaagcacacttccgggggctcacagccttagcctcctaggctgaacctcatggaaggtcccagggaccgtggacatgaatggtattgaagccactcacccagagccacacggctagctggtggtgaggctgagacctgagcccaggtggtttgagcccagagcctgagctcttcaccactatgggtgtcctgggtgggggtgaagagacacctatgggctgggactggcaagacgagatgatctctgccaggcagagagcaggagtgcagttacagtcaaagatacattgtgggcaaaagccaggaggtgtgaggggtctggcgcatttagggactgttgagtagcctctcgtgaaagaggattttgaagacaggcctcctcccctgccacccccaactccttgtccctcagttgcagctggggcaggagaccctggtgtggcggcacgggcactggcctgtgtggcggacgtcctgggctgcatggcagagggccgtgggggcttgcggagcgggccagctgccaaccctgagtggatgcggcccttctcatacctggagtgtggagacctggcagcgggcgtggaggcgcttgcccaggagagggacaagtggctaagcaggtgtgtactaatggaggtcagatcccttggataagccccttgctgtctgggaagtggaccctgatggaggaaacccagagagaggtggggctcccttgggtaccccgggacagtcaggtccccaaagccaggcaatctgcccccagcttggggctgcatgccaccatccctcccccttctcttggcaggccagccttgctggtgcgagcggcccgccactatgagggggctggtcagatcctgatccgccaggctgtgatgtcagcccagcactttgtctccacagagcaggtggaactgccgggacctgggcagtgggtggtggctgagtgcccggcccgtgtggatttctctggtgagccccttgtggcaggtggggttgagggtagctgccccagagccaggctggcagcttctgtgaccagcttgagtcttgccacactgccatagggggctggagtgacacgccaccccttgcctatgagcttg

SEQ ID NO: 29135 - DNA, 1212 bp, Artificial sequence
  DNA replication origin
agagaggtggggctcccttgggtaccccgggacagtcaggtccccaaagccaggcaatctgcccccagcttggggctgcatgccaccatccctcccccttctcttggcaggccagccttgctggtgcgagcggcccgccactatgagggggctggtcagatcctgatccgccaggctgtgatgtcagcccagcactttgtctccacagagcaggtggaactgccgggacctgggcagtgggtggtggctgagtgcccggcccgtgtggatttctctggtgagccccttgtggcaggtggggttgagggtagctgccccagagccaggctggcagcttctgtgaccagcttgagtcttgccacactgccatagggggctggagtgacacgccaccccttgcctatgagcttggcggggctgtgctgggcctggctgtgcgagtggacggccgccggcccatcggagccagggcacgccgcatcccggagcctgagctgtggctggcggtggggcctcggcaggatgagatgactgtgaagatagtgtgccggtgcctggctgacctgcgggactactgccagcctcatgccccaggtcaggcaccctgggacctctgcaggtggggctggccagctgggggctcggggcagaagctagagactgcaggccagtggggtctggcctgagggccagccagtctggctgaggagcctgaagggaaggaaggggctgggagtcaacctgcaaagatgacacgtgtccctgtctgggagcccagaggcccttttgtggcttggggatggggccagtactgctgctgggcttttgtcccaccggatgagtcccgcactgggctgggaagtccagggtgggtgggtgcctgcgtctgcccatcgagactgaattcctttctcatgcctgtccttctgcaggggccctgctgaaggcggccttcatctgtgcagggatcgtgcatgtccactcggaactccagctgagtgagcagctgctccgcaccttcgggggcggctttgagctgcacacctggtctgagctgccccacggctctggcctgggtgagcgggccctgcctcctgctacccaccgactgttacagccctccagccttgcctgtgatcccccttcctggcctctgcccttagacggagtcaggcaggcctgggcagggtggaggtgtttcatgtctgctct

SEQ ID NO: 29136 - DNA, 960 bp, Artificial sequence
  DNA replication origin
tgggctgagatcgcaccactgcactccaatctgggtgacagagctagactccatctcaaaaataaaaaaaaattaaaaataacaaaacttgagttgcttctgggacaggcccttgatagttagggaagggcctgcaagggtttaaagtatgaaatgcaaaagacagaagccatctggaactttgcagccaaaacctggtagttgcaaagtggctaagtcttgaaatgtcaagacttaactgtgcccctctgcttcaaagcacttggcacagtttgtaatacacatgcacctgagtagttattgattaatgtctgtctccaggagaccacaggacttttgagggcagggaccccatttttgctcattttatccctggggccccacagagtgggttctcaacaaatagttttccgttggccaaatgtagaacttgaatggtacacctcaaaagaaaactgaaaatgcttccccatctgctccttttgctaatgactaccgattatgggatatgagtcactacagtgaaatgtgaggcttgagctgcagagtgacagaaaacaccacagtcaggcttcagtaggcctttgcagcagtttctttccaggggtgtgctggagacgggacctgacaccctgaggtggacctgaaaccagacaagctgtagctgctctacactggccatgggttccagggggctcggtggccaggaggagtgagaagcctggcgctggtgacattcattagatcatagtcattgttgggctcttgctgtcccaccatatggccagggggtgggggcgggggcacaggtgatcatatctcaagtaagggcacgatgccaggacaggcggaaggtccaaagcagctctgcccagccctaccccagcacagccctggaaaggcacagtcacgaagcacagcacctggttccaacaagcatgagaggcacagcacaggccg

SEQ ID NO: 29137 - DNA, 1194 bp, Artificial sequence
  DNA replication origin
gttttgtatcttgattattatagtaattacacagctctataaatgtgctaaaaacttttagaaatgtatactgaaaagggtaaaatgtagtatatgtaaattagccctcaataaacctgaaaaaaatccccaaactaatgacaactaaatgttctagatacgttagtgtttgtagtgatgctgtaacagcaggggaattgccagggtgaggaggaggaggagggggaggaggagggggagggggaagaggaagaggaggagggaggagggaggaaaaggaggagggaggagggaggaaaaggaggagggaggaggaatgaaaaggaggaagggaggaggaaggaggaagaggaaggagggaagaggaggaagaggaggaagtaggaagaggaaggaggtggaagaggaaggaggaagaggagggaggagaaggaggaggaaggaggaagaggaggaaggaggaagaggaggaggaaggaggaagagaaagggagtaggaggaaggaggaagaagaggaagaggaggaaggaggagaaggaaaaaggaaggaggacgaggaaggaggaagagaaggaaggagaaaggaagagggaagagtaggaaggaggagggggaaagaggaggaagaagagggaggaaggaggaagacgaggaaggaggaggaggaagagaaggaggaagaggaaggaggaaaaggaggaaggacaaggaaaagaggagcagcagcaggcagcgactggggctgagattcagggtgactgcataagggattaacttgaacaacccgtgttctctctataaggccctgcctgcctgctgggcacctcttagggtaagggccagcattctttggtgacaccatggatcacacaatgaagaagatgcccaagtcatacctgctctcccccgatggtgtcactctgtagccattttcccccaccagaggggagacagggaggaggcgaggggatggaagagaactaaatcagagacggaattccagcctgatctgcagagcagacacaatggtccagaccttgcagagtccagaggggcagatgggaggaccacgcacacacgctgagccctgtgtggttgtcgaattttgggagcagccaccagcccacagggtttgaattcctgtcacacttcttacaagccgtatgaccttggacaagtgtcttaacctttct

SEQ ID NO: 29138 - DNA, 1010 bp, Artificial sequence
  DNA replication origin
agagccaagcaaagtgtgcctccctccccatagcaggcagccctggaggatttgagagcccggcgggggtggaatcgtgattgggagttcctctgctcttgaagatcagtctggtggtgtttgtaggagttactgctgtcaccgtctgtgcaggagggaatgagggtcattctggaggtggaggtgcgaatgaaaggcaagggatgctgggctggtggctcacgcccgtgatcccagcactgtgggaggccaaggcaggaggacggcttgaggccaggagtttgaaaccaggctgggcagcatagcgagactccatctctaaaaaaaggaaaattagccaggtgtggtggcatacatctgtaatcccagctactcaggaggctgaggtgggaggatcacttgagcccaggaggttgaggctgcagtagcaaggatcgcatcactgcactgcagcctgggcaacagggtgagaccctgtctttaaaaaaaaaaaaaaaaaaaaaaaggagaaaagaaaaagagagaaagaaaagcaagggagaggggaaaaagctccaggaggggtgggtcttaggaccaggcaaagactggctgggggatgagggagagggagagcagcagattgaggtgggggctggtgcccaggggctggggtgctgaggaagttgggctgccataaccaattagaaagcttcgggtggcttagagcaacaggaatgtgtcgtctcacagttctggagaccggaagtgtgagatcagggtgcctgcagggctgcgttccctctaaaggtgccgagaaggagcctcccttgcctcttccagctcctggtggctcctggcttccttggcttgtggcctagtcactcagatctccctttgtctttgcgtggcctttccctttgtgtgtctctatgtcctctcctcttcttcctaggacactagtcactggatttagggaactgcctaaatccaggatggcctaatcttgacatccttcatttaataatgcc

SEQ ID NO: 29139 - DNA, 1045 bp, Artificial sequence
  DNA replication origin
tgttttatgctcttcggtccctcctcttcctcctctggggccctgcctcttccctacccataagcaccagagccagggccgctgcccatgacagaggggccaggctggcctccctttcaccatcccggcctctcccagggctggtcctgcctcagctcctcctggaatgctggcccccctctcccctgcctgagccccctcctcccctcttgccttctctctgcctctcccaggcccctctccctccaggaggcggggcggctgtggaggggccaggtgcacgctgggctggatgtctgctgggggctgggggccagggcggcaggttggagttgggcggccaggccccccgtgtgggaagggagttccagggcccacgccaagtctcagggaggaaaccaggggctgcttgggggggggggtcttgggggccctgtggtggctcccacccctcgcctcccccaccccgtgaggctggctggagggggccagagcagctctttggaaactagggcagcagggttaggaggccggaggccctggggtcaccggccagccacacaggcaccgttttcagatgtccacttctcattgggtacatcaatcttttaactttgggggtcacagttttagccacctttcggggggtgactggagcagtaggaggtgtggggtcattttatgaatataataaaatggagctgactgtggacgaggactaagtgtgggggagaggggacgatacagggtgtgtgtctgggagtgcctgggggacagggaccccccggtggtcctatggcaggatgagaagggagggacttggctcccccagagcccggtggaagctactgttctctccagtgtctcgagcgtagccaaaataaggttgggaggctcccggcctgtctgctgtggtctgagctggctgcaagcccaggtgggggagcgagtctgggaagattggctttgactctctgttgccggaggagatgccatcccagcacggcccccactgtagtccaggctcgtggtggcagcgggggca

SEQ ID NO: 29140 - DNA, 992 bp, Artificial sequence
  DNA replication origin
cacacttagtcctcgtccacagtcagctccattttattatattcataaaatgaccccacacctcctactgctccagtcaccccccgaaaggtggctaaaactgtgacccccaaagttaaaagattgatgtacccaatgagaagtggacatctgaaaacggtgcctgtgtggctggccggtgaccccagggcctccggcctcctaaccctgctgccctagtttccaaagagctgctctggccccctccagccagcctcacggggtgggggaggcgaggggtgggagccaccacagggcccccaagacccccccccccaagcagcccctggtttcctccctgagacttggcgtgggccctggaactcccttcccacacggggggcctggccgcccaactccaacctgccgccctggcccccagcccccagcagacatccagcccagcgtgcacctggcccctccacagccgccccgcctcctggagggagaggggcctgggagaggcagagagaaggcaagaggggaggagggggctcaggcaggggagaggggggccagcattccaggaggagctgaggcaggaccagccctgggagaggccgggatggtgaaagggaggccagcctggcccctctgtcatgggcagcggccctggctctggtgcttatgggtagggaagaggcagggccccagaggaggaagaggagggaccgaagagcataaaacagaccccgaaccaggcccaggcctgcaggctccgtcctggccaggcttgctaagaagtcacttcctgtttaaatgctggaatccaagtgaggtgtctttccataaagtggcatggcctctgccctggctctgtcctctctcctggctgggcctttgctctgagtgcctgcggctcacagaccaggccacctgctcgcactggggcctgagaggatggggagggtggcgccatcataagatgcggggcgccgacctgtcgttggtga

SEQ ID NO: 29141 - DNA, 3118 bp, Artificial sequence
  DNA replication origin
gggggtggggtgggcgtctcctccgtgggggtggccgacagagcagtggggaaggggaactggccctcacccagtgcgtgggcacccgccaccagctcccccagcttctccaccaggctgtgccggttggccgccagctgctgctgctcgtcctcggcccctgccccggggtacccggctgcctctggggatgggctgccccaggctgtgttgggcaggctgagcctctttggggaggccttggcgaggtccggtgccaggggtgaggcggtctcgtcggtatagaagacgcactcctcactgcccgcccgtgtgggccccatgtagccgggggagtcaggcaccgtgggcgtcttcacagggacgatgggcggccggatggggatggggccagcgctggacagggcgcggcgcacggtgggcttggtggagggtgtgcggcggatggtggccacgccggggggtgcgcccgagggcaggccagtggccgtgggcagccccgcggtgggcagcccagcagtggaggctgggcgcttggtctggatcaggcggcggtagttctgggcgatgttgctgttgcgcgggatggtggatgacttgtcaaactcgggcgggccctcgctgtccgcatccccattcacggagtagcagtcgtagtcggagcctgggggcacgggacacagtgaggcccagggcccaggtggccccttgcccccagcccaccagggtgagcacagagggggaaggacggggccctcctggatggctaagtcccagctgtccctggtcccaccccagccccgcgggcctgccttgggaggggatggtgtcctcagagcaggagggcgtggtggtctgcgtgctgtagccgctggagtactgcagcgagtcccggctgctcttctggtgctccaggctcaggccccgcgtcagcaccatggccaggtcactggcggcgggggacacctcctcaccgtgctgagggtgggaaagtgcaggctgaagccttgcgcccccaatcccctctgcccaaattccaggcagccctgccaggtggttggagccggccctgaggccactggctgggcctcctgggactgacctgggcgtgaaggggggccctggccagcctaccttggctgcgatggtggcaggggacatccggggtcgcggtgcctcttccccgctggggcccagggtgcccccactggcagggcctggctctgtgtctcgcaggagctccactcggtccttcctccgctgcagagtggcgcctgagggctgctcatgggagccgaccttggaccagtcctgcagggagggtgtggcaggtcagggggaccactggccctaccacctatggcccgggggcccgtcactgtggctgaggctcagggtgtccagggctatcagggggtctctggttcgcaatcacagccaagggcagagcatggagtgtgactgtggcccctcagtcccaccaggcccaggggtaagatgtggctgtgtgggcagtgactgtaggaaatggccaggtggcttgtctcttggggacaggtgctgtgtgcacgcacccctggctgaacccaggccctttgtgcagtaatggcaccaggtggggagggcatggatgggaggggcagctggtgactgtcctggggccgggctgggagcactgaccgaggtgggggagctgcactcgctaacggactggcaggtttccgaggcctcggaagatgcagagctggaggacttctgccatgcagaggccagcaggcggttgcagacagaggggccggcaggcagcaaggaggagaggagagaacagttttggtcacagagctggcatgcaggggggcggttcaattcagcgccttgcccagcacccaccccccctaccccagggccacggccgctgagtgtctgcagcagcacacagcagcccagagtgcacacggtgaacgctgacccacctgacagcccagccctgcgcattttgaagactgaccacaggactcactgctgacggcctggatatggccaccgaggggaaaaagagatactaagggcggcagctgggtgtttggtctgagcagttgggttgatggtgtcacagttttctcagacaggacacgggggaagtgtgaagccccgagtgccacgctgagcactgagctgagctgcctctgaggtctctgcatggatgcaatgagggccgtcgtattcataagctgagtgcagggagaagttggggttggagccatcagtgcagtggtcttggggtgggatgaggccaccaggcagcgagtgcagttagacaagattcaagggccaggcccgtggctgctgatgcgcatcaggtgggagggaagaggagagtcccgtaaaggagagcctgctctgcggagaaggggggcagctgtgctgatgctgctgggtggggccatcggcttggggcacagggtgtccatggagaccccgaggagaactgctaccatagaagggggtgggggaaggctgttttaaagtggactgaagtatgaaagggacacacctgctctgggcagtgggctggactaggtgttctgcgaggccccccactcctaaacaactacaaagaataaagaaaaaagcagggtagacacaggcccatgaaatcctgagcatgtgtgaccggcagggttccctggggcagacgccagcttcagcacagcagtggggacgtggatcacggtgaggtgttggcctgggaatgagccaagttaagccagggcagcccccttcctccagctctctgaatcattctggatttagatccccagatttcctgcagattcgaatgaaccaagatcaccaaaataaaaggaaaccaggcaccacctgtgaggatttggaggaaataacaaatgcagacttttggcaatatgacggttaaagtaaaaaaactcaatggaaaaagtatttggaaaactcagtgaaaaagttcaacacttgctcatgaaaaacaatacaaagacacaagctgctagaaaggaagctaatctgataaagaatatctacaaatgcattgatacttttccctctgaggttgggagaaagacaaggatgcccactgtca

SEQ ID NO: 29142 - DNA, 989 bp, Artificial sequence
  DNA replication origin
taaaaaaagaaaatctaggcattatgctgcttacaagagactcatttaagatataaagatatgtgaatttaaaagcagagatagaaaataataatataaatactgaacagaataaaggccttgggggccttcaggccagtctcaacagctatagtagtctcaacagctatagtagtcccgcatgtggcttgcctgatgctggcataaggctgctgcaccccaccctgactgatcctcctaacgccccctcacctggctggtgatgtctgaaggcataggcgaggggggcttggagtaggtggcgtcctgggagacgaagccagagtcatgggaggaaacgctggagaggcgagcggtggtggtggctggctgcgccaggctgcggtagcgacaggtggaactgggtgagtatgtttgggcacccccaggccatggggctccgccacccttggcactgctactgctgctgggggcactaggggagtgaaggaagagggcacagcagccagacagggagacagaggggtgtgtgtttgggggaggttgacaaacgagggtggggaaagaggtgaggggcaaaggaaggaaaagacaatgtcagactaggaggtcctgagacccaggtgctacacaggagctgtgttctgggacggtgtggaaggggagggccagagcagggtacccccagccccagtgctgaggggagccgtggtcagggaatgcccagggtgaggcaacctctctgcctcctattctgccactaagaacagttgtccaggctgggcacagtggctcatgtctgtaatcccagaactttgggagaccaaggcgggtggatcatttgaggacaggagttcaagaccagcctggagaacatagcgaaaccccatcaccactaaaaatgcaaaagttagctgggcatggtggcgcatgcctgtaatctcagctacttggcaggctgaggcacgagaatcacttgaacctgggag

SEQ ID NO: 29143 - DNA, 1994 bp, Artificial sequence
  DNA replication origin
cctccccacccctccagggaaaggagacctgcagccccagctggacagtgccctgcaggacgtcaacgacatgtacctgctgctggaggagacggagaagcaggccgtgcgccgggcgctgatcgaggagcggggccgcttctgcaccttcatcaccttcctgcagcctgtggtggtgggactcctggggactcagaccccagaggggtgggctgggcccagggttgaccttctgacctccaagaagggtcacttctcagcagtccctggctgggggcatcaaggccacatgctcctggcccaaaggcaggtctcatagctcaccatgcactgatttggtctggagagaccatcatgccagccctctgggctgtgtgggccccacctgcaccagccccgagcagcattggttagcgaggaggggtgagagaggagaggcccgacaagggctgctgcttctccaggggcgctgggcaggcgggcaggtgggcgatagggccagcaggtctgactcgctgcttcctcagaatggagagctgaccatgctgggagagatcacccacctgcagggcatcatcgacgacttggtggtgctgacagcagaaccccacaaactgcctcccgccagcgagcaggtgcgggagccctctggccaagggccagggccaggggcagggaggagatgggctgccctaggttgggaacagtaaaggggaaaagaggatggcatttgggggaggcagctaggggcataagaccagaccccttctgacacccactgcaggccatcccggagcacctgcccaggtcggggagggtatgccctggccagcagcgttctcagactcagagtagatgggtgaagtcctggatccatggagtcaggcccagagtctgcctgccctgctccatgtgggcagacctcctgccgaacctggagacgccccacctcccttcatggccagaaaccccatcccctcccctagacccaggcgtacctggccaccccaccccagccctgctgccactgcactcagaccagtcctgtcccacagcctgcgggcagcacgctccagaggcacttgttgcatgcccagcatctgccacgttatctcagggaatcttccactctaagacaggaacaggagtaaacaaactcagggaggcgcaggagcaacctgcaccccatggtgtcagggtcactctcgcccagcccaggctgggctcggaatctctactcagtgcatgttagctgaaggggctccgagaaggctgtgtcctctggtgtctccctgctccccacattaggaggagcctgggggagggggcttcagatttctgggtcttctcctgggatgtggttcacaattagagagtgggggggggcctctggccctactagctctgaggagctgcctccagtgacccccatccatgtccctgtccaggtaatcaaagacctaaagggctcggactacagctggtcctaccagaccccaccctcatcacccagcagctccagctcccggaagtccagcatgtgcaggtcagtgggggtggggttcccaggggtgtggggggcggtatcccaagaggaagtggggatgttcccagcaaaattgcatcagaaattgcttcagggcctcaaaattcacaacttttacaccatccgaggaatttgcatatgtagagggaaaatgtgccctgtcatcccaagactgctactggcacaggcatttgttggcagaataggaagcaggggcagtagcagcttcatttatggagcatccactatgtgccaggtgctgtgctaagtgctttatgcattttttctcattgaatcctaacactgctgtatcaggaatggtgtcatctccattttacagaaggggaaactgacacatgaagtcccagcatttaaccactggactctgccaggcctagcaccgtgtggggtcatagtaagagtcaaagatcagggagagatgggaagg

SEQ ID NO: 29144 - DNA, 1080 bp, Artificial sequence
  DNA replication origin
ctcgctaaccaatgctgctcggggctggtgcaggtggggcccacacagcccagagggctggcatgatggtctctccagaccaaatcagtgcatggtgagctatgagacctgcctttgggccaggagcatgtggccttgatgcccccagccagggactgctgagaagtgacccttcttggaggtcagaaggtcaaccctgggcccagcccacccctctggggtctgagtccccaggagtcccaccaccacaggctgcaggaaggtgatgaaggtgcagaagcggccccgctcctcgatcagcgcccggcgcacggcctgcttctccgtctcctccagcagcaggtacatgtcgttgacgtcctgcagggcactgtccagctggggctgcaggtctcctttccctggaggggtggggaggagaggccttgctggggatgccagcctggcttgccacacccacaaatgggctcagaccctggtggtggcatctctcggccgttgggctgggtgttgccctggggccaggggactgcggagggcagtgaggactctggggcttgtggaagggctagtcccaccaaagcaggcagagaggacagacacacacacaagaaagaggccaaagctgcaaagccacgctggattggggcatctccgggggaggctcttggcgcccaggagctctgccaacacggagactcgctggcctccacctggggtaccctcactgacccgggatggcgcccctcacctcacaaggtccagggaggtggggcagaagcgggacaagagagagtgtggggctcagctgtaggccaggccacagggggcgggggccaggagagctagggctgggccttggaggcagggaaggggtctcagtgtgggtccccactcagctcagggagcagagcacacagcaacagcgacacaagaagcagcaagaaagagagaggcgagaggatgatgcagaggagatgatgagatggcaggtgaggaggtgacaagtaaggacgcaggccagcctggtgggggcggggcagccagggcctgtggcccccatcccgccctggccaaccc

SEQ ID NO: 29145 - DNA, 1163 bp, Artificial sequence
  DNA replication origin
gagactcgctggcctccacctggggtaccctcactgacccgggatggcgcccctcacctcacaaggtccagggaggtggggcagaagcgggacaagagagagtgtggggctcagctgtaggccaggccacagggggcgggggccaggagagctagggctgggccttggaggcagggaaggggtctcagtgtgggtccccactcagctcagggagcagagcacacagcaacagcgacacaagaagcagcaagaaagagagaggcgagaggatgatgcagaggagatgatgagatggcaggtgaggaggtgacaagtaaggacgcaggccagcctggtgggggcggggcagccagggcctgtggcccccatcccgccctggccaacccctcctggcctggcagactgacccagcagtggcccgggactcatccctggccagggaccccgggggccccagggggactgtgccccaggcccctccctcgtggaccgaccgccttcctcgcttctccttggcctggagaggttccttccaatggccctgagctgggggagacagacaaatgcgacaaggacgggaggagcagctggagggaccgacatttgacttaccaagtagctctacaggaaggatgtgggaggagaggaggagagacagagaaagaaagaatgtgtgaaagacgccggatggacagagccactcctggggcgggggtgcctgggcctcctgctgcctcccatagggaggttctggaccaggtttggggggaagggcagctccctctgtcccacccaacaggttggagggtcctgtgtcggggacagcgcccctctggctgggatgaaggctttggggcgccccacggggcggtggggctgtggagcggggccgtggggctgtggctggggggccgcgccaggcactacctttgcgcgccttcttctgcagcttcagcgtgtccgacgacttctttttgatctcatgccgggctcgtttgtactctgcagaaggggagagcggagcgctctaatggggtccctgcggagtggggggtgggaagcccggctccgcgccaccctcacctttcgcgtggtccttgtccagctggttggccgccttcttccagtcctcgatgcgctcctgcagcgggttgatgaggctc

SEQ ID NO: 29146 - DNA, 1762 bp, Artificial sequence
  DNA replication origin
ttcagcctctgtggactttgcaaatatttgctttctctggacactggtttggttgggctgggaggggagggagattctgaggccccctaagccgccctgtctccttcccacccctgcaagctctcctagtctggcagggcaagccctagcctgctcctgggttgcagccaggcagagcctccctctgaggccctgagggccagggtctccgcattcccctttcctcaggaagagccccagcctccatcgccccatcctacatggaagggagggtcagaagcccctgtgggctggggcttggctggcccagggctgcccgtcaaggggcaaaacctccacagggcccttgggccagggctgaggtttctccaggaccccggggcatgcgttaaccagaaaagccccaaaatcagattggacaactcggtggccaggagcccgacctccctattgggaaaccccctcccaacttggagccttgggccaggctgggataaaggccacactgtttccccaggaggggaggggagcagggggtggagaaaggtggctctgttggccgcacaaggccccattcagcccagggcctggttgtcccaggcaggctagctgggccctgcagcagccacagcctcctcggccctgggagccactgctgctggcctgggatggcagcttccaggacacagggcaggggccccggaggccccagtctacacctggtgtgccttcagccctgccaccccctaccctccacactgtgcctctgcccctggtgggcaggtcagtgccagtgtcctaggcacatgtccgggagacacgatgcctctcattgggctcagcccagatcccctgccaggcccctgggaaaccccgaggggacaggacctgccacttcctgctccatttcccctgagggaggatgtgagccccctgtagcctgtagggtggatgtcctgatgtcagggagggagggcttggcaaaggcgcccgttcccagggacaggctttcctcatgctgatggctctgtccttggtcctctgccctccgagaggacccagagcctccctctccatggggcagggctgctgtcttagaaactgccccaagtctggatggagcatgcagggagcccggcccaggtcaagccctgcaaccaccccacaagaagctcactttctctcccatttgcccggcagagctcctaccctatctgggaggacttcaactccaaggccacgaagctgcattcccagctgaggtgaggtggcccagggcaccccagcaggggaggggcaggcagaggccccccccccgcccaaccaccgaccatccatgccgttgtccctctccccaggaccaccgtgctggctgctgtggccttcctggatgccttccagaaagtggctgacatggctaccaacacccgaggtggggaggcgcgtggctggaggttggggttgccccagggtgggcctggaggctggaaaggaagagtaggggatgggccagggaaaggacgggacgccaagcccagaaccttgagttctgctccttagtggagtgggctggttgtggagagagtgagcccctcgtcacaagaggcatgcaagcaggagtgggtaagtagtgacaggagtgttccccggggattccctttttgctgtgggctgttcatgtgaccccccagcacagagattctccttagggcttcttcccactcatgccctcgtgtccttctaagagcacgcagggtcaggt

SEQ ID NO: 29147 - DNA, 1907 bp, Artificial sequence
  DNA replication origin
atgaccaggggcagagaaggggatgaggccacctggaagctgaccacctggatttgcgggggcagcttctggattttcccctcggtggcctgagcagcagggcctccgtagaggaagggcggccatcagcagccaggttgaggagactgagcttgccccgtgaggccaccccacagtgagtccacaggccccacagaagccctcccctgggcctctgggaggccctgaccttgggctgagcgggggccaaggtcagatgcccactggtgtcaggctgcccattgaaacccagagaggggcagagacttgccaaaggtcatagttctgggcacggcaccttcagcaaggtgaatggggcctccacccagtgctggcccagccagaaaatggggtcatactcttcacccacccctcaagagtggggaatgtcacctggacacataggcctggccaggcctctgctaggggcccctgcagagggcagggcttgcgtactgttagctggtgttaactgagcacttactgcgtgctgggcgctgcgaggagtgctggctgagcagcacctgcttcaatttccacactgacccagtggggcaggtgctcctcctctcctgattttacaggtgaagaaactgaggctcagacagggggcccttgcccaggggcacctggaaagcccactccctgggattggaggctggattgctcacccacactccacatctgaaccacagccactgccgggacagagacagagtcccctcatccctgtccacttgggcgcctctaatgagaagcccctcacctccccactccagagcagccactgtgcttggggcagaactgggtgtctctcacatcccagcagtccctgccgcctccccagccttgacgttcagtgcttgtctccctgctttgtaagggagtccctctacctggcgtgcagtgaccaggcagacatgggatcaggtcctgaccccgccaccctgtggccgtgggcaaatgagctaacctctacgggcttctgtttccttgttggtgaaatggggctgtggggaaggtttacctgggcctgtcccaggtgaaggctgaggatgctgttcctggggcactggctgctggagccctatctcttatttttaatcagtgaaattgacctatccatgaagaggcggatataaacaaataagacataagctctttgtctctggggtcctttatgtggttaccgtggggaggggggcgggtccaggtccttagagactgaggcatctaggtccatctgctgaggggaaatggcctggcctcccctgcgccccatcttgtcccctccccatggggagagcctttaatctctgagactgccccagggctgctcaggggctaagaaggttcctgggtgccagggcagctggctctggacccccctccacccctagcaacttctctgctccctaaagggagatcttagcaaggtttcaaggctgagtgggggtgggggtccaggcggtgggagagcgcccccttttagaagacccccaaggggtactccaggcataggtggcatgagtccactccttgggacggctaggaacagcttcccaggccccttcaccctgagctgtgcccatttgggaacagcccacccacagcttacccactcttgcttcagcctctgtggactttgcaaatatttgctttctctggacactggtttggttgggctgggaggggagggagattctgaggccccctaagccgccctgtctccttcccacccctgcaagctctcctagtctggcagggcaagccctagcctgctcctgggttgcagccaggcagagcctccctctgaggccctgagggccagggtctccgcattcccctttcctcaggaagagccccag

SEQ ID NO: 29148 - DNA, 1525 bp, Artificial sequence
  DNA replication origin
tttcttcacctgtaaaatcaggagaggaggagcacctgccccactgggtcagtgtggaaattgaagcaggtgctgctcagccagcactcctcgcagcgcccagcacgcagtaagtgctcagttaacaccagctaacagtacgcaagccctgccctctgcaggggcccctagcagaggcctggccaggcctatgtgtccaggtgacattccccactcttgaggggtgggtgaagagtatgaccccattttctggctgggccagcactgggtggaggccccattcaccttgctgaaggtgccgtgcccagaactatgacctttggcaagtctctgcccctctctgggtttcaatgggcagcctgacaccagtgggcatctgaccttggcccccgctcagcccaaggtcagggcctcccagaggcccaggggagggcttctgtggggcctgtggactcactgtggggtggcctcacggggcaagctcagtctcctcaacctggctgctgatggccgcccttcctctacggaggccctgctgctcaggccaccgaggggaaaatccagaagctgcccccgcaaatccaggtggtcagcttccaggtggcctcatccccttctctgcccctggtcatggcccctgaacacatgcctgtgtcataggtaggggcgaatctgtccttggcatcatcccaggtgaagcctctcctgttttgcctccacatgtcagcaaatcatgcccgatgtctggcttgaacctcttgctatgatctgggcccacttccttctgtctcatcccaaagttccttgcaaattggctggagagggagagagactgtcctagtccacttccacgagcaaaatctgctgctctctgcagtggttgctatgaggctgccagtggtggtgggtggtggggtgcgggaaggcccatccggagccagctctgggatcggccaggggagggtggtctgtgttgcccagtcccttaacaggatcctggggccagggctgtgatgtccacaggacaggtggggactgctgggggccagcggaggggcccagatgtacagttgcaagagatgggggtcccagggggagtgcaccatgaggggcagggggtggggggcatctacaagccgctaactgggtagtcccaggccaggctggcttcaggcctcttccgggggcagagatctggcagctgtccctggggctgttgtcctggcagcaccgggagcctcgaactccaacctgccagcaacccccacccctcacggggcctgtcctagcagcactgtactgggtggtgtcacccccatccctggcctggtgggattctgtgttgtgcacttggagaatctgcgctgggctgtgggggtgggggcccttgggagatcctgtggggtgcctcgttctttccccttctcccagcccccaaatcctgccccttcatcctaggctaaggaaagggggcacggcaggagggcaggaatactggttcctggcccccaccctatcactggag

SEQ ID NO: 29149 - DNA, 1216 bp, Artificial sequence
  DNA replication origin
cggattaccgccgccgtcagtccccgcgccgaggctgcgccgcgagctgcccgcgccgcgccccccgcgccgcccgccagccccgctgcgacatggcccgcgccgcccgccggaggcccgcgaccccggagcgcggcgcggccggccgctgagcgcagcctggaggcgggaggcccggcccggcctcggagcgagcgcccgcgcggcctggccccctcccttgcgctgctccccgcgctccgtgcgcctagccgccgccgcggcccggcccagccagagcatggagacggcggagaaggagtgcggcgccctgggcgggctcttccaggccatagtcaacgacatgaaggtaaccggggcgcggcggggccgggcgcgcggcgacgggtgcgggaccccccggggacgcgtggcggcgggtggccgagcctcgtgtggccgcgcgccgcggtgtctgtgtgtccttgtctgagcgcgtcctgcctgcgtctgctgggcgcccgtgtctccgggtgcccgtctgggggtgtgggtgctcgtgtgtcggggtgtccgtgcggtgcccgcggtggccccgtggggtcctgacccgagcctgtgcacacgcaggctccctgcgccccagaccgccaaaccatgaatggggtttggatccaggaccgactctagggccctttaacgagtccggggtcttaccggcctccgcccccttccaccaccatgttcccccacggccccggagcccagacaatgctgtcaccgccaaagcaggaaaaaataataaagcggagaaccgttaactccttccccgccgacctaggcctctgcacccgaccgtgagactgcgtcccccagccccgccccacccccacagccccaggaagctccaggactccaaggtctccaggctgaatgtccctgcatcccaaggataggccttgatcatcaccttgggaggaggcgggatgaaggttggggtcggtggagcaaccccaaggaagcgcttttcctaccccattaccaccctgggctctcagctccgagccctccttgtctcccaggattgcttaaggtcaggctggatccaaccacccattcattcctcaccccaccaggtggggaaactgaggcctggaaatggctcaaggtcactaaggagactattggacccttcccctgacctcagcccccatttttcctcctgggaaaattagtg

SEQ ID NO: 29150 - DNA, 1729 bp, Artificial sequence
  DNA replication origin
cggggagcagcgcaagggagggggccaggccgcgcgggcgctcgctccgaggccgggccgggcctcccgcctccaggctgcgctcagcggccggccgcgccgcgctccggggtcgcgggcctccggcgggcggcgcgggccatgtcgcagcggggctggcgggcggcgcggggggcgcggcgcgggcagctcgcggcgcagcctcggcgcggggactgacggcggcggtaatccgagccgccgaggatcgggcgtcacgtgggcgcggcggaggggggaccgcgaggagggagggaaggagggcgggccgcgcgggagggggctgtgggaacggccgcgcgggcgcaggcccattcacggccagaaaccagggctttgaaatccgagcccgggcgctgccagactggtccggcgagcggggccgacgggcgcgggcgccaccgagggtcggggggcggcgctgggcggggcccgccctgcccacgcaggagcgggactggcggttgggcctcggcccccgggcaggggctccacgatatcttctggcctttggtctggggcggggggcttctcgcgcttctaaagacaggcagtgggtacagtggcgggatggggtcggtgcatgggctggatgggtggcatacaccgcacacagcagggcgcggggtatcgtggagccgcccgccttgggacgtttcatcgcaggcacagaccttcctcaagttcggacccttccaagttccttggctccttctccaagtggtgccgatgccacccggatggggtgcccaaggctgggcatttggggggcagtggtagtctcctgggccttgaacaacctccttcttcgcgggtgggggctaatgtcggacctgcagagcagagctggagtgtccttggtctctgctgcctgagtccacggtgggtgcgatgcacacacgtgcatggggtagcaatgtcaatcgcagcctgtcctggagactccaggcagggaaacccaccctggggggcagcacgatgggggagcgcactctggggaagagcaggcacaagctccttctcgcctactccatgggccggagggagccaattacaagctcattaggagaccaagcccagggttcccaaagcctggggacaggtggtaccactcccggtgaggaagggctttcagctgcagcagtggttggggcacctgcccctccctggactgctctgggcttttcctccccttgccccgagatctgcaaagtgttctgcagtgtgcattgccctttcatccaggaactcctggggctcagctcccatgtccccagtggggaactcccattgccccagggagtcaggatgagaaaggcagattggggaaggcagggttcaggattccagggcaggcagtgcatggtgctctccaggagggtgcaggttccagaggtggggacctaggctctaggcccatggctccactcaggtgagtgcagggaccaggccctggggcagccagtactccttggggccatcatgaaacccgatctccaggacagagggtgaggcccccggacagctgcacgtgtcagctgggaaggagcaggccggctcgggttgagggttttctgttatttctttattggggtgggggtggggtgcatcattcagatctttgtgctggtgcctacgtgcatacaagtacacacacacacacacacacacaggcatgtgttcacgtatg

SEQ ID NO: 29151 - DNA, 1410 bp, Artificial sequence
  DNA replication origin
acacacacacacacacacaggcatgtgttcacgtatgtatacatatacacacaaggccagagctctagtgtgctggaggaggggcaagctctttttccaagagggtattagaaagaggttgattccagaggatgagtggtctctgaggctatagccccccactgggtgggcagccagctctgtgagaatgccagggtgcagctgacagcgctggaggcctggggactggactctgagaggagcttgggcagacacagcagcctccggccccaacactgccctgggttggcaggcccagccctggtcctgacaggcaggtccttgagctcctcgggagggcgtgacgacccttagtgtttcatgggaccactcggtgggccctcctccgtgccaggcctgtcagaggacaaccctccggtccaggtggtccccacgcccgctccgctggtgccgcacttccaggtgcttgttctggaccttctcaaagtgctgcagcagctctgcgtagtcgatgctaggggagtcagctttctgggacttgggggctgcctttagactgtctctgggaagagggagcagaaatgctcagtgtcagggatcagctcacaggggggttactgctggagggcagtggggtcagaggcagagccacaggctggtgggctcggcctgtgggcgtctgtctcaggcctggcaactcttccgtcatggcgggccccagagctgggaagcccctgagcatccccctcttccgcagttggtgggaacagctaacactgctgcttggctattgccctcggcctgtgggctggcgatggcgcccagagcaggcatcgcattgggaagcatttcctgtttacgagtggctccctttggggtgaaagccagggctagcagccagccaggaagccagctggggcctggaacagggtctggggagaagggggaggtggcagcttggccctttctctgagaggcagggctaggactggggaaaatgggaattgctgaagagcctctgccgggccctccacttggcaggacatttgtttttgagtgttggggccccaaggcctgcagtcactcactgtccctgggaggaggaatgccggtctcaccactggacatgcctacagctcctacattcctgttgctgccaccctctccagttgctctgtacagcaacacaggttgtgcactgcacagctagtgtgcatgatgctccctataatggtgcaatgcggtagccttgctgtccctgtcaagcccagtgcttagcttgcccctggcgatgagatccccttgggctcctgtcctgttcctactcaccctccagcagtgtctcatgaaatgttctgctccctccctttggcctcactggtttggaggagcagatccatgtgggctagg

SEQ ID NO: 29152 - DNA, 789 bp, Artificial sequence
  DNA replication origin
gctggcctggcggagggggtggagggtcagtgcacctaccgttctgttcgggagacccttgcttcttggggatgagtgccctgaaagaactagaactttctcttagaaggggctggtaggaggggcctgcatttcagactgaggcttcatcaggacctgaggttggagcccaggcctcgatgtctgggaggagcctgccacgtgccattcctggccaagccatctggccagggcagagcaggcagagcctctagggccacgtgggcttggcgaggtcaggaaccaaaaaacccaagaggctagaatgccgtgagtggaggagggacagcaagagggaggctggagaggaaccagcgagaggtgtgagaccctataggccgaggtgaggggctgggtttgtttcagatccaggcggaagccgctagcaaatcccagcagggaggggcatgttctgatgggcctgttttaggattgtccagttggtgtgtggagggtggactgtgggggcaggagaagcagcaggaggcagatcctgagacatggggagatggaccaggcaggagatgctgacagccccctaggcatgggggcgggtgtgtggggcagggtggccgtgtaggttgtgctcccagggtaaggcccccatacgtgccagtggacccagcagagggactgggggtcaggatgactcgtggtttgggcctgagcagctgggtggacagtgccaccgtttactgagatgaggagggggttggcaagtctatggggacaccaagggctggttgtggc

SEQ ID NO: 29153 - DNA, 798 bp, Artificial sequence
  DNA replication origin
tttgaccttagcaacctggaaaatggtgaaattatttactaagaaaggaaagactgggagaagaacaatttttggggagcagtggaagcaagaatcactttttggatataaacattttgagatgcctctaagcccttcgagagagattgaaaggatacatgaacctgcactcgggaagaaattagagctggcaatagaatttcgagagtcataagcatgttaaaggtatttaaatatttaagtaatgcaactgagtgagatcgcctgcaaagacaatgtaggaaacaaaaaggagagtagtagaagactttgtcccaggctactccaatgactaggaatttggagattgagaagctggggaagtagaggaaggagttgctaatgaggtagaagggaaggtggaggagtgtggtgtctgaaagccacacgaagaaagcgtttccaagaggagggggtgatcagctgccaagaagtcatgtgagatgaagacagaaaactgacctctgtatttgtccaggtgaagactgccaaggaccttgagaagaaagagcagccgtggaatggtggggacaaaggccccactggaagcagtgaaacagaggatgggggtgggtgtgaggacgaggaggcaggcaatgcggcaattctttggaggaacagcagaggaggggagctgagagaggaggtaataggcggagggggatgtggggtcacgggaaagcatttttaatgatgcgaataataatacagcatgcatagatgctgacagaagtagagtagggggaaagtgggagagag

SEQ ID NO: 29154 - DNA, 1109 bp, Artificial sequence
  DNA replication origin
tgagatgaagacagaaaactgacctctgtatttgtccaggtgaagactgccaaggaccttgagaagaaagagcagccgtggaatggtggggacaaaggccccactggaagcagtgaaacagaggatgggggtgggtgtgaggacgaggaggcaggcaatgcggcaattctttggaggaacagcagaggaggggagctgagagaggaggtaataggcggagggggatgtggggtcacgggaaagcatttttaatgatgcgaataataatacagcatgcatagatgctgacagaagtagagtagggggaaagtgggagagaggggacaactgcaggaatttagccattggataagagaaggggtggggctgggtgcccatgtgcagggatcagccctgggtgaaggcagggcagacactcagctgtcgagaaggcacagccctgtgtgtggatggaggctgctggaagacttggtggccggaagatgaggtcattgtcttctgattgctgcagctttcttggtgaaatcagaatagagatcatcggctgagaatgaggaagaggaaaatattttggaggctaggagagtgatgagagcaataaagcagtcatcttgaatagatgcagagctgagccagaccaaagggcccattggagacctgtggtcttaaatttaaattaagatccttcaggagaggtgagagtcttccccagctatgttcagctggtctgcatggagtagggggaggattaggtttgccagggttgaagctttgcttgagagtgtggtgaagggcaagttgcaagggggtgctatggtggcagaccatggcatccagactggatagggagggcacgaggtgggtgctaggtagtgaggatgaggaatggaggtttcgatggggccaggtgcttaccagagttagtcatctgtaaagtgagaagatggctgtgggaaagcaggattgtgatagagagatcttggagtttatgggtagcggtgaacaatgtctaggatgtggtcagggaggtaagtagctgaggaggccatgaaattgagaagcaagagtgttggattaaatatcattcaaaagatcaggattgtgatttt

SEQ ID NO: 29155 - DNA, 1073 bp, Artificial sequence
  DNA replication origin
taaaatgaacaaagacttgtaataataataaaaataactaagaataataatgttaataaaaatgaaagctagaaggtattgggtgcttactttgtatgggataaagataagtactatcatctccttttatagttgagaagactgaagttcagacctgaccaaggtcacacgtctagtaagtagttgatggatttcagtctgtgtttaactctgctttttcacatgcacgatgttcatcatcatgtgtttccctgcagattccaaggttggtgaaagttgtggaagaaagttcgccttactttaaagtaatcagccccaaagatattggccacaaagtggctcctggagtgccttccatattccgaatcctctttactccagaggagaacaaggtaataccaggaatggcaagaaattggacacttgtactggcagattgcagttcaattctgaatatttacagaggcggtagtgctggtggtggtggtggtggtggtggtggtattgatggtggtcttggtattgacatttgtgttgttgttgttggtggtattggtggtagtgctggagggtggtgggtagtggtggtagtgttggtgttggtagtatagatggtggtgatattgttgtcattgatggtggtgatggtatagatggtagtggtagtgttattgatgttggtactggtgttgttactattagtagtgttggtgggtagtggtgggtgatggtgctggtgtgtgtagatggtattggtattagtagtatggtagtgtagttggtggtaatattgttgtcattgatagtggtagtggtggtggtggtgtagatggtggtggtattgttgtcactgatggtggtggtagtggtgatgttagtatttgtagagttggtgggtggtggtggtgtagatggtggtggtgatggtggtgtagatggtggtggtgctgtcattgatggtggtataggcggtggtagtcacgagaggaatgctgagacaaaggataaagattttggcttctaggaagtttggggccttaattggttatgactttcttccccagattctaact

SEQ ID NO: 29156 - DNA, 1680 bp, Artificial sequence
  DNA replication origin
agtatctgtcttagcctttcccgttggcctcccgttggggtcagcccctccaggatccattcattagctaccccaggggaggtgatgctgactgagaaatttcttgccaagccaaccactgatcactggctccatgaagggcggcaggagccctaactcatttaatcctcagaacaattatattattattattattactattattagagacagagtctcgctctgtcgcccaggctggggtgcagtggtgcgatcttggctcactgcaacctttccgcctcccgggttcaagcgattctcctgcctcagcctcccaagtagctgggattacaagcatgcaccgccacgcctggctaatttttttttttttttttttttttttttttttagtagagactgggtttcaccatgttggccaggatgatctcaatctcttaacctcgtgatctgcccacctcggcctcccaaagtgctaggattacaggcatgagccacggcacccagccaacaattctaaaaggcgtatgcccacatgcccattttgcagaagagaaaaactgaggcagagacaggttatataatttgctcaaggtcacacagcttattctgggattcacacccaagcagcctgattcttgagtgcctactcttaaccactgagtcatcctgcctccctagggactttggtgaatctctcagcaaggtggatgggtacctctaaagctagcttttgatgacttctccccccagtctgttcctgcaagtaactctaaacacattcaccctaggcaaagaacaagtggttttggaacctgcattctctattgcccctttgagactcgctctgggcttggccctctctccaagggacaaccctctctctgtctcctcctgggttcccctctcccccagcgacctccttttcattctcacttacctccttgcctttcactctcctcttggaaggtggttcagctaacactcattagcacatgttaaagatcgccaattcatgtctcagtcactccgtagcaggagaggggagaaaggagggatgatgctgtcactctgtgggtaatgtgtcttaccttaccacaccacaaggccaggacagacccctaagggctcagaccgcaggagagaatggggagagggcccagctccctgctggggagtcctgtctgctgccctcaggatgtgcgctcagtagctgcgtctattttctctgagaccagctcagaacatccccaagacagagttggacgttgttctctgtccactggagcaggcacattcccacgatgtccctaggtgggcgtggttaagacctggtacgggttgatctagttctgccaccccctggccaaatgtctaaaagccccccagagcatggccagcgtgaggcaggtaccaggggtggagggaggctccgaggggacggatatacgaagacccaaacagacagtggaagccccccacccccaccccacaccacttccatcggaatcctcccggggcactgctgattccagctgctccccactaaagccttgagaactcttggctgctctgcaagactgagccccatgaaggagccacgtgcggcgtggaaagagtgctgagttcaaattgtagccctgccactaatttgctgggccagtcacttaatcatctgaagtc

SEQ ID NO: 29157 - DNA, 1239 bp, Artificial sequence
  DNA replication origin
tggcgccggcgacgccggctggagttggagactgcgcgtgagcgcccgagggcctgtctgcctatgcgtcggccgtgggccagcgcttctgaccctgggcctcggctctggcctcggtctggaagggggcaggggagcggggccctgcgtccggaagtctgcgccctgcgcggtgggcggagaagccacgaggagtccttgctgcccccggcccttggtgccccctggcggccggcgcgctcgctgcacccctgcccgctttccgggagcgcgggaggaaaatccaagagccaggccctggggcgccggccaagcgagggctggaccctgcccgacccagaggagtagccctgtcacagctgcccacggccggagtcctggggcagcgggtccctaacctagcaagcccggccgcgcacgccgcgccctgcaggccagaaccccaaggacgctctgagtggttagtgcagccattgcaacgcggtggcgcacgcctgtgatcccagcactgtgggaggccgaggcgggaggattgcttggggccagcagttcaagaccagcctgggcaacaaagtgagacccttgtctctaccaacaacaaaaaaaagtgaacttttcttacaaaataaatcgagtgaaatcctgctgcgaggcccacattgtagagttgctgtcgaggactgtgggggaggcggaaagttgccggcgggctcctgagagtgactgagcagggggctttggtaacaggtccctggggagataagagatggacccaggacagaaatcggaatgcaggacttgggaatgcaaacttcccatggcagggacgggacgcgaggtgggtgggaagagcaatgtacgatgcgggagacgccaccgtgcttgtgggaagggcagcgtcaccatgctaggaggaaggggccttggcaaggaatggggagttggggctccccgtgacagtgagggaggaggtgggaggaggggcctggccgtgcattgtcccttccaggtgcccgccagagggcgcgtcagccctcaaataaagatctggaggctcacagtcgcagttctgcccagatgaccccatctctgacctttgtgttggcccactaggtgttggggtcccaccagccatttgacgacagctacccatagcctccgggctgggacacctgcagctgtgtggctcttctaggggagcaaagggaagaaaaccaccagctaaagtgcctggagttt

SEQ ID NO: 29158 - DNA, 1889 bp, Artificial sequence
  DNA replication origin
cagccctcgcttggccggcgccccagggcctggctcttggattttcctcccgcgctcccggaaagcgggcaggggtgcagcgagcgcgccggccgccagggggcaccaagggccgggggcagcaaggactcctcgtggcttctccgcccaccgcgcagggcgcagacttccggacgcagggccccgctcccctgcccccttccagaccgaggccagagccgaggcccagggtcagaagcgctggcccacggccgacgcataggcagacaggccctcgggcgctcacgcgcagtctccaactccagccggcgtcgccggcgccagcacctccgcgggcggccccagcctgggagcacgtgggccgcggggctgcgggccgatggcggggtggggaccagcagacgcgcggggatccacggcagaacagccccttaccgtggcgggggcgctgaggtccctcggggcaaccagaggacggaggcttggtgccgcagggcagtcgggaaggcttcctggaggctgggcttgagccgaaggtgggtgggatttcggtggctggcagggggtgggggccacgcctcaggaacactgaagccacttggggaacaggcggcacagtgagagatccagaaggaggagaaagccggaaagcgagcagaggtggcccagaccgtgcaggggaggtccctgagaccctgcccggtacaggatgtgctaaaggaccacctggtctgtagtgggtctctgggcctgcgagctaggggaaggggctacaggggtcctcgccttcccccaggctgcggcgttccccaggagaaggccaaggttgacccatgtaggattccccagcaggtggtcaacccctggcctgtggaaggggcctgcggacagtgctggaatggaatggagtgcaatggaatgtgtcggaggatgtcctcatcctctccaggccagaagataacagatgtgcaggagtggagatttcaaaggcagagagaacaggagagaatccagagcctcttcccagaacccccagcccctgcagagagagggcccccaggcctccgggagactgtgcagatgacacaggagctctgctcctcagcgcatggacgccctgcttaggcctcgcaccaggctctcccctctacctgcgggtgccttgagacaggacagccatgttttcctttgagcttctatttcccctcctgacctagccagagcaggcccaggtgttctctgaggtcccttccaatgtgacaggccaaggtgggtgtgtgcaccttgcactgcagggacagaacatgcagatcccgactgaaggagaaagactttaatcctcccccttccaggcccagggctccagttaagacaagcagaagtgctactgtgcggggttctggagtctcctgtgctcaggtttcttgctgtcctggtaaggcctccactgcacgcacatggctcaagactggtgtggtgaacaccaaggctacccagtctcctgggtggtggggtcatgtgacttcacgaggctttgcaggtgtctgactgccttcttcaccctccagtcattgaggtctgagcagatgacctgccctggacagtaacaagcctacggagagggagaaaaccgtcagagtcctgggaccatccccaccctatgctgaccaggagcctgaggctgagaggcccagggtcacatgggacattggtggcagatctgagatatcaggttatgtcctctaggattctcaatcttccatgagtccgagccttgatcctgccactgcaaagaaactgtggaccctgcgggaagccagggctgcaggacttcttgtccccctctacggactgccatgtctcagagacctgcagaggctgtccatcaa

SEQ ID NO: 29159 - DNA, 1227 bp, Artificial sequence
  DNA replication origin
atcttgcaccgcccttaatccatttaaccctgagtggacacagcacatgtttcagagagcacagggttgggggtaaggtcatagatcaacaggatcccaaggcagaagaatttttcttagtacagaacaaaatgaaaagtctcccatgtctacttctttctacacagacacagcaaccatccgatttctcaatcttttccccacctttcccccttttctattccacaaaactgccattgtcatcatggcccgttctcaatgagctgttgggtacacctcccagacggggtggtggccgggcagaggggctcctcacttccagtaggggcggccgggcagaggcgtccctcacctcccggacggggcggctggcctggtgggggctgacccccacctccctcccggacggggtggctgccgggcggagacgctcctcactttcccagacggggcggctgccgggcagagggtctcctcacttctcagacggggcggccgggcagagacgctcctcacctcccagatggggtcgtggccgggcagaggcactcctcacatcccagacggggtggcggggcagaggcgctccccacatctcagacgatgggtggccgggaagaggcgctcctcacttcctagatgggatggcgggcgggcagagacgctcctcactttccagactgggcagccaggcagaggggctcctcacatcccagatgatgggcggccaggcagagacgctcctcacttgccagacgggatggtggccgggcagaggctgcaatctcggcactttgggaggccaaggcaggcggctgggaggtggaggttgtagcgagccgagagcacgccactgcactccagcctgggcaccattgagcactgagtgaacaagactccgtctgcaatcccggcacctcgggaggctgaggctggcagatcactcgcggttaggagctggagaccagccaggccaacacagcgaaaccccgtctccaccaaaaaaatacgaaaaccagtcaggcgtggcggcacgcgcctgccatcgcaggcactcggcaggctgaggcaggagaatcaggcagggaggttgcagtgagctgagatggcagcagtacagtccagcttcggctgggcatcagagggagaccgtggaaagagagggagagggagaccgtggggagaggcagaggcggaggcggaggcggaggcggaggcagaggcaga

SEQ ID NO: 29160 - DNA, 920 bp, Artificial sequence
  DNA replication origin
cccgtctggcaagtgaggagcgtctctgcctggccgcccatcatctgggatgtgaggagcccctctgcctggctgcccagtctggaaagtgaggagcgtctctgcccgcccgccatcccatctaggaagtgaggagcgcctcttcccggccacccatcgtctgagatgtggggagcgcctctgccccgccaccccgtctgggatgtgaggagtgcctctgcccggccacgaccccatctgggaggtgaggagcgtctctgcccggccgccccgtctgagaagtgaggagaccctctgcccggcagccgccccgtctgggaaagtgaggagcgtctccgcccggcagccaccccgtccgggagggaggtgggggtcagcccccaccaggccagccgccccgtccgggaggtgagggacgcctctgcccggccgcccctactggaagtgaggagcccctctgcccggccaccaccccgtctgggaggtgtacccaacagctcattgagaacgggccatgatgacaatggcagttttgtggaatagaaaagggggaaaggtggggaaaagattgagaaatcggatggttgctgtgtctgtgtagaaagaagtagacatgggagacttttcattttgttctgtactaagaaaaattcttctgccttgggatcctgttgatctatgaccttacccccaaccctgtgctctctgaaacatgtgctgtgtccactcagggttaaatggattaagggcggtgcaagatgtgctttgttaaacagatgcttgaaggcagcatgctccttaagagtcatcaccactccctaatctcaagtacccagggacacaaacactgcggaaggccgcagggtcctctgcctaggaaaaccagagacctttgttcacttgtttatctgctgaccttc

SEQ ID NO: 29161 - DNA, 1406 bp, Artificial sequence
  DNA replication origin
tccacttctccagcctcaattcatgcccaccaactctactcccagggacctccttgtccagctcccgcgttcctcaaccttctctctttctgggacattttctcagccttcttgtcatccagaactcaattcaaacgacatcttcccaggtctatatgaggaaacctgcccttcccattaaactttagacactgtcttctttgtttactacctgttttcccttttcctgacacactagaatgcaatcaccctgcaagcaaattttccactatatctccagtacctgctaaagcaggtgctcatacatatttgctgaaagaattaattaccagatggcaattgtatatattttgtaatatccttacttggcagaattaaaagctgccaattttgtgtaagtccccattttaaaaaacagggctatttgtaagcccaggactattgtgatagatgaactggctgcaagccccttacaacataggtgttataaggaaaacaggagaagggagaaagagggacagtggatgggtggagggagaagtggaaggtgggtgactgggtggatgtgtgggtaggttagtggccagatggatggatgaatgggtgagtggatgaatggtggatgggtggatgcgtgggtgggtggctggatgggtgagtgggtggatgaatgggtggatggatgggtgagttggtagatgggtgggtgagtgggtgggtggatgggtggatgagtgaatgggtgggtggatggatggtggatgggtgggtgagagtggatggttaggtgagtgggtggatggatgggcaggtgagtgggtgagtgggcggatggtagatgggtgggtggatgggtgggtgagtgggtggatgggtggatggatggatggagggtgggtgggtgggcggatgggcaggtgagtgggcgggtagatgggtggtggatgggtgggtgagtgggtggatagatggatggatgggtggatggttagatgggtaggtgagtaggtggataggtggatagacgggtgtatggatgggtgagtggttgaatgggtggatggttggacgggtgggtgagtgggtggatgggtggatggatggtggatgggtgggtgagtgggtggatgggtgggtgagtgggtggatgggtgggtgaatggatgagcgggtagtgggtgattgggtgaatgaatgagtgtctggctgagtgagtgagaggatgggtacctctgggaaggtaaatccaagttgcagtgtaagttgagccaggggaggtggccacagttggctcccttaggccgcccacctcgtggggtcaccaaggggttacttcggggcagaaaggtgcggctgtgggtcgccccgcccgggtttccagcagcagcaccccagcccccacccag

SEQ ID NO: 29162 - DNA, 862 bp, Artificial sequence
  DNA replication origin
cggccgccccacacccggctggggacgccgaggcctccgcgccgcgcccgcgtccaggcctcggcgcctcggtaccccgctgctgcccatccctggccgcgcgccgcccgcctcgcaggcccacgcctttgggctgcgggtagccgccgcccacccggacccttcgccgcccctgcttgcctcgccgcgctcggggcccggaggccggctccggagggctcggagggccgccggttcctggcacaggagcggggctggaagtacgcagggctttctcccctcccggacacctgaagacatcaccccagcgggaggatggcagcggcgattggccggcgccgcggagggttcggggccaggccgggtggagccggctcctctgccctcggggctcgctacccgaggtgccagccggcaaggacgacccgcccagcttggagagagaatccccgctggagctgcgtcgcggggacttgctgggcgtgttgcggaagggaggaggggccgggccgaaaggggcattcctgctcccgggagcggggccgactgccgagggagacggaatgggggagccgttatgcaacaggcagctagcggggcttcttggcaggaattgggggagtgggaggatatgaaaacagatgtaggcaagaggggagtggaaccttgaaggtgatgagaagtaagtttacgaaggaatgcacaaggtagggtggcgatagtggggaggagaagatggttaaagggaggggttgtgggaggctgactgggtggagttttttactagcatttgaaagagttgcagagaaatttttctgtaggtcaaatacgtaaactaggtgtccttccgcaggtggaatgg

SEQ ID NO: 29163 - DNA, 836 bp, Artificial sequence
  DNA replication origin
cctcgttccctccctagtccgcttgcccgctcgcccgctcgctcgctcgctggtccatccgcctcctcaccttcaggacccggatccctcccggccggcggctcgcgggcgcttcgggcggctccgggggctccagcgggcccgcgggccccggctccacctcccccatcggcgacccaggattcacagagacgcccggcccgcgcgacggcgtgcggagcctcggcggcgcgcgcgagcaaccggtggccccgccccccgcggcccgccggctccgcccctccggcggctcgccagctccgcccctcccgcagccccgctggacctaagcagctgccggcgccgagtggcccgggcgccaccgagccgcattccggccgcggcccgcgtggcggaacctggcaccaccgcagagcgctgggcctccactgcccgccgccctaggcttggaggactagagcgcaaggaggggtatttgctgctttccccgccctctaagaaacccgcgggagaaagaagcaggtggcgccggcacctgtcaattgtgacaagacgctgccctccgccagggtggctcttgtaacttccctcacctgccaagccgttgaacgaactgttgagaatactcaccttggcaaggccttttctcttccttatcagagatgcgtgcgaccttcttaagcaaattcaacccaacctcgtacaaaacgtccgctcacctcccagccatgttttaattcccttgcctcctcctggagcaaaattatcagaattcggtgctctgcttcaagcagtaatatggcctgtgacccggtttatgatttatttgcaaggct

SEQ ID NO: 29164 - DNA, 1249 bp, Artificial sequence
  DNA replication origin
cccctcggctccccgccaccggctcggctcggcccggagccccttccgctcgccggggcccagtcccggagcgccccggcccggctggcttgggctgcggtcccgggtccattgtccggcggtccgtctgtccggaggcggggcccagggacccagagcgcagcgcagcgccgaggcgccgggtaaaaagaccccctgccctccctccgggtccgggctggggatgcgggctcctcgccccctcgcggccgccggctgttggtccttttgtctgcactggggagagggccgggggccagctccggcctaggggggcagcccgggctcaccctccccgcttccaaccccaattcctccccggccgctcctcctgctgccccttggcgctctcgggcgcggggcgcggggtgcggggccggggggcttttgcgcgggccgcgggcaccccgcctcctcgggccccggcggggacggccccggcgtctgacagccttgggtggagctgggggaggggaggatgggcgtgggcgtgcagaccggggggtatcagtccccgcgtctgggtctcgcagaaaagcttctaaatttagatttcggagattgtgttgtctaagggtttgtctgagccgcctcggaagacctccggctcttgtcaggctcttgtctggtaattcctgggaatttacctgggctcatgcttgaagaagcagagggaccatctcggctgattagacacgccccagacccaaccccaggggtcaggtgaacagccaggcggctaagtgaccagctttcttgtcctctcctttttggcagatacagatcacttggattcagtcgagtttgctttgctccgtgggaactgcaccagagctggaggtgggaacgcactctcttttcatcaagctgagatttcactcgttttttttcttgccaaagtctgtggtgtgccctagacgctgcaacctaatacctgtgggagagcagagacagtgttcaggggagacgttgcaccttcccgaggactcttaaccttgctctgaagacagacagaactgctttccttttaaaatggaatccctttagacctgaatctcaccgtttacctgtcttcccagcccatgttcaggcagctatctatttacatttttggtttggtttggtttcaggttttggcttggaaattgaggcagtgttaaaagtaaaacaaaatgagtgacctttagggctgtatgtctctgggttttat

SEQ ID NO: 29165 - DNA, 1639 bp, Artificial sequence
  DNA replication origin
ccgcgagggggcgaggagcccgcatccccagcccggacccggagggagggcagggggtctttttacccggcgcctcggcgctgcgctgcgctctgggtccctgggccccgcctccggacagacggaccgccggacaatggacccgggaccgcagcccaagccagccgggccggggcgctccgggactgggccccggcgagcggaaggggctccgggccgagccgagccggtggcggggagccgaggggcggcgctgcagacggacaaagccaacagcagacagacagacggagggggaaaaagatggcgacgcgggcggcgggagcgcgcggctcgcgcacccgcagctagtgaggcgcgtgcacgagcctccctctccccctcccccgcgccggccaggtccccttccccgcggcccggcgcgcgcctggcgttgtgggcggggcctgaggagaggggctctggagaggaggggctccggggagcgcccaatcccgggcgcccgagaggggctcgcccgcgttccagggctccggaaccccccgcctcgcccattcccgggtctttctctggctgtctcagccgctcagctcccccagaccttcctggacgtgtaaacgccaccctacccagccccgatcctggtttcttaccccaccatcgagttcagccacaaaacccacaacccccaaccacagctccgccgcaggcaccccctctccttagcccggatccccaccaccgtcacaaaccctcttcgcctcattcccccacgcttcgcggtggcttcggctcccgaggctttgaatgtgaccacgggccttggtgggaggggccaagttcagctgtcagaacctcagagctgggaaatcttgagatttcttttgagtatttaattttctgacatgattctcaactgataaaataacattggctgcagacccaggggcaggggaacttgtggcactgttgtcacttgagggatgtttgggggcaatggagagccgttggaccttttttttttttttttttttgagacagagtctcgctctgtcacccaggctgcaatgcaatggcgcgatcttcgctcactgcaacctgcgcctcccaggttcaagcgattctcgtgcttcagcctcccgagtagctgggactacaggcgtgcaccaccacgcccagctaatttttgtatttttagtagacggggtttcaccatgttggccaggctggtcccgaactcctgacctcaggtgatcctcccgcctcggcctctcaaagtgctgggattacaggcgtaagccactgtgcccggcctggttggacgcacttctagtcaaacacctcctcctgtccacgtccttctctctcctagttcctgttgccttcttttcttcctctcttctagaatgcctgagcctgccctggcatcgcttacctggagaagcagggaatgcagaggaaagaagatgagatctggtattagaagatctggctttgagccccagctctgccacccaccagcctgttgactttgggcaagtcacttccctgttctgagcctctgcttcctaagatgtcaaatggataatgatgcaataattcctggcctttactctccgagggttgttgtgccagttaa

SEQ ID NO: 29166 - DNA, 1078 bp, Artificial sequence
  DNA replication origin
ctggggtgacacaaatgttctggaattaggtagtggtgatgattgcccaaccttgtgaatatactaaaaaccaatggtgaattttataatttgtccattgtctcccaatgaaatttttttaaaaaagagaataaaacaaaaggatattgcagacttctcaggctcacacggaatacacataaaagcagccatccctgtatcccttcctccctgagacagacagttgtttatggagaatctactgtgtgcccggcactgtcctgggtgctgggcatggctccattaatattttcaaagcaaataatgtggagcaaaagacacagacaaatccttgtccccacagagctgacctagtggggtgagatgaagagcataataagtagtgacttatagaaaatgttaacagtggataagtgctatgggggaaacagaagagcgaaggggaatggaggggcatgggcgggggaggcgcatgttgcaattttaagtaggaggatgggctggcctccctgcgaaggtggcctcccagctgagacttgctggaggtgagctttcaggcggggagaccagccagagacaacgcttgtggtgggaacatggaggaggcaagtgcggctggcacggagcaggcaatggggagagctggaggagacgaggtgaggagctgggtggtcacatcacctggggcttggggtccttctgcaagaccattggcttctaccctgaaggagaggggatgccttcctcaccaagagaaggcaggaacatgtggctggggaggagcaattcgttgcctggcatcggggatattggggagagttatttgtgtgatttcagagctgctaggagggagggcagcagcaggaagccaggaggtgacagctggagagattcagggcagccactgcaggacccaggagtgggcactgcagggactcaaagccccacactgtgccacacttgccgaggggaggagaggcctgctggaaaaagctggcgtgggtctctcattcctaatggagccccagggagcgtgagggctttggaaaggaaacataatgcggtgggggaaggtgta

SEQ ID NO: 29167 - DNA, 854 bp, Artificial sequence
  DNA replication origin
gagagaggaggaaaagaagggggcttcgctgccgaagcccgggagaccacttgcggccaagacttcctggaggcgtggggggaagcggaggagggggcggcggccgacgggggaggggggctgtcgtttgagtgagcggcagactgcgaggtagatgcggtgctaggatcggggaagcaggcagagtgaggtaataaactagggtgctctttggcgtttcttgctgctctcgtgattgttctgtgtttgtgcaaggccgactcgagatgttgactcagagcttcctccccacagagcgcgctctcgcacgccaggcagtggtacgagccgccgccgccgccgccgccgccaccgccgccgccgccgccactgccaccgccgccgccgccggtggggacgtgaagcaccatctcttgcaggttcaccacagactggccgaagaagcagagggacttcaggtggctcctcgctgcctcctcgtcgctgaagcccgcctggcacttgcggcagaccaacttgtactgcacctttggaacaatgaaggggtcgtagagggagtccgcacttttgctttctgcttctggctcttcagggagtttcggcaggaggggggacacctcacggggggtgtttttctgttcttctggtttgggggattctttggcagggtctttgtctggggaaggagccccgggggggactggggtttggcttgctttgggctgctgctgctgcactttttgctgctgctgctgctgtagttgccgctgctgctgctgctgaattgcctcctgcagactctgctggtattgctggtactgctgcagtagggagcctggggacagccccatcag

SEQ ID NO: 29168 - DNA, 773 bp, Artificial sequence
  DNA replication origin
cgctgcctcctcgtcgctgaagcccgcctggcacttgcggcagaccaacttgtactgcacctttggaacaatgaaggggtcgtagagggagtccgcacttttgctttctgcttctggctcttcagggagtttcggcaggaggggggacacctcacggggggtgtttttctgttcttctggtttgggggattctttggcagggtctttgtctggggaaggagccccgggggggactggggtttggcttgctttgggctgctgctgctgcactttttgctgctgctgctgctgtagttgccgctgctgctgctgctgaattgcctcctgcagactctgctggtattgctggtactgctgcagtagggagcctggggacagccccatcagggcctgcgacagtgcagggctgtaggggaacaggccttccatgccatacataggctgcaggtacccgctctgcagggcgccagggatctggggagcataataaggagaaaagcctggtacaaagtaaggaaggaactggcttgtgagcaatgctgtggggtccgaagtcaacgcggcctgcagggcctgcagctgtgcagggtctaccgcatactccatggtgggcagcggggctgagatcgtggctgcagttgccgtgggggcctctcctttctccttcttggggacaggcaggggttcccctttccctttgtgtgccttttccttctcctttactttctcactgtctttgtccttgcgttgctgctgctgttgcagtgggagct

SEQ ID NO: 29169 - DNA, 2143 bp, Artificial sequence
  DNA replication origin
tgctggtattgctggtactgctgcagtagggagcctggggacagccccatcagggcctgcgacagtgcagggctgtaggggaacaggccttccatgccatacataggctgcaggtacccgctctgcagggcgccagggatctggggagcataataaggagaaaagcctggtacaaagtaaggaaggaactggcttgtgagcaatgctgtggggtccgaagtcaacgcggcctgcagggcctgcagctgtgcagggtctaccgcatactccatggtgggcagcggggctgagatcgtggctgcagttgccgtgggggcctctcctttctccttcttggggacaggcaggggttcccctttccctttgtgtgccttttccttctcctttactttctcactgtctttgtccttgcgttgctgctgctgttgcagtgggagctgtggtgtgggtggcggctgggctgctggcggcgggggaggctgctgcacctgtggttgctgctgctgctgctgctgctgggggggttgctgagggcccatcgccatcgtggcttgtgctggggttggggagctcagcgacgctgaggacggtttatttggtaatccagaagtggggaggccaggggaaggaacagttgtgctgggcagacccatcaagttcggcttaggagacgttaaagctgaaaggaatggagacagaaatcaccggtcagtctgggcaggggtagggctgaagctcaagacgttttaccggtgtcactggcacacagtttgagatgtcaaggcttgaaggatcctctcaaaacgaacatttccaacagaagtatcccaccaggctcagggctggacaaccttgtattctaatgaggactcagtcctaggtcagctcccatacttcccctttcagccaaacaacttccagaagtatcccaccaggctcagagctggacaaccttgtattctaatgaggactcagtcctaggtcagctcccatacttcccctttcagccaaacaacttccagaagtatcccaccaggctcagggctggacaaccttgtattctaatgaagattcagtcctggctagctcccatacttccccttccagccaaacaacttccaacaccttcctgcccaatgtgccacacccgctagttcacattttctttgccaagtactcccagctaccattcactctgcccaactgcaattagtctagaggccccaaagctagctgtttctagctggggcccatttgcaccaaaggccttcatcacaaaaatagtatggccacgaggtccccagagaagttatctggaggagagcggcaacaggagaagagagaacgaaggcaagaaagctagcacggccacatgaacaaaaacaaaacaggctctacaggtgttcctcctctctgacctctgttgctgcagctgactggatgctttcggagggtagagagaagatgatgaataggaaagtgtggaggaagggcctgggaagaaataagaacaatccattcagggaaaattgcttccatgccttggcccagctgacctgcttcaacaagtctactcaacagtataaccgcctaggaataggaatctggaatctgcgggagaaacgaccatcttcttttcctgcccctgtttgaatgatacacaggagggccagtgggactgtagatggttgagaaacaaccgcaggaaaagcagaaaagccatgtcagaagtggaatagcccaagatactgacaccaattcccaagacatcacaacctacccgaagcaccactgcctatggatagcaaaggtctgaccatatcaccaggccctcatgggctagaatcccatccttgatcatacccctaatctaccaccactccctgcaacgccttcaccaacccgagagcctaataccctccctgacccatagctatctcctggtttgagtcaccaggtccaaggtaatgcaagagggtgttgctacggatggtactccaagcttcaggtgtgttgagactagcaagatagtaggtaaggacagcatgggggtggggtgcagtgtgtgctggacgatgaaaagctgagaaaacaaagaggaggatcccacaggcaacagctctcagaacacctctatattcac

SEQ ID NO: 29170 - DNA, 709 bp, Artificial sequence
  DNA replication origin
gtagatacttctggtagagaatttctagttgttccggtgtgatggttgttctcaaacgcttgtctctctgaggctcttctcctcctgtcccactgtcgttttcgccagggcttgcactggccttttcctccagcttcctcttgagagtgttcattgtggaggttggagttgaaggagaagtggctgagcttgctggaatctgaggtatggccccagagagcagctggctggccaggagtgggttactgggatcaaagagcatgaaaggcatatccagggacctgtccaaaaactgggggtggatgaactggttctgcgcgctcaggaagtggagctgctgatgctcctgccagtgctcaaatgacggaaatgccaacttacactggtcacactggtaggggattagctgaggaggtaggtttgcgagctgttgaggagttgatgtgtggaggggcttgaggggcaggtgggagagctgggaaggactggggctcgactggggtaaggggcactgtggagggggcgcttgtggaggaggctgtggcaacgaaggcagggacaccagctgggggagcttctgctggggagtgttggtcttctgctcgggctgctcttgctgctgcagctctggctttggttgtccttgcttttcttgggtttggtttggctgtgcactgggagcttccgccagctttggtttctcatcgcc

SEQ ID NO: 29171 - DNA, 938 bp, Artificial sequence
  DNA replication origin
gttggattgagctgatgctggtagagttgggccaggtccgcaggcagaggctccacaggtcccagctgcgggggtagctgagccggcaaggtctgcagcggcatcgtctgcatcatcagcggcgagaagatgggcagctccatcggcatggagagctgggtgagcggcactgatggctgggccggtgcaattgtaggtgaggtgatgggtggggctgatgcggggatggctggtgtggacgccggctgaggcggcgctgccggaagtgggggtggagggggtggagggggaggtggtggtggctctggggtctggggcctcagtgggtacagtttatcgtagtggtctctgtactgtttggcaaacctctcgagctgtttgaaaggaaagtaattctgatgaacgtgctcttgatgactctttaaaatcaagatgttggaaaacaacttgccgcaggagtcacactcgagcttttccaggttctctccctggtcagtcttcccattctttttctgcaccttctgcttgttctcattatactggatgaccaactcaaagccaaagttctccagcagggccttggtggcgttccctctggcatctgaagcaatgcgtggagggagcatggaaggctcagaaccaccccctggtgccaactctttcttctctttggccttcaaggcatctggcagtgtttccttcggaccggtgttgccctctcccccctcggcgctgtccctctctctctggctttctttttccttttctttgatgaccaatttgttcttcttttcggggtgctggcttggctgaaggagggcagagtgactctgggctatagagagttggttctgctgctgctgcggcaagatctgctgatggctctgctgtgggacctgaacctgagccttcagatcttccagcaggcctgggcctgt

SEQ ID NO: 29172 - DNA, 1066 bp, Artificial sequence
  DNA replication origin
attatcccggtacccaacagccctttcctgaacaaacaatttctactgactgtcgaaacctcaaccactctagcaaggagaaaaattcttgaattgtggtctatcccatcatttgggaattgctgtttcatttatatgaggaggcagcgaaggagcagtcagatgatccagagaggagcaggtgggcagagggctttggaggggcttaggagggacgcctccaggaggaaatgaagctgacagaaaaactgatagagcagagcgttcagagattaggaaatgtctacttctggcagagtaaggttcgccatgaattaatcataggtacctagaaaaccagagaaaacaataagttgtacaagaaggtaaatgaaattataaaactctacatggctcagctgcgattaatatttatagttataataatgaaaacactgaatattaatataacccccaattattatttaatcataatggaaggtggagggaggaaggactgagtgtggagggagctggggagtgggagggagtccaactgttgtgtggggggtgcaggagtgtgcggggcagtgcctgtgtatttgtgggtagagtgagggtgcgtgtgggatgcatgtcagtgtgtgtggggtgtgtgggggtacagtgtctatgtgtttatgatgcttgcatgtggggggtgcagtgtatgtgggggaggtgcacgcagatggggcgtgtgggtgtagtatatggcttgtgtgggtgtgtgagtgtatacagggggtgtgtgtgtgtacaacgtatgtgggtatggtgtcttgtctgtgggctgtgtatgtgagcgtggatggaatgtgtaggatgcagagaaagtgtatgtgtgtgcgcgcacgtgcgagaacgtgtatgaggtatcgggctggtgtgtgtgccgtctgcgtgagtctgtggttggggtatgggtgtaggtgtgtacacgggtgggtttgtggaacagcacactggtgaaattctcatctgcccaggtagaaagccaagaggtaacatctaaaacttaaaaacaagaaacagtcgtagaagtatg

SEQ ID NO: 29173 - DNA, 1420 bp, Artificial sequence
  DNA replication origin
gcacactcccagcattgtgctccctccagcgcgctctcccccaccaaaaaccctgaggcctccggagtgtacactaaccacaagcctttgagtggctcatgtatttacaaactgaggcatgtcgaaatcaaaggggataccacatgacataattcgcattaaaatgtcaacaggctgacaatttatagagtcaatccacggaaggtggggaggactaagactcagtaattgtttaattcctgctgaaacccacggccactgtgcctttggaagctgggatgcgccagaggcctccaggctgcacagtgccccctggggctggcaccgtgccaaggccaggcaacgggtttaaccatttagggtgctcaatgatgtggaggatggggggaggggagggggaggggagagagggagggggaggggagagagggagggggaggggagagagggagggggaggggagagagggagggggaggggagcgagggggagcgaaggggagcgagggggagcgagagaggaaagggcttaaggggaagatggaaagagcgggtaggaggtaggagaacaggtctttccacaatgtgtgcccaattgacaaaatggcttgggttggtcccaaagagggaaagttgctgttgtacccctgatattccctttgctgtccatgcatccaggactggagatttgaatacatgcaaaagcgcccccaccacaacccctcggcccaagtcttggtttcctggctgttctctggcagcacccggctcaccaaggcaccctaaggaggggtcagcggtgtttatgataggcccccaaactctaggcccaagctccacagataagcaagaaccaagtcatgacccaaaccagatgcctgttcatataagattacccctggaagactctttgatctcttttacctccctcaccagtagcactgttctgatccacgtaagataaaatacaaattcttaggccagatatagtggctcaggcctgtaatcccagtagggaggatggcttgaggtcatgagttcaagaccaacctgggcaacacagcaagaccccatctctaccataaaataaaaagtttagctgggtgtggtggtatgtgcctgtagtcccagctgctcaggaggctgaggcaggaggatggcctgagcccaggaggttgaggctgcagtgagctaaaattgcaccactgcactccaggctggacaacagaatgaggcttggctgggtgcgggagctcatgcctataaccccagcactttgggaggccaaggtgggcagatcactaaaagtcaggagttcaagaacagtcaggccaacagggagacactccatctctactgaaaatacaaaaatcagctgggtgtggtggcacacacctgtaatcccagctactcaggaggct

SEQ ID NO: 29174 - DNA, 1455 bp, Artificial sequence
  DNA replication origin
tatggcaagaggaagcccatcctgatgtgtttcttgtgcaaactctcctttgggtacgtccgttcgtttgtgacccacgcggtgcatgaccatcgaatgaccctgagcgaagacgagcggaaaattcttagcaataagaacatctccgctatcatccaagggatcggcaaagacaaggaaccccttgtaagttttctggaaccaaaaaacaaaaactttcaacaccctttagtttccacagctaacctcataggccccggacacagtttttatggtaaatttagtggcattcgaatggaaggggaggaagctctcccagcgggctccgccgctggccccgagcagccccaggctggtctcttgacccccagcaccctgttgaaccttggcgggctcaccagctcggtactgaagacccccattacctcagtccccctggggcctctggcttccagtcctaccaaatcctcagagggcaaggactctggggcggcagaaggagagaagcaggaagtgggcgacggggattgcttctctgagaaggtagagccagccgaagaggaggcggaggaggaagaggaggaggaagaggcggaggaggaggaggaagaagaggaggaggaagaagaggaggaggaagacgagggttgcaaaggactctttccaagcgagttggatgaggaactggaggacaggccccatgaggagcctggggccgcagcaggtagtagcagcaaaaaggaccttgctctctcaaaccaaagcatttctaactcccccttaatgcctaacgtgctccagaccctgtcgaggggcacagcttctactagttctaattctgcttcttcctttgttgtctttgatggtgcgaacaggaggaatcgtttaagctttaacagtgagggcgtcagggccaatgtggcagagggcggcaggaggctggacttcgctgacgaaagtgccaataaagacaatgccacagcaccagaaccaaatgaaagcacagagggtgacgatgggggcttcgttccccatcaccagcacgctggctccctctgcgagcttggggttggggagtgcccctcggggagtggcgtggagtgccccaaatgcgacacggtcctgggctcctcccgctcgctgggcggccacatgaccatgatgcattctcgtaactcgtgtaagacactcaagtgccccaagtgcaactggcactataagtaccagcagaccctggaggcacacatgaaggagaagcacccggagccggggggctcctgtgtctactgcaaaagcgggcagccccacccccggctggcacgaggcgagagctacacgtgtggttacaagcctttccgctgcgaggtgtgtaactactccacaactaccaaaggcaacctcagtattcatatgcagtctgacaagcatctcaacaacatgcagaacctgcagaat

SEQ ID NO: 29175 - DNA, 1591 bp, Artificial sequence
  DNA replication origin
aaccatttcccgaaggatgaggctatgtggaaagtgttgatgatctgcgggtacacgggtgcagcacacgaagggtccccttgcttgccccccgcgccagggagagagttcaggaaaagcgaggggagaggcccactgccactgccactcccacaggcgcccccgccctgggtcagctggctcaggctctccacaatgtacgcggagccgtccggctggtagacgatctccccggccaggttctccacgtcactctcctcgtccccctcctcaccggtgtcgctggcgctctcctctctcaggggtggcggggggcgcgcgctggggcagtggtgctccatgtaggtctggaggctggcaaaggaggccgaacattcgttgcaggtgacctccttgctggcgggctcggaggggggcccggccgacgcggtgctctccgcgaggcgctcattgaagggggccctcaggctgtccaagggcccgtggctctcgcctgtggactgctccatgctactgggtttgtcagggaggtgggtgctgttgagttcagtccattgctggtgctgagggataccgcacccattgtccttccccgagacgacgggcgagtcacagccttccatggtaaggcctgcgtggagctttcattgcacccagtacggaggctcggacctgaagggcagaggcaaggggggaggagggagagaggggaaagagagagagaaaggaaagaggttaggagggccgaggctgaggtcctaccgcacggagcgctctaagaggcttctgtccacaacacagagacacagggcggagggcgggcctggggacactgccccacacggtccagcacacaggggtggcatggccgggtcaacagcctgagcgagggatatggggaaagaaggccaggaacagccctcttcggcttcgaattgtcaccgctctgcccctgaagactagcgggaatttccattctttgccagcatagcttcgatgggccacagtggagaacggacgcgtcatctctccagccctctacgaggtcacagccacagccctaccacttatggacagctcacacgaagtcagccccgactccgcgcactgtctgtgggtcaggggaacacaggggagggctgagaagagggaggttcaatgtccctggaaaaaggacggtaaagtgggataacgctcatggatttagaacaattgcagccgtcgcttttactgaccatggttctagtttgagaagttcaaagaaggcgggtgaggaccctgaggttcacagggcaggtgtacaggactagacacactccgaaaagtcctctccagatctgggaggcgtcagtcccattttacaagcagtaaaacagaggggcttcaatctaaaaactggctcagtgctaatctcaccaccatgaaacagaagaaaagatgggtccccagattcctgtctcctccacccataccagtcaagctccctggcctgtgactctagctgacttcagactaaaactacgtaggtgcaaaacgtgagcttggtatttccagcaggaatggaccagactctggatctgccaacaccccc

SEQ ID NO: 29176 - DNA, 1504 bp, Artificial sequence
  DNA replication origin
tgtgcgtccccgggtccctgcgggcgggcgggcgcggtcgccgccgagcaacccggcctgcgcccggcacgactgtagatgtcaggctttgcccggggagccgagcggcagcggggctgtgagtttcaaattaaccttccgctttgttgctgtgtaatgtggatccccgaaggccccccgccccgcccgccccccttccccgggcggtgcgcgctgcaaactgcgagttgggcttcatttacataaagcgattccgggcgggcggcggcagaggaggaggcggcggcggcgggcaggccggggacccggacgccagcgccgcgccccgtgggtgaatccccgccgcgtcccggggacctccctccggggacgggccgaccgccagccctgccgccaccatgagctcccctcccctgtctccgggccccctgctcctgaccagagccacctccgagtcctggggccagcgggaggtggggagcatgccgcctggggtgggtgagctcggggctcgggtgccactggaatttcccgttgttgcgcatggcggcgcggcccccggacctgcaagtgccgcctccctccggaggtgcgcggaggcttggtgtgccaggtgagtgcagcctccctccgggtccgcgcagccggcctggagccgcgggcaggtgctgcgagtcttggctgaacttcccattctcttggggcgtgtgggggaagggcaggctggatgcacttgaactcccagactccagttgccacctacctagggtgagagcgcctaaattctgctgggcacacagtaaagctcttccttcctccttccttcccttccctctgtcctcccctccctcctcctttcctgagtctgcttttggattagttcctgccttctgaatacttgtggtactggtgtcatttagaagtttgggtgcctccgcctaaaaatgcacccttttcagccctggagaagtcgctggtcagttcgaaacaatgtgaagaatgcgcttgtggagtaattaaagggagaatcagagttttggagctggagggcacctttggagatcatcttgtccaccctctaattttagttttttcgcactcttggaaaagtcagagcatttatttccttgggcaggggcggggtggggagctgatgcaaaggagagagtcaagatttttatcctgttaggaggaggaatgcctatgtttaggtcagtagcagaaaaacaataacaacaaaaagaagcattgtaggcttggagggaaacgaaccttctggaaaatgttcttttctgccttggacacacctgtgttatgataggaaaaggcctggagggcaaagactgcagctcacgcatggtgtgtgctaagagggaattgcgtggcacagtggtacctcctgtgttaaactggcttaagtgaaagccgtgagcaggtgaatccaggagggtcatccctccccccaccctctgtgtcatttaacagtccttgaagactccctaaa

SEQ ID NO: 29177 - DNA, 1304 bp, Artificial sequence
  DNA replication origin
taaataacagtgtgttttgaaaacaccacctgttcttgggcctgaagtcaggtggtctggaagcagctctgcagtgaccatagtctggtttgcaaactcatcctccaccttccctgttggctcttaactccccccacccggcccccgtgctctcacgtgtgactgaattgggcttgtgccctcctttgtccctaatcggacatgattccctggaggcagtcttttctcccagggccttagctgaaataaataaataaataaataaatttccccagaatctattctggactaaaatgtagaaaggggctgtctgtacccaacaggttagatacttacattaatctgaacccaacttacattgtgcaaaaagccttctatacggggatgtgatggttttcaccagctaagcatccctttttctcccgagtcagtgtgtgcctcatgctaatacaattccatacatactgctcttcgcctcatgagctgattatatttctaacacttgcatggttcattattgtgcccgaggaaaagactctccaggctgtaaggccagcctgggtgggtggttttcagaaagggtaaaagcaggtgcctttctgtgctgtgagaatcgggagtaaattcagactgagggtgggattctgacagggaggacagaggacttccggtgagatttctttggggctggctttcagatgagaatggaaaaaggtggacttggggagatagaaggcgcccagcaatcgctttgaccaactggaaaaggtgaacttggggagatagaaaggcgcccagcaatcactttgaccaactggggtggccgctttaaatcttaccctggcggtaggaactccctgggaaagggcacgatctttgctatctctgcggtgatgtggctttataaggtgaggctaaggagcctggaggcttacatggtagactgcatctccttttcttcccacttcttttcttcctatctttctagtgatctctccttttctctttctctggcctcaaaaactatccttaaactctcaacggagagcagggggatgtttttataagtttctgcaactgaaaaacagaagtgctctgtaaagcagttaataggatgggtgtgtgtttccaataaattcctgtccacattggctcctgtccccatgcttgagtggcctggctgtgacgtggacggggcccagggagcgatggctccggttcggaggcctcaggctccttttagtggccgagggcgcgtccctttcttctcgcccgattctaggccggcccctgacctttgatga

SEQ ID NO: 29178 - DNA, 1470 bp, Artificial sequence
  DNA replication origin
cggcgggaggaggaggaggagcaggcggcggcggcggcgggaaaaaaaaaagagggaaaagttgccacttacgcggttgcttctccggcggcggcggctgcagcggcgctgctggcgacggcggcggcggcgggagctggcggcgcttttaatcccgaaaagaggcgctcgggccgcggagcccatcaaggcagcagcggcggctggcgggggtcggcggcggcggaggacgcgctgctggcggcggcggcggcggcggcggcggcggcggagctggagcgcgctcggcggagcccggggcgggaggcggccgcagccggggagccggagccgccgccgccgctgccgccgagcagcatggttggcggggagtttacagcccccggagcgggcaggggccacggaagagaagcggcggcggcggcggcagcggctctaggctgtaattgggatgcaaagcaggcggcggcggcggctgcggccgggaggaggaggaggaggaggcggcggcggtggcggctgcagcggtcggaggggacgcgctggaagtgggagctgatgagtgaaaagaaaaaaaagtctttggatctttattctgctaattagtttcctgcaaaaaatggctgtgattaattcagtgcgcatgtgcttcattacccaggcacgacgggaagggctaattagccaccttctggatcaataagattcagcaaaaaagaaaagggggaggtggagggaggcagaggggaggaagggaggaaaaaaaaaaaaaaacaggggaaagtgatgagcagggcaaggagagcaggaagagaggatgggagaagagcctagaagagggagagaggctccaaaagtttatgcatgtattaaaaacacacacacacacacacacgacacacacacgagcgcgcgcacacacacacacacacacacacacgcacacacacaccgagaagtggaatgcataggagcaacaataggaacctggctaagaatctttttaagattttttttttcctttcttcttcccccccttctcttttctttcttattattttcccctttctctctctctctctctctctctctctctctctctctctaagcaaacgcagcaatgtttaaattaactaggaaaagagcatctccaaagaatgggggcattagtggagggggacagcttagagtaaaggtttaagtgaaagagcagagacttcgaatagagaccactttaaattgcaaatctgagattttttaactgaaggaaaattacctccccccaaatcagaggacgaatgaagaaaatatggagaaaactttaacacataccatagactagacaaaaaatatatgttaattttgtgttctgaaataagacgcaatcggtcttctctggttctttagaaggagagaggaagagaggaggggtgattagaagaaataaaagggagaaagtgaatcagaact

SEQ ID NO: 29179 - DNA, 1829 bp, Artificial sequence
  DNA replication origin
ccttctcgtgtctgctcttccgtccctctgcgctggatgttgtatagcgcaggccccttccctccccgcctctcgttcccaaaaccttatcattgagaattcgacagttgccccgagatgctgatcccagttcacggagccagcgtgcgcgtccctaatgcccggcacacccatctccatttcgggacccttttttttcctgcgggctctggactcccgggaggaagcctcgggccctccggctccccggagacaccggctgaggcgcttaggccagtgcagagtcgccgcactgggacccaggcgcccctcacaggtgcacgtagggcatggcccaacggcccctcggatgggcggggaaacaggcccgggcggagcaattcgatcaccccattatgcccctgcggatgcccagaaaagccacgaggcccgggggaccgccccagcagtggtctggaaaggagagggcgcggcgaggggcgcacctcgcgcccagggcccacgccgcccaggccccgtgcctgcctccccgtcaccctaactccgcacccgggactgctggtggttcccttctctttccgccgttctcgccgggctgcctagtctctttagggccacagatgcgccctcctccccccagccccgcgggatacggaggtgagagcactgagatggggaccctgaacccaactgcaggaggacgctggacccctatgtccccaggagccccttccagccaaggcctggggagggaaggcgcctctgcacccctcagccccaggtgcaagagctgggagtggagaacccccggggccctgctcgcctccaaggcagaccagaaaccgggcccgccaaggaggcgggagtgggtgtgtggagttagcgaagggccgtctggaggggtgcctgtgcctgcgtgtttggtgctgcacgtctccctccctctcattctgtctgggaagaaaaaagaaagcgggcagatttgagccgacccctctttccgcagcctgggaacgctgcagcaggaagaattgctcataacgacacttaagccccgacagttgaatgctaaaggttaaacttacagtcttcagggaagggcttcctgccaactggaacagtggtgcgcgctgccacgggcgctcctccaccccagcctggcccctccaggtacagttcacatcacggctcttggcatttgtgaacttcagcgaaggagcccctgggtgctggcttgtccctgcccctcatcttcagggaacctctccttcctggtctcccccattattttgcctgtggctggttgagacctcagtttgtccctgggatcctgccctgtgggtcccaactagttcctgctgtgcagttggaatggacccacctttgcaacaaagatgcacggttcacacaggtggacactttggagaaactgcattcatcccttgtccctttgcacagagcactcagtggcccctgcagcttggcacagataaaaccaaggctaatacactgaatttagtgcccagccttggaggggtctgcagagagacgctggctgtaaggaggcaggcgggggattgtcaggtggaaagcttcccccaaaggaatagccaagggagtctctattccacggaccaagggcccctcccccaacccaccaccaaatgatggtaaggttcaatttagcacccctaaaaagtatattccagtaggagatagatggtaaagagaatgcagttcagctctcaggagcaagggaaggtggctcttttcctacctccctagagagcccacatttgctgagcacctaccttgccttagctccctgc

SEQ ID NO: 29180 - DNA, 1292 bp, Artificial sequence
  DNA replication origin
gagttgcacgtgctccctccctccctccctccgctcaaggccaggagctgctgggacctgtggtctggcagtggggaaggcaggggagcctggtcagcagcagggtgggaaaacgtggaatggagactagaagaagagaagctgtacataaataaagaaagaaagcatgtttgaccaaacccccaacaccgaaatctcgaagctcagtggagcaggaaattgaatggctggactccgcagccttgcctggccctcctccccctacccctggcccagaagactttttaggcctccagacttttttttttttttttaatttagaaatctcaaatctagagagaaagaggaaaggtgtttttaaaagagtgagggctcaatggccacagatctgaaaaaactgaaaagcggggggcgggggggagggttggggggcggggtaggggagggagaaagaaaagggcacccagatgtgtgtgtgtgtgtgtgtgtgtgtgtgtgtgtgcgcgcgcgcgcgcgcgcgcgcgcaagacggtctaggaaccagcccgcaaggggaaaagaaaacaaaggaaagtgtgacatgagaaagacagagaaataagtggtggaaggcgtgagtggtgggggaggggaccgggcgctggagagaggcagagaggatggataccggaatgcaggcggcctggggagggagggaggctcacatgtgcgagagagagagagagagagacaatgatgtcagcatttccttctggattggtcacgtggtccttgccaggtaaacagactggaaatagactccataaaggcagtgcctgccgagggagggcgggagacgaatcccgcttcaccctttcctctctgctgcgtcctcggcaagcaggttttcacgtctgcgacaaggtggtctcagagtggaattgcattcttacaagtcaaggaatatgattcggagaggaaaagctattcgcttttataattagctcaaggggtttggaaacattttgattaaaaaaaaataatagaggtggggacaaatgtgaatctaagctcagatgctatgagtgtcttgggccagggatagcttatctttgtgtcttctttggaaggggctcagatggatctagattaaggatgaattgcacggccgcagtttagagtgaaaggatcagatgcaataattatcaacattaggaaacagaaaatgctaacagattcaatgagaatacattaaaagagtttgatacagttcagtgtgtgaccctggtgccccaggaaggaatggagacccc

SEQ ID NO: 29181 - DNA, 1684 bp, Artificial sequence
  DNA replication origin
agctgctacattaaactacgggcagttaaaactcaaaaaagtgtctattcttaccaggaataatgtagactcttggtttcagaatcctctgagacctctcacagataatccaaagtaccaaaaatgactagcccaaagtcttagtgagggtactatgggtactaactcaccaactgtgtacagtccccaagttagtctctcttgctaaacagtgaatcactaagctgtggataatgttacaccacaagtgtgataaaacgataacgatgatgataatgacaacagcgagcacggagcactgttaggggccaagcgtggctctaaatctgttacgtgtattaccttatttggtcatcatgataatcccatggcatatgcacaattactagcctattttatagatggggaaactgaggctcagagaagtgaatcattataatcccagaaccttggtcttagtcgctacaccgtgaccccagatgagtagaacccagaagaatgctcttctttctcattctttctggaaggctggatattccaaatgaaaaacagatagattaggttagggacaagagtaaaacacacattcacacacatacacaccacacacacacatgcacacacacatacacaccacacacgcacacaccatgcacacacacatacacaccacacacacacacaccatgcacacaaacgcacacaccatgcacacacgcacacaccatgcacacacaccacacacacaccatgcacacgcacatacacaccgcacacacgcacacaccatgcacacacaccacacacacaccatgcacacacacacaccacacacacaccatgaacacacacatacacaccacacacacgcacacaccatgcacacacacataacacatcacacacacacacaaacacacacacctctttatgtctttgggggtcagtgaggggtggggagggagcttggggaattagccagtcagtaataactgctcaaacaaaaacatccagaaaaaatatggcagtttagctgggaagagattatttttagctgctgggcaggaagctgttgagtataaaatgcagggctactgaaggatttcaacacaaaagggacataatgaaagctatgcttttaggaaaataaaactgtgatccatgagtatgagggcctggaagaagaaaagacttgaggtggaaaggccaatgtagaggggcctacaggaatgtgcagggcaggcattgacggctggagctggggtagtggcatggggacggagaagctgacagagaccctgtagaagcagaacaggtagagcagtgggtatggaagtcaagttgactgcaagagtttaacctgaatggctaacaggccgtgggggtctcatgaagagaaataggaaagctgggagaagaagggaatatgggggcggaagtgcaggcacagaatatgaggccctggtgagatgcacaggggcactgggagtttaagttcaagaaggaagtcagagccccatgcagaagcagcttcaaaagctcagggtgggaggagacgggctacggctgagtgttcggtgagaaaggggaggagcagcaaatgtagaaacatcggtcacatggactgacgatgaagaaagaagagagacgtcaggacaggttaaaggggcggaaggagccagag

SEQ ID NO: 29182 - DNA, 2072 bp, Artificial sequence
  DNA replication origin
aatatgcgcagaaaagcagcctccgcctggctggatctgagacagtctgtcacgtaaacacatttctggaagggacttcatacaaatgctttagacggggccaaccaattcttccctccgcggctcccatggtctctccctccctctctctctctgtctctctctctcacacacacatgcccctctccccctcctcctgcacgtcacacccatacaaataaataataaaaacagtaatggaacaacggccccagaggaaagctctgttaggaataaacctgattttcaaagctgcacaaaaatcatcaagcaaagtaaccttgtgaaaagcaacaattcagaaccctatagattgggcggccccaaattagggaaatggctctgtgaaccccagtcaagtacgttcttcaaatacctcaagctgtgaccttaagtacaagacttgatttgaaatcaaattgtgtggttggtgtacgggaagagtgttccagaccccggtctccttggtaaggctgtgtgggtcggtgtgtggctgtgtgggtgtgtgcgttggtgtgtggctgtgtgggtctctgcgtagctgtgtgggtctctgcgtagctgtgtgggtgtgtgggtctgtgtgtagctgtgtgggtgtataggtttgtgtgtggctgtgtggatgtgtgggttggtgtgtgagtgtgagtgtgtgggtgtgtgggttcatgtgtggctgtgtggctgtgtgggttggtgtgtggctaagtgggttggtgtgtggctgtgtgggtcagtttgtggctgtgtgggttggtgtgtggctgtgtgggtcggtgtgtggctggtgagtcggtgtgtgggtgtgtggttgtgtgggtgtgtgggttggtgtgtggctgtgtaggtgtgtgggttggtatgtgtggctgtgtgggttggtgtgtggctatgtgggccagtgtgtggctgtgtgagtgtgggtcagcgtgtgggtgtgtgggtcagtgtgtggctatgtgggtttgtatgtggctgtgtgagtgtgtgggttgctgtgtggctgtacgggccagtgtgtggctgtgtgggtgtgtgggtaagtgtgtggctgtgtgagtgtgggtcagcgtgtcggtgtgttggttggtgtgtggctgtgtgagtgtgtgggttgctgtgtgggccagtgtgtgggtgtgtggtcagtgtatggctgtgtgggttggtgagtggctgtgtgggtcagtgtatgggtgtgtgggtgtgtaggccagtgtgtgggtgtgtgggtcagtgtgtggctgtgtggggtggtgtgtgggtgtgtgggccagtgtgtgggtggtgggtgtgtggctgtgtgggtcggtgggtgggtgtgtgggccagtgtgtgggtggtgggtgtgtggctgtgtggggtggtgtgtgggtgtgtgggccagtgtgtgggtggtgggtgtgtggctgtgtgggtcggtgtgtggctgtgtgggttgatgagtggctatgtggggtgatgtgtgcatgtgtggctgtgtgggtgtgtgggtcagtgtgtggctgtgtgggtcggtgtgtggctgtatgggttggtgagtggctgtgtgggtgtgtgggtcagtgtgtggctgtgtggattggtgtgtggctgtgtgggttggtgagtggctatgtgggttgatgtgtgcgtgtgtggctgtgtggctgtgtgggtcagtgtgtggctgtgtgggtcggtgtgtggctgtgtgggttggtgagtggctgtgtgggtgtgtgggtaagtgtgtgggtgtgtgggtcagtgtgtggctgtgtgggtcagtgtatggctgtgtgggttggtgagtggctgtgtgggtcagtgtgtggatgtgtgggttggtgtacggctgtgtgggtgtgagccggcagcaggctcatgaaaatccaggaaaacaaacatccccattcaggaggagccctcctccaagccttcttgctgtcccctccgttcctccctctcacaggatagagagcgtccccagcatctgggccggcggagatggactgcctgtgcccccattaatgctctgaccctgcaca

SEQ ID NO: 29183 - DNA, 2270 bp, Artificial sequence
  DNA replication origin
tagctgggattacaggtgcctgccaccatgcccagttaacttattattattatttatttctagtagacacggggtttcaccatgttggccaggctggtcttgaactcctggcctcaagtgaccagcctgcctcagcctcccaaattgctgggattacaggcatgagccactgccaggccaggtgatcctttcttaatatcaggaaacaaagctcattttccttggctctgcatgccctctgaatagtacatgaattgtcggacagttatctttaaaaaacttaattcacacctttcatggtatgaaactctctctccatgtggggcttccataaacaaggttaatttcatggaatggaaaccataacttggttagctactctggtggtggtggcgggggttggtggtggtggtagctggtggatggcggtgggtggcggtggatggtggtgggtggtgggtggtggtgggtggtggatggtggtgggtggtggcgggtggcgggtgggtggcaggtggtgggtggtggtgggtggtgggtggtggcagtgggtggcagtggatggtggtgggtggtgggtggtggcgggtggtggatggtggtgggtggtggtgggtggtggatggtggcgggtggtggcaggtggcgggtgggtggtgggtggcgggtggtgagtggcggtggtggtggatggtggtggcggtgggtggtggcggatggtggtggtggtgggtggtgggtggtagtgggtggtgggtggtagtggtggcggtggatggtggtggtggtgggtggtggtgggtggtgggtggtggtgggtggtgggtggtggtggatggtgggtggtggtgggtggtagtgggtggtgggtggtggtgggtggtagtgggtggttgggtggcggtggatggtggtggtggtgggtggtgggtggtggtgggtggtagtgggtggtgggtggtagtgggtggtggtgaccaaattagccaagtgtgcagcagcaaatctcatttgaaaagcaacaagttcatcaactacaaaacaagactcttagatccatggaaaacacaaatagagaaaatcctcccactcattttatgtgtttctttatcctaagtggcatattaagctaaaacgaagtatagtgagctcacaccaatggctcagaaatgacacattcccttatggatgtgatttatcactgtttttactttttacagagaaaaaaaacatatttacctttaacatttttatttgagaaatgcaaatggtagatggcatcataatcataagcctacaaacctaaggaatgttgaaagttaaatatacatggaaattgtgctatgactctttagaaaggaaaaaaatgcatatgaatcaaataatgttgatttttactctctctttagaggagttccctgtttgtggctcacgtgactaaataatctgataagaggaggaaggctaaatggcaaacggcaaacatccccacctgatgtatttcctcagccctgaccttcagataaaaatcatacagaaatctgcaaaagctccaaatttgcagcaccacatgcctccaacattttcagacacaacagtcaggagaggaaaaaaaagtaagaagaaaaaaaaaagaaacaaaggtattgctactgaaaacagtcagccttttctcttcaatatctcaggattagggtcagatgaatgcaatagctgcctacgccatttcttcctctgtctgtgaacattcatattataggcacatatgtaatctacatatgtgtgtgcctatcatttttaagtgtaggtgtacccagtatcaagtgtgtggggagttcacataagatatattatatacatactgtgtgcatatttaggaagaaaaaagacttcaaacggtaaaaatttattgcactgtgaaattagctaaaattatgacaactgtaagaaaaaaaattatacgggcaaaatttgggtctggtggaagaattctttgatgtctggattccaatttaacccccgactgagttctaagaatcaaatgaacaaagtatatcatacaccccaagtctgcctgtcagcactagtcatcattttttattttattctttccagctgcatgtatttacaagactctgttctgacatttcctcccctctaaatgtacacactcactgctacgggcagttgccaaatacatttgtaaaacagttcaatcctgtgtttgtttattcattatgcctctctatcagtctcaataaatatgtaac

SEQ ID NO: 29184 - DNA, 1158 bp, Artificial sequence
  DNA replication origin
gtacgcaccaccaggcccgactaatcttttttggaattttttgtagagatggggtttcgccatgatgccctggctagtcttcaactcctggactcaagtgatctgcccacctcggccccctaaagtgctgggattacaggcctgagctgtgtaatttcatgccgcgtgacacagcccagtaaaaaggaagaaacccggcgggtccagcgtctactcacaggggtgggctgatggctgataaatcccagcaggagccaaatgaggagccaaaagcgcagccgcatgtcctggtcctttcagggcgccctgaggcggccaggacagaggtggaggtggcttagggcaggggggagggaaggggacggggaccggggccggatctaagttggggagggggaggggagggggaggggagggggaggggagggggaggggagggggaggggagggggagggggaggggaggggaaggggggaagtaagggaagggaaaggaggagaagggggctgttgggcacctggaggaggtggaggaggaggaggaggagaagaaaggggtctgggaaaggatccggttcaaattaagttctcaagcgctggtggaaggtttagctacaggtcacggagaagatcagggaagcaacaggacacgtggggcaagggagcgtgaggcttaggagcaattagagggagacaaaaaggttctgctatccaccaaaccttcttcggtctgggccctcccttagcaaccctggggctttatactccctctccaccaatccctgatgaccccggtggtgcctcacaatggacaatgccaagtagcgcccgcatcattccaatgacccctcccccatctcagtctcccacactcctcgcaaggacaggtcctctctggaaccttcacaaacctgatttctggtcctccccaaccagctccctgtccctgcttctgggctctccttccttcctgagctcccagggttcctcaaggtcacttttggcgacaaaacataaaaaacaaatgatggcaggatggcaggaagaacttcatacccaagcagagtgccaggttttacagcctccgctcagccattcatatcctaagcaacaaaacatcagcaggatgcggaaggtcccgatagtaaaccatctcca

SEQ ID NO: 29185 - DNA, 1104 bp, Artificial sequence
  DNA replication origin
aagtaaaggaatagggctgggcgcggtggctcacgcatataatcccagcactttgggaggccaaggcaggcagatcatctgaggacaggagttcgagaccaccctggccatcgtggtgaaaccccgtctctattaaaagtacaaaaaaaaaaaaagccggcatggtgggggcacctgtagtcccagccactcgaaagctgaggcaggagaatcgcttgaacccaggagacggagattgcagtgagccgagatcacgccactgcactccagcctgagcaagagcaagactccctctcaaaaaaaaaaaaaaagtaaagaaataaaacaatggctactccatagagcagccccgagggctgctggttgctcatttttatggttatttattgattatatgctaaagaaggggtggattattcatgcctcccctttttagaccatatagggtaacattctggcgttgccatggcatttgtaagctgtcttggcgctggtgggagtgtagcagtgaggacgaccagaggtcattcgcatcaccatcttggttttggtgggttttggccgcggcttctttactgcttgtgccggcctctcatctcatcctgtgacttagaatgcctccaccacctgggaacacagcccagtaggtctcagcctgattttacccagcgcctactcaagatggagttgctctggttcaaaggcctctaacagaagctaaacacaggtgggggctttcaaagaagcagatccaatgcccactgcccttcctcactcccctaatagatgtagggcaccatggacttttacagactgagggacatactctggatgagaatagtttaccctatcaaggaaaagtaagttccccagatgaaacgccacagataacaggcatattgtaagtcaggctttgtacgttttccaaaactcactacagggatcccctttgaggtgcagaatcttgtatcacaataatcacgattccttggccaaggccttttgatgtcatggtccgtgtttttctccggatcgttgggcatgcggaggcagaaggagagcctggcagagtgaatgacaaacgcaagggaggctgcagagggg

SEQ ID NO: 29186 - DNA, 1159 bp, Artificial sequence
  DNA replication origin
gcggatccctgccccgacgctgattcagggggtcaaagcctcgggcggggcggaccgcggcggtgactggaggcgccccagtttctctgggtgtggcctgcggaccccctcgggagcaggtcgtcccgcaccagtgtctgcccccggcccccagggacacctgcacccgccccactcacgacggcgcgtcaggtccccaaccaggcgtggggcggggtgggaaggtctcggttcggccgccccgcctgtgctgtccccaccgccccccggcctcgggcagcgcgctcccgggtcacccacctcccgcgggcacgcgcagggcggcccctccgggcgctgcggccgcggccccggccaaggggcgggtcccgggtctgggaggaagaggcgcggctgctggctgacccgggaaccagaccgagccggagagcgggccctcccgtctcccaccgggcaggaaggcctggcgctcgcaggcgaccttgcgccagtgcccgggcagggatcagggggctcagcgccttcgcgggaggtagagagagctgggggcatctgtgtgaccaccccgcgtaggtccgcgctgagccaggacacaggacaactgcccgcgcctggttagacaggcgaagccctgggaagcagtgggagagggaaagactgggccggcgcggggccgcatgcctgtaaccccagcactttgggaggcccaggatggcggatcgcttgagcacgggagttcgagaccagcctgagcaacatggtgcaaccccgtccctacaaaaaacacaaaaaatagcggggcgtggtggtgcggacctgtggttccagctacttgggtggctgaggcaggaggatcgcttgagcctgggagttcgaggctgcagtgaaccccagttgcacccctgcactccagcctgtacgacaaagcgagactctgtctcaaaaaagaaaaaaatagggccgggcgcggtggctcacgcctgtcatcccagcactttgggaggccgaggcgggtggatcacgaggtcgggagatcgataccatcctgggtaacacggtgaaaccccgtctctactaaaaatacaaaaaacaaattagccgggcgtggtggcgggcgtctgtagtcccagctactcgggaggctgaggcaggacaatgg

SEQ ID NO: 29187 - DNA, 841 bp, Artificial sequence
  DNA replication origin
caagggccaggttaagaccacatgcctcatgtccaaagaggtctcagaccttgcacaatgccagaagttgggcagagagaggcagggaggccagtgagggccagggagtgagtgttagaagaagctggggcccttcgcctgcttttgattgggaagatgggcttcaattagatggcgaaggagaggacaccgccagtggtccaaaaaggctgctctcttccacctggcccagaccctgtggggcagcggagcttccctgtggcatgaaccccacggggtattaaattatgaatcagctgaacctgtgcatgctcatttcaaagggaaattcagatgatccaggatgaccctggagagaccagagggggcctgaggcttcactgcagcggcctccacccacctattccctttcctggtcaccttcatggtccaggacactctctggaagttctgggtctccccaagaagaggaagaccagactctgcctcagtgaggggcagttctcatggctggggcccaggcaggcagggtattaatagaagttgctctgaatgtctgggagacgacgcgtgtgtgttgcccccaccggcggagtgtcatcgcaccagggccaatggtagtcagagcctgtgcagtcccgctccctcacccagctcctcagacatcacccacaaggggttatcactgtcccagtttacagcggaagaaatgaaggcagagagattgagtaacttgcataagatcatacagctgggagtcaaacccagtgagtctggctgtcatttatttattttttttcttttcttttctttttttttttgagacggagtctcgctctgt

SEQ ID NO: 29188 - DNA, 1400 bp, Artificial sequence
  DNA replication origin
gcagctgaagcctgcagctccacgcagttgccaaacctgcaggccagggtgtggtggtcaggaggcaagagtgaagtcagggatccgggagaggcctaagccctccacccatcaggaccctgcatctcaggggctccagtgcccccacctgccgacggggctgctgggagccaggcccgtccccaagcccccagccctgctccacttctcagggaagccccttcctgggttaacagctctgcctaccccatggcagcactcagccacaccagcctgtggggatggtggggattggaatagacagcccacttgagaggtacacctgggaacccaacaaggcccagacttcctccaggcaagaggccaggggcacaggccggctgttggcaaggagggctggctgaaatcgctggagcccttggtggcctcgcagccggaccacctccaccctggccctgggcattgctgggctttgaagagcagggtggggccacgtgaccagagggttcttgctacaggatggctggtgggtctgcaggtgcagggttgtattgtgaatgagtgcaggtgggtgacagctaaggaatgctggcatcagtgtaactgatgcaggcagagggcatgcagagggaggggtgagtggatgagaattggagggatggagtcacagccaggggacactggggatggacagatggatggaggcttcctgggtccctctctcccccacgtgacgtgccttccggcttgcatctccctcaccccaccaccggcccacaccagctgtgcccacaactctctggcacctgggcaggcaccagggaaggatcagaccctcaaagggcccagccaggcagcgggatgggggggctccaccaggcaggcccaagtgagaaggaggcccaggggagggaggcaccccacacttacccgtggttgtcaggctgcccaaaggcaaaactggtgaaggcctggtgctcccctgtggcccagcggaaggagtccttggcggtcttgtaggtgagccctgggccggggtagtcaaggttggcccactcagaccctggagtctgctgccagctgcctttctggcccctcttcccagcgctggcagcccccatgtgctccctacctgggccctccccgggaaagggggtgagcagctggccccgctctgggctccaggccctcaacacacccttgccatctgctggcagccgccatggcccagggttcctgcagcagggtggggcatcacaaccccttactcgccatacccccaatcagctgggcactcaccgatccagaagttcctggtctcgaagtcactgtcaatcacctcgttggtggtctccaggcggcccagatagaaggcgaggatgtcctgcactttctggctc

SEQ ID NO: 29189 - DNA, 884 bp, Artificial sequence
  DNA replication origin
cattagtgcaggatgaagttggcttggggtgcagccccgaggggcccccctccctgcatccactctgtgcttgtgagtcctatcctgcaggcacctccctgctccgtttacagatgagctcagggagtctcgggagatcaggggactgcaccaagtcacccaggggtggtgattgccaggccccttgtttaagaagagggagggggctgggcacggtggctcacacctgtaatcccagcactctgggaggctgacacaagcagatcacctaaggtcagcagtttgacaccagcaatggccaacatggtgaaaccccgtctctactaaaaatacaaaaattagccaggtgtggtgtcacatggctgtaatcccagctgcttgggaggctgaggcaggagaattgcttgaacctgggaggcggaggttgcagtaagccgggatttctccactgcactccagcctgggcgacagggtgagactctgtctcaaaaaaaaaaaagaagagggagggggcggggtcagctgtgcgtggtggggagcatatgaggccaggctcctgggggcaggagactagggcagagaggtgtggctgtagggctttttgcatcacaggagggcagcatggccgggtgggagcagtggagcctttctgacaatggccagggcccaaacacagaaccagtctgcaacgcgtgggcactgctcacatgaccagatgggagaaagacagcaggagcgggtcccactgcctgggcagggccgaaggatgcccacgacaggatttggagatggaggctcagtcgtgagaggagctgggctcctcctggagggacatcagacaacaccagtgcttcctccagcaggactcctcatccagtgctctc

SEQ ID NO: 29190 - DNA, 1034 bp, Artificial sequence
  DNA replication origin
cttggacaagggggaactactgtatatctaagcatgatggccccataccagtcccagagccaggcctggggaacatcaagagagtcgctttgcctctggcctgagcctacctggaatcctgtggactaggtctgtctcctccacccgaagacttttgggatggagccagcattgattttggagtcagatacatgtggctttcccactatttagctatttgaccttaggcgcattaatcagagcctccctgagcctcagattccatatcctgaaatgggaataacaaaacctgccccaggttgagttaaggacttaaataccatcgggagctggtactgcacagaagcgtgcagctcagcacacagtctggtccaaagtgctggtcccttttccttggcaaaactggctcatgcctttcatttcactcttttggagtcccaagccagcgtgtaggacaagaatataagggaaggtctgagaggttggaggacacagtccaccccagacatggcccaggcaaggccagggcggcaccaggaaacccaagctagtgagaagagttactgatctgtgcctctttgaagcagaagtgaggtgggatggggaggtgggaacaggttgagcccattatccaaacagaaacggagagtggttgcaaagagggagaggccgataagtgaagaggaaggaaagccgaggcgtatggggggctggggacagaaacgggaatccaggttgtcggagggcaggggctgcagaaggaacacgctggaaggaggggtgctggggaaatgggagagctggcacggaggcgggccaggcggtaagggtggaaaggaagagcaagttcctggagagaggaaggaggggttggaggggacgacagtgacctgttgcctggagagaagagagggaaagcgagggaagggagggcagaagctgtcaccttgggtcctgctagagggcaagtgaacggggctcgcccgggagtggaaggctgacggaggcctgggttggggtggggggccccggcc

SEQ ID NO: 29191 - DNA, 1594 bp, Artificial sequence
  DNA replication origin
cggcgagcggcgggcgggcgcggggaggcgccggaggaggccgcccgccccgcgggaggaggcggaggagggccgggggcgccgggcgcgtcccccgcctcaggacgccgcgaccatggacggcggcccggacccctccaggcctcgggcgggccgcggcgctgggcggccaggcgcagctcgggaagccgcggtcgcgtcgcgtcgcgctctcgcttcagccgccgccggccccgccagccgcgccgccccgctcggtcccgggctgcgctcgccggcgctcctcgccgccgtggagacaatggagggcggcagagcgcaggcgcggcccgcgccccctccccctccccccgccgggttaaccctttcgcggtccctgcggcgcctgggccgctgacgccccagcagtccccacccaccgcccgcccccggccggcctgtgacctgggcggcctgaccactgggcgttagccacagaaaccagatgtctttcaaaagcaaacacttcttaagtccccgaaagtggcaaattattcagggggaaccaagtatgggggaggggcagcaatggttcgagggggtgggaaggaaacaccgggaagaaggagatttactccttacgcctacctggctctgagggtcaccggtcgagctcccctcctggcacaaatttgcccccacagcaccctctggtggacgtgatgtccattctttcgggggttccccatccaagcacccctcacgtccggaatctcaacatttggcggggtttagttatttgggggtaaacagcgccatggggacacttgtgaatccggcgttttgctgacactagatcataacttcctattttgggcttaagcaaatgagtagattccttagctaaaatgtaattttcagaatcaatagatgtaccataaaaagtgaatagatatgggtatggaaatagaacaacgcagctagaagtgattatagaaaccttctgtccaaggctggagccctgttttgtttaccatgtgctgtgtttcggccctcaccacgggccaaggacacggtgggtactcaataggtgtattgttgaccaagcctgaatcatttgcaagggagtgttcctttgctacctcaagccgtctttctcctatattcacattcatttattgaacaactgttttttttgttttgttttgtttttgtttttgagacgtaatctcgccctgtcacccaggctggagtggtgtggcgtaacctcggctcaccgcaacctccgcctcccggattcaagtgattctcctgcctcagcctcccgagtagctgggattacaggcacatgccacactgcacctggctaattttttgtatttttagtagaggcggggtttcaccgtattggccaggctggtcttgaactcctgacctcaggtaatccacctgccttggcctcccaaagtgttaggattacaggcatgagccaccgcgcccgccctgtttttctttttcttttttttcttttctttttttttttttttgagacggagccttgctcctcccaggctggacaacctccgccttccaggttcaagtgattcttctgcct

SEQ ID NO: 29192 - DNA, 1100 bp, Artificial sequence
  DNA replication origin
attctgagtttgggatccccgcccgcccgcctgcctcttccgccccgcgggttttttccttttttccttttgctttttttccttttctccctccgggtctcctttttgactccctccccctttatgctcgcccagccctccccctgctgctgagaagtgggggagggtctcggcctccaggttcccgccccaccggggcccgggcgagcatggggggcaagcagagcacggcggcccgctcccggggccccttcccgggggtctccaccgatgacagcgccgtgccgccgccgggaggggcgccccatttcgggcactaccggacgggcggcggggccatggggctgcgcagccgctcggtcagctcggtggcaggcatgggcatggaccccagcacggccgggggggtgccctttggcctctacacccccgcctcccggggcaccggcgactccgagagggcgcccggcggcggagggtctgcgtccgactccacctatgcccatggcaatggttaccaggagacgggcggcggtcaccatagagacgggatgctgtacctgggctcccgagcctcgctggcggatgctctacctctgcacatcgcacccaggtggttcagctcgcatagtggtgagtccgcgggtggtggaggcctcggagggagggcgcgccggggcgccccaagccttcgcgtgcgtgccaaggtttgggaatgtagtgcacgaccgggatctgtctgcattccctttggttcccgatgccaagggataaatgggatacctaccgtctggaaactaggctttctgcgaggctgcggagcctggcgatttagggactcacggcgtgtgttcacttgtggaagggcagagcgaagcctacctattggagttccatttattggcatcaccctcctcagagaagaggtcgtgtctggctgagagcaagtcagcctgggtacttccattctgccactgcagcactgtgcctgcctcaccggtaacggagagatggagccagttggagcaagcagtgtctcctaaacagagtgtgtgaaaatgaaataaaatcaggggcaagtgatgcctggattagggctc

SEQ ID NO: 29193 - DNA, 2755 bp, Artificial sequence
  DNA replication origin
cagctgggccaaagtggatgggaccagggtttgctctccctgcctgaggccgactggctttgtggagcagaaagcactgggccagggaaactgggcccgagggaggccagcccagacctcagtgcctggggtcggtgtcttgggttccagcttcggcttctggccagaaatccctcatcacacagcctggtactcaccttgtgtgtccctgggacgtaggaagagtgcagccggctacaacctcacggggctcttcgtgggctccgaggggacgctgggcctcatcacagccaccaccctgcgcctgcaccctgcccctgaggccacagtggccgccacgtgtgcgttccccagtgtccaggctgctgtggacagcactgtacacatcctccaggctgcagtgcccgtagcccgcattggtgagctgaggatgggggcagtcagggtgggctccctggaagaggccccctgggaaggccaggcctcacctggcctgccatctccctggatccagagttcctggatgaagtcatgatggatgcctgcaacaggtacagcaagctgaattgcttagtggcgcccacactcttcctggagttccatggctcccagcaggcactggaggagcagctgcagcgcacaggtatgctggggtggagtggggcagcagggtgggctgcctcagtggcggcccggtgtcagccccccttccccaactgcagaggagatagtccagcagaacggagcctctgacttctcctgggccaaggaggccgaggagcgcagccggctttggacagcacggcacaatgcctggtacgcagccctggccacgcggccaggctgcaaggtgagctggggctggggtacagatggggcccacagctcggcccacaaaccctttcctcaacccaccactctactgcacagagcagcaggctgagcctcaacaacggggctgggcctggctgagcaggcgctagaaacaagggctgcagaccgccccacccagctgttcagataccgtctacagggaaagcacagttgtctgctaagccctcaaaagcccttcctgtgagccaggtcatgggaacggtgcggtgctcttgggagctgtacatggaaggaaggcttcctggaggaagagatgatagagagggggatgttagcctaacctggggaagggaagtctgggctccaggcagctatgcaaaggctcagcagcctggggcttgggggtgggagccacaggggaggtgtggcaagcacacctgggccattggtctcctgtgttgtgtcggggggaggtgagggctgaggcctagagaagagcaggattatttccttgtgtgaggccaagagctgaagcccagtgccctccgacccatcctcagccttgaccacggtgaccccgtacacccaatcaggcaggggtaactcataggcttccctctgaccagggctactccacggatgtgtgtgtgcccatctcccggctgccggagatcgtggtgcagaccaaggaggatctgaatgcctcaggactcacaggttctgcccaccctgctgctggggagaggtggggaggtgtcagggctgatcagagcctggggcagcaggaggcaagaggaggactgggctggagaatagttctgtcctctgggcccccaggaagcattgtcgggcatgtgggtgacggcaacttccactgcatcctgctggtcaaccctgatgacgccgaggaactgggcagggtcaaggcttttgcagaacagctgggcaggtaggagcaaagccagggaggggaagagctgagggcagaggaaagggagccccctgaggatgtctccttcctgcccccaggcgggcactggctctccacggaacgtgcacgggggagcatggcatcggaatgggcaagcggcagctgctgcaggaggaggtgggcgccgtgggcgtggagaccatgcggcagctcaaggccgtgctagacccccaaggcctcatgaatccaggcaaagtgctgtgaagggggtctgagcacttagcccacaagttccctgactacggagccggttctggaacttttcttcatgccacggcccctgcaaggaaatagatgctgaggcagtcttcctgccagcgagcccactgtatctgggcccaaggccagagggcccagagagaagcctgagcaccgtgttacctccctggccctctggctggccccaggagcctttggttcagtaaacgacccagggtggttcccagcaaagctgcttcctctctgctcctacgcatcctgtcctggcgggaagagagcgtctgggtccattcaagactctgatgacacccctccccgaggcctcccactgccggggtcccaggacccttcccccttcacctggtgacaggaacactcctttcctggtatggaacgtgagctcccgtgacatgatgataggtcttctccttggggcctcccccaataaatctgtaataaacctgaaacccacctacagctacctggaagtcagcaggcagcacttcctcccctccccctccagggtctctgtcctttggtcagtgacccctttgttttggggctgtcctctgacttcttatagcctggggaggaggttggtgctcagggttcggaaaggaacccaggtccctgtcccagctactccgcctcagagctgaggacctgcccacggcacatgtcactcaggatgggctccccaactgggcctga

SEQ ID NO: 29194 - DNA, 1415 bp, Artificial sequence
  DNA replication origin
agggacacacaaggtgagtaccaggctgtgtgatgagggatttctggccagaagccgaagctggaacccaagacaccgaccccaggcactgaggtctgggctggcctccctcgggcccagtttccctggcccagtgctttctgctccacaaagccagtcggcctcaggcagggagagcaaaccctggtcccatccactttggcccagctgacagggcttcagagcctgaggaagcctagcctgccaaaccagggggccgccaggaggtgcttttcacagcccggtctctgcagggcagcccgccagcagtgcccagggccagagcccgggccccccgcagagggcgctcaccggaaatgccggcctcggcccgccgtgtgcagcagccgcccgtcgggcagcaccacctccaggttgagcacgttgtcccgcatggtgccgtagcggaccgcgttggtccccgacgccccggtggccgccatgccacagagagaggcgtccgcgcctgggtctggagggcggcgtacagaaggcagcctcagggaccggaggtcctttccctcgggctgggggaggaaggtcccctgaaccccagacacagccctgctcccacggtgccctcagggtcccaggaaaggttcgcgagtcctacccacgggaaaccagaggccgctgtcccgcaggtgggcgttgagggctttgcgggtgacacctggctccaccaccacagagaagtcctcctggttcagctccaggattcggtccatatgcgtcaggttaacgcagacgccgccctggttggggcaggtgctaagaccactgcagacctgggtctctgacctggccacgtccccggaccacaccccgcgggtgtccccccagcagccagaccagacccccagaggcaggcagcccacgggcgggagcagacccaaggtgccgtgtgtggcgggggaggcagccacaggtgtgccaaggtgtgctgggaccatcctcgggccgggcgagggagccccactgtacctgcacagcacagacgccaccctcaagcccggtgccggtgccgaatgggatgatgggcacaccttggcgatagcacagggctgccagccggctgacctgctccacgttctggggccacaccacagcatcaggaggttcgcacctagaaccagaccctcagcgatttagcggggcgtgacaccctctggtcccgaggtgttgcagggcctgaggctacagcaagcgaggggcagagaacatgccagagcaccccaaaacagatgagtgaggaggaaggcaacccagcaccctctctctcagctggggttgaatccagaagacaggggaggggcccgcgaaccctcccatacctgtgcaccgactcatcgcgcccgtgctgctctcggaccacc

SEQ ID NO: 29195 - DNA, 980 bp, Artificial sequence
  DNA replication origin
ggctgtgtaatcctagcactttgggaggctgaggcaggaggatcacttgaggccaaacttcaaggccagtcgggccgcatagtgagacccaagtctctatttatatattaataaaaattgttttaaacttccccccaactctagcctgcccaccacccagggtcccccccaccacatgggcaggacctctctgatctgcagggacacctgccaggcctcggagctggagttggcatcctccccagaacagccggcagttgatggtgtcctgaggtgccactgcagtgccctcagccccctcccctgaccgttgtgtacccaagggagtgtctgtccccttctgagcccagggtgctgggacatggtggctgtatctccttgggtccctgtgctcttgaggactctgagtcagtggctggggtggattggggtgtggggcccgggggcacataaacccaggaggccgcccaagtccagagggtgcaggggctgggggtgaggggtgggcaaaaggcgtggatgcaggagcccctcaggaggcagaatcgtagggtgtggagggtctgagggtgcgggggctaaggaagggaggaaacagatgccccaagcacggccgagggggtgggggtagcggccagaggggcgggggccagctggcagggtgtgaggaggaaggggaggacgatctggccacggaggatgtggtgccttgatgaaacatggcacggcgggctttttgcttctgggcatttggggctggggatgggcatgtttgacctggggctcccggcctgcctgagcctcgaacttttaagagtcattgccatagggctgggcgcggtggctcaggcctgtaatcgcagcactttgggaggccaaggcgggcggatgacgaggtcaggagatcgagaccatcctggttaacacggtgaaaccccgtctctactaaaaaaatacaaaacaattagccgggcatggtg

SEQ ID NO: 29196 - DNA, 1180 bp, Artificial sequence
  DNA replication origin
tgcaccagcggctcctgtggctcagaggggctacgccagctcccagtcgcaccggcgctgcctgccaggtccagaaggtgggcaacggtggcgctcacaccctgctgcagccgtgccagggcctccacagcaacttccagctccaggggttcccggcccggccctgccacctccaaggaggacgcagactggctgctgcgtgtgctgccggtgctggaggccgacaggcgcttgccctctgccggggcttcacgttcagctgggggaggcaccgcatacacaccactgtcgaccacgccaccatcagccacctcaggaggaagcacccgttcacggggcacatcgtacagggtgcccgggccaggccgccgcaagccagggggcacgtcgtagaggtcaggagccgggggcggcacgtcatacacgtcctcggccggcggggagtctggagggggcgcagccagtaccagtggggtgcgggccgggtcaaagggcttggccttggcgaaggcggggggcacatcgtaggtctcctcacgcagcagtgggccatcgggcacatccttgctcaccgatggaggaacgtcgtagacctgggggacaagcggtggtcaagactgtccatctgtccatctgcccaccccagggactgggggcagcacccagccacacacacacacacacgtacacacatacagacacacacacagaggcacgcgcacacacacaggcacacatacaaatgcagaggcacgcacacaggcacacacacgcgcacacacactcgcagccctagcacacacatccttcacaattcctatccatgacagctctgggacgagccggctctggagccaggtgaccacccctgtgcctgaaggtgggagagcttcctcccaaagaattgcatgtgttaattcacataattgtgtcactgcagacactcactgaaaggttagctgtgatactgccactgccaccaccatcatatcatgatttcatcaccatcaccgccgctgccacctcatcaccaccatcactgttaccacccagcaccaccaccacgtgtgaactttctactctgcagcaggtgtgcgactgagctctgtgtgtattatcaggggaccaaattctggtttgcccaggacagtgctggtttgtccctgatgcccccacataa

SEQ ID NO: 29197 - DNA, 846 bp, Artificial sequence
  DNA replication origin
ctgccctttgggatgagcaagcccccaaaggccttcctgggttcctctggtgcacgtgccctggagttacccttctgaaggaggtagacttgtcctcctgtcctgggtgcctggggtgcaggggtgtgaattgggctatgtcaagatatgctgggcagtactgtgaggtgggggcagaggggagaaggtgtcccaggaggagccttcctggaggggatgatagtccagcatgttctgaagtgggagtagggtgcggcaggagtagggtaccagagaatgagtgagtcaggcagcagcctccactgcgccttggacacaggtggctgacagtgtccacctggactggctttgcaccccttctgaggtcacagttgtgtcccttgaaaacttgggcaggagcacctgactggcccagcttgggtcatgccctaggcccagcagtgcgggaggccaggaaagtaggcttggggaggctggcctctcctccagtttgaagcatggcaggggttccgggggaggctgctggggggcctgcgagcatgtccagagcaggaatgcttggggtggtgtgtgctttgctcgtctgggcttatctggccgtggggaagctggttgtgcggatgacgttcactgagctgtgcacgcatcatccatggagtctgcggtgtgagtccttttgccgctccagggtcacagcctgcctccctgctccagccccctggctgaggcccttcctctgccccatgctcttctcagacaggaatcctgtggaatgtcatctctttggggaggccgtctctgaccctgtatgcaaaggccttctcccacattatttttggcacccca

SEQ ID NO: 29198 - DNA, 918 bp, Artificial sequence
  DNA replication origin
ttgcgggtgctgaggtcatatttgctgggtgaaagggtgcaggccagatatgagccaggcctggcagagagggttttggtcagcagtgatacctgcagtgttctctgcagttggtttgggctggccctgctcctgagaactcctgggttgtcccttcaggcaaccagggaaggctccttggagcagcagcatctccccttaccactcgccgacaccagcttccgcctgacccagagaaggagtttggggacagccacagcacgtccagggctcccaaggcagctggcagagccaatgaggagaccccaacacccatccgacggctgcagctctccctgacgtgtgtcacccgcagccctggtcccagccgctgtgcttctcagggcctgcctgcccagcccgggtggatatggtgcccaggcgggccccggggacacaatgagggccattctcagagccaggcagagcgtgtggggcagtcctgtcagtcctatgtgcaacagctgggatattgtttagggagtgctggcatcaggctggggctctcctcctctggccctgccctttgggatgagcaagcccccaaaggccttcctgggttcctctggtgcacgtgccctggagttacccttctgaaggaggtagacttgtcctcctgtcctgggtgcctggggtgcaggggtgtgaattgggctatgtcaagatatgctgggcagtactgtgaggtgggggcagaggggagaaggtgtcccaggaggagccttcctggaggggatgatagtccagcatgttctgaagtgggagtagggtgcggcaggagtagggtaccagagaatgagtgagtcaggcagcagcctccactgcgccttggacacaggtggctgacagtgtccacctggactggctttgcaccccttc

SEQ ID NO: 29199 - DNA, 1140 bp, Artificial sequence
  DNA replication origin
cccagcctcttagggacagtgcctgggatgccctggctggagtgaggactggggtgtgctttcagcccatagctggccctgggcataaaggcatctgctgtggtgctgcagccaaggccaggctgtgctctgtgcttgtgtcggggagcccttggcagtggccaccccacaggtggctttttattccctcctgctgctgagtgtcacgcgtggggctgagggcctgcacgccttcccggcctcatcctctccgacgattcacgccctcctaaggctggcaggataggagccatgctcccctggggtggctctggaacgtgggccccgtgcacaggctatgtagtctgctcacacccttgctgcctgccacccgggcacccaggacttgagcccagaccctggccaccctgttgttgtgggagtattaggggaagttgccactaaggctggcaggtcctggagttccacccaggatggggacatgggggagggaagaggaggtgcccctcagagcctgaggccaggaccaagtggggtgatcaggacccctccaggtgggtcccgggtgcggatggccagttgggcgcatgcttattgggcctgcatccgttggccacggaggctctttgggacaagcaaatagaatgccccagaaataaacttggcccaagtttgtgatggttctgggtatgaaagaagtcagtgtttcccaagtgcctgctatgtgcgaggctctgtgctggggcgggtgcatgtgtgcgttgggggcgtggacaggaggggtgggaaaggcctgtgacatttcctctggtggtttccacgaacccaggcgtcacccctcggtggagataaagtggagccacccagctccaccgtgtctcagcctggggtcggcctctgctgcttctggactcagtgaccctgggctgtcagggagcttctgagccttggttttcctgtctagtaagatggaggtaatcgtgtcttatggggttgttttgagggttaaatgagctggtggctgtgtgggaaagagctctgcctcccgcagggaggaactgtgctgttcttattattgtgaacttagtgacaagtgtggcactattacccatttccttgtctgcccccaaccctggggtc

SEQ ID NO: 29200 - DNA, 2608 bp, Artificial sequence
  DNA replication origin
caggaaccgcgggggctccggagcctgtgcgcctcgggtgcgttggcggggccgggcgcgggggccgccagccggtaggagggttcctgtgtcgggaaagtggctggcggggcccgcgctccccggccgacggccgcctgctgtgtcaccttgggcctctgcgccctgcctccgagcctcagtttcctcggctgcgaggaggggccgttgagcctctggcgggtggtccggctggtgtggcgtggggactgcccaccggctcccggagagggaggagctccgggggaccgaggccgggcgggcaagtgcgtggcgccagcggggaaggctgcgcagccggagcacccggctccagttaatgattcactccggccgccggcgcggggttccgggagcggagcgggagtgggggcgggcgcgccgcgggctttgcagccccgcacgccgagcgccggtggaagccgggtcctggccacaggagtcctagccgcacgcgagtgtcgcgggagggggccagggccgggttctgcagtgtggacatgaaggctttggagtccatggttgggggacccgcaagagctagagcagggtcggagctccctctcgagggtccgagaggctgatcgctggaccgaggtgagggagttgggaaagcggagatttgcctaggggtgcggggtgaggggcttacggcctggaagatgttggggtttcgagttccagatcggggacagcagctccttttctaccacaaggctcccgttccctcctgagagtccctggtttcctttcccacacccctcccggggcccgccgcagctttggtcaccttctcagaatgaccatgggttgatctcttctttgctagtgagatgtttcccatcgccctgggccgggacacgccccctcttgtgcccattcctttccctcggtggagagttgggtggtgggggctggccggcctgtgagagcaggtgtcggggtgcctggagaatcggggcccaggtacgggggtggcggggctgtggggaaaagagctttggggaggagctgctgacacttcctcctggcactgcttgcccgggagctgggtggaggcagggcagggcagggcagtcccaggttctgccaggaaagtcaccttgggctggggcaggaggcttggagcttctggccgttactgtttgtctgagcaggagggtgagcactgtgtactggtaccatggccccaggtctaggcgagggatggaaataaggacagtgccactagggcctcctgtctgtacaggaggggccctgagacagctcctcaaacccctttcccattatacggatggtgcagatggggacactgaggtacagagagacagtcagttgtcctcagaattggatccagaacctcgtcttctggcatggccccccagtgcagcaccacatgtggcctccgaattcccagtctgggattgggggagctctggtccttgggggaccaccatgctcttttggagttgtcaacttggtaggaaccctctggttccaacgctgtgcctttgcggccctctcctggcatctgctgtccctttaggaggtcctaccacccttttcttctgagcctggacaactccttcccttgcccccaggagcccacagccggctaaaccaactggtcagctagaaccaaccagcaggggaggtgcgctccaggggggcttctaagaggaggcagttttggagtcagaggtgaagtgtggggagtgggattgggtgatagggaagtttctccagcaaagacactgggcaagcctcttccttggcccccagataaagggctgcagggtggtctccgtgtaagagggtggggctctgccctctgtcaggcccttcctggccctccgagcacaggagaggccctggctccacctgtgtcttgcttccctgacttcctcccacctctacattctagcctggggcagaagtagggtggaggggtgggtctagcctccttgatgacacagttggggttggaggtgggggctacccctattctgggcctggtgctgtccctgaagtcaggggtcagcctcacaccgagctctctgccaaaaccccggatcacaagcatgagctccagcaggtccgcttgagtgaacaccgctgatcctgcctgcaggggtataggcctggggcctgccagccgtccgcactgtctgtggggtgttttgggttgcaggttccatgtcctgaagcaggagagccctccccatgccacctcctctgcccagcctcttagggacagtgcctgggatgccctggctggagtgaggactggggtgtgctttcagcccatagctggccctgggcataaaggcatctgctgtggtgctgcagccaaggccaggctgtgctctgtgcttgtgtcggggagcccttggcagtggccaccccacaggtggctttttattccctcctgctgctgagtgtcacgcgtggggctgagggcctgcacgccttcccggcctcatcctctccgacgattcacgccctcctaaggctggcaggataggagccatgctcccctggggtggctctggaacgtgggccccgtgca

SEQ ID NO: 29201 - DNA, 1905 bp, Artificial sequence
  DNA replication origin
gtggggcttaacttctggggccttgtttccaaagcggaaatgccattctgggaggcacaggcttttgggggagggaatttaagtggaaaaggagcaaatttttgaaatgcctgtgtcggagcctgtttcccttgctgcctcctgctcacaccagcagccccacccccagtgctgttctaatgcagctactgggggaggagggtctcatcccccaaggttccagccatccacctcctctctgcaccgccctccttggccaactaggatggagcaggggccagctcccttgagggccaggccttttgtgtccttgcccgtccctgcagagactgctgcctggggccctgccagcagggcactgcctgcccatgaggcctggtctcccctccccacagaagtggaggcccagggatgacctcaggctcctgagggtcccgctggttcagacctgctctctgggaagctggtgtgccagccaggctgaggagtgggtggctggacagggtcagggtgcaggaggggcccggcacagctcttgggaacaagcaggaggagatgctccaggcagcttccctgaaggctggctcctcttctgaggcgaggcgggctgtgtcggggaggcacagggtgttggctagctgttctgttcctcctgaggactctgggtcatgctctgtctcatcccactgctccttcctcacccgctgtgctgtgagttctggccaatgcttcccaagccaaatattgaagaaatgcagacgtccagttttttgggaggggtgggacacaggagtctgttttttaactagctccccagagcacctgagcagcaaatcatgggctgtcctagccccttttcagatgagaaaggagcccagagaggggagagggcctgccaaggtggcacatctggccaggcgctgcgtaggctgagccctgggggtcagacagaggggcagctgcaggcccacctgggcttgtgtcttccataggccatgcttgagaattctctgctgcgtgaagccgggtctaccccgctgcttccctgccaccagggctgcctcgtggcatcccattgctcagccagtggcccaggattgttgactgagggtcctgtctggtctggaccaggctcggtcctatcatctccctgcagattgtgcctccctggcctggcccaggggctctggcaccctggttctgctgcatggggtgacagtcactgacctgcaaccgagcaaggggcaactcaggagagccaaggttgtctccactcggtttcccccgagtgattcttccttctatctccctcattcccccagtgccgctctcctaccccatgtcgctgaagcagatgagttggagcaggactcaggagggtactaggcccaggttttaggctgaacctaggaatgagtaatgagaggaggcagatcagctggaggaccagcccgagtccccagatgtcggcacaatgcaggggaaggtaggtgctgcccgtgaaaagcgctgggtcgagagctcgccagcctccctgcttgaggcttcatttcctggggtccttacacggtgggaccgtctacagtcggagctgtggtggtgatgattcgtctcctacaggctggggcacgccccctcccctttccctctagattcagatttgagtcccacggcccatggacacgcgatgaatgccctggggttggttagcgggaaagacaagtcgacttgaggccatgtctcggctctggaggaagaaggcaaaccgggcagccttcccagaagtggaggagtttgcgtaggccttcggtgcgttctcgcctgggtggaaggcggggacgtgcatttgttggagagcggtgtcctgcgccctaggctggaagcctggcctcgggcaggggcctg

SEQ ID NO: 29202 - DNA, 1334 bp, Artificial sequence
  DNA replication origin
tccagaagtggtaatgtatttacagatgaaaaaatgagggcttccagactgtgctgatgtgagccccgccatccgttctggttcagagcataatcgtctcgtcttcagaaagaaggaagacagaacatgcctgccaagcccttcctctcttctgttctgctctcctggaaagttctggacttctctggcccagggcctcaggggactggccagccctgctcctgtgggcactgggcagagggacaaggcggaccacctgagcctgctggagggccggtatcccagggcagtagtgattagggaatgtcactctggccacatcccagcctgggcgggcctctatggggaggtccccgtttgatttggtttggttgtccacagtcagagccaagctctgggcatggagtctgggatggcaccctgaccccttgccttacaggactttgggcagccttctttggcactgtgcctcatctgtaacaagagaggaacagcgggctgggtaggacttggacagataggcactgtcgtggggacctgcagcctggccacaccatcacgggctctgagtcatctcctaccctctcccttgtagtcacagcccaggagaattctgctgggggtgggcagaggtctttgccatctgccccctacgtggctggctggcagatcaccgtggctctctctcctgggaccttgggcagtgtgtgaggtggtggggccaagaggagaattcatttttggaacagtcttgaagtgttcggaaaattgctttcatgtgctgaggaggccctgcggaggcttccagactgagctgcctgctcaagccctgcccttggaacccagagtggcgactgctcagggacacgtctgggttttaagcacacccatccatttgggcagtcttttcctagatgggctgacgcagcaggcactttggcccacagaaattataagatgcttcagaaggggatgggaggggaagcagggtgagagattggtgggctggttgtgcgggtagcgaccccctgagtgttgggggaggggagatgccggggatcagctggtgtcaccttgtcatttgactcacatgcagtcccggacccagagaggggaaggagccagggcgtccctgctacctgctcagtgccccttcctctgctccaggcatagagcagtgcagtgctcgtgtgctgcctggacaccctgtgggtattcccatgccttcctctcgcccagcgctctgggcctgactcttcctgcagctgagaggacacatttggaaggaaatgtgccacccacctcagacctctggctggcattggcttgggagt

SEQ ID NO: 29203 - DNA, 1736 bp, Artificial sequence
  DNA replication origin
tccgggaacgctcaggagccggaggagccggaaagcgccgggacccctcgcggggcctctgagcggcgcgggcggacccgagcccccagcccgctggcgccgctgcccgccaggccccgggggcggcggccaagatgtccgtgcctgtgagtaccgcgccgcccgggaccccgggccggctgtcccccgcccggctgcgacctcgccccgcccgctgcgggcctgatgccgcgttggctcccggactgggggtcgcctcactggggcctcctcggccccgggggagagcgcaccggctgggggaggctcccccaagccggcctctctgcccccgcctttccatcctctttcaggagagctggatcgggctggggtccgtactgtcccctcggggagccccccaagatggctaggtcgggaagactctttgttggtccccgggaaacccctgggacagctgggccaggcaggagtctgttgcccgccaggaccccgcaccaggacggctaggcctagcggggaggggtctctgccgctcccgcgactcccctccgggactgctgggccggatgagggggtgggaggcctgtgctgtcccgcaagacctccctcggattgctgccctgcggcgctcccgggactcccccggggtggccaggttggggcgcggtctctgccagtcgccggagccacccctcccccaggacggcttggctggatgggagccgtgcctgccctccacggcggatgggctcactttcctgggaagttttcctctcgctgcggaacccccggggccctgactggccgcttcctccccgctggccgtagggagttttctgtccgacaccccctcttcctggccgggcagcctggcttcggcagacccccgggccatgtttccacacttgggcactggcatctctgagcatctcagtctcacctcctgagaacagcaagtgatcctggctaccccgggtaaccaggcctcaggtgcaggccccacatgacagatggacagactgaagtgggaggtgggaggcggacaccccggcgtcctgccaggaagggacaccatctgcacctggcgagctgtggcctccagccatcgtttccctgcctagttaggggcttttccctccagagccctgtccactctggccttgtttctggaactgctcctcacccggaggaccccatcctttccgtgaagcaggcagtgggggctttctggcaagtggcctcttcattaactatcccagagtgagtgcagatgaccagagggaagctggccaagtgcaaagcattgttattgtggaattaaagagcccgctcctgctcgcctccagaagtggtaatgtatttacagatgaaaaaatgagggcttccagactgtgctgatgtgagccccgccatccgttctggttcagagcataatcgtctcgtcttcagaaagaaggaagacagaacatgcctgccaagcccttcctctcttctgttctgctctcctggaaagttctggacttctctggcccagggcctcaggggactggccagccctgctcctgtgggcactgggcagagggacaaggcggaccacctgagcctgctggagggccggtatcccagggcagtagtgattagggaatgtcactctggccacatcccagcctgggcgggcctctatggggaggtccccgtttgatttggtttggttgtccacagtcagagccaag

SEQ ID NO: 29204 - DNA, 1583 bp, Artificial sequence
  DNA replication origin
gcagcccctggggcggtaagaggcaggatgagatggattggagggtccagctccatctgcgcccctcccttgggctctcctttccctgtgcccaggcaggtagaagggatctttctccaccgcccgccccattctggctggggcacctagatatgggggagatgggaaaggagacaggaacagtgggccccaagcaggagcaagggagggaggtggggtctgggcgaggagcaaaggagagggccagggtggtggtgggtgggggcatcagagacagcagggcgtgtggccaggagcccgggcgccaggcagagctgctgctcccagctcaggagcccctgtgccagctggatgcgggcgggtgggcacgggcagggccacgtgccagacatgcacagagcgccctttgaggaggtggcagctgtcggtccaggccccccaccccccccccggcttgctgtggccctgcttggcccctccaacaatgccttgctgagcactgggctgcggacgctgatgtgcacagttgggaaccccactcaagaggtgaaggggcaaccatactctactggagcagggaaggacccctcatcactgccagaacagggacttgggtctctcgtgggaggcctggatttccctctttctctcatacctcataccccctcattgctgctggcctcttgggatcctcaccgggacactcctggagaaaagatcaaggctgcacgccccttggggaaaaaggctgaaaacccagtcggtgacctgctactgggggcttttgggagctgggggaagtcagcctgctgcctggctctgcttcctccatccagccaccgtggcctcctggcacagcatccctggcaggcagaagggcccgccccccacatgggcacccacacagagattccctaggcagctggagctttctgcccccaggtccccgccatgagcccgggctgcggcaaaccagcctcatggagctggctccgtctttcctccctggggtgggcagcgctgacctccgggacagtgctctggaccccagccccacttgctctagatgctcacccaccgtccccaggaagcagaacagaggggtcggacccctggtccttcctttgagtgggtgagggatctcagtgcctgggcctatgaaatgtaacggggcatcagcaaggcctgcctggcaggagtggagcgatggggacgaacatgcacgtgcccagtggctgcaggtgccatgtgtgggcaccatggtagatgcgaaacagctgaaattgggggtgtttagcctggggaaaggaagtctcaggcccacgaaggctcgtcttccagcctctgggaggacggtgggctgagggtgggcccaggagtgggggttacagggacacaggatcctccctagaagccaggtcagatgtcactgtcagggcgaccccaggatgagctagactgtttccggggtggggagctcctcttccctgggggtctcggggctcgctctcagctgggggagggcagaggggctccgggaggcctgctatgctgccccgcgatcaccttccgccggccgagcc

SEQ ID NO: 29205 - DNA, 1167 bp, Artificial sequence
  DNA replication origin
cgccccgcgcctgcgcactgcgcgccccgccgtcgccgctgccgtgctgtgggcgccccgagtctgggcggggtcccgggtgcgcagcctgctggcggcgtgggcgctgtcctccgggaggggggccgtgctgctcgcccggagcccctttccccatcacttcttcggcggtccctgaggcggagccccggagtcccgctgggcgtgagatgcagagagcggccgcaggtgggcccggggctggagggcgctcggccgccacccgagcgggtcttggccttgagcttccgagcgcctcaggttcagagctgcaccccacgagcccgggaggctgtggtccccgccctgcctgggttgccccacggcgcccggcctccttcgaggggtctcggagcggcccggccgcgctgaggagtcagagctcgcgctccccttgccccggggctgcagcccggcccctccgcgcaggcgctcgttcgctgatcgcgggcgcctggggctaaatcctccccctccgagacccgctccgctttctaggaatctttcccagacctggtgccacctgttgctgggtctcccactaagccttcgagatctttggcacagcttcctttgaactcttcctccccgctgcggcttgagctgggcctgctaggagggttgctcagaattctaatgccaggaagagcgctccgtgccctgaaagctggagggaggagagaggacttcacttgggaaggaggagaaaagctttgaggggaggcacagttatttgtgtggtccttgaaaggcaagaagactagagcccgtggccctggaaggggaggtggggctcccagcagaggggactgaggtcttcataaacaatgagggaccagagcagagggaaggaggacgagattccagactctagttccaaacaaggcacctgtgatttctcatcccctgggcagcgactgccaggcgccgttcagcggacacctgggacttgcagtgttatgtgcccagggattttcccggacgggattgtgaagtagcgggtaaggtcatcaggcaggttggggtcagatgcagatgttcgcttgtggtcattcctgaaatgagaatctggcagctcacgttatttcagaaggtgctaggatcacttttgacagtgatatcaaaaaa

SEQ ID NO: 29206 - DNA, 1900 bp, Artificial sequence
  DNA replication origin
cccgaggcgccatcagcagcgaggccgtgtgcaagccactgtgcgcgcggcagtccttcaccctggcccgggaggcctgccgctcctacagccacgtggtgctcaaggaggtgcgcttcttcaacctgcaggtgctctacccgctgctcagcgaccccgcgctcaacctacgcatcgtgcacctggtgcgcgacccgcgggccgtgctgcgctcccgggagcagacagccaaggctctggcgcgtgacaacggcatcgtgctgggcaccaacggcacgtgggtggaggccgaccccggcctgcgcgtggtgcgcgaggtgtgccgtagccacgtacgcatcgccgaggccgccacactcaagccgccaccctttctgcgcggccgctaccgcctggtgcgcttcgaggacctggcgcgggagccgctggcagaaatccgtgcgctctacgccttcactgggctcagtctcacgccacagctcgaggcctggatccataacatcacccacggatctggacctggtgcgcgccgcgaagccttcaagacttcgtccaggaatgcgctcaacgtctcccaggcctggcgccatgcgctgccctttgccaagatccgccgcgtgcaggaactgtgcgctggtgcgctgcagctgctgggctaccggcctgtgtactctgaggacgagcagcgcaacctcgcccttgatctggtgctgccacgaggcctgaacggcttcacttgggcatcatccaccgcctcgcacccccgaaattagtggaggccacagttgtagcaggcgctaggcccgggaggagagtgcatggtgcagagggggctggggcgcacggagaagcaggtccctatattgaccaaggagtttgtggtacgacccctccccctccccaagtaggcaaggactgcacgtttctttctctcttgattcttggttttcctttgagtcctctggagctgccttctcatcaggtgcactcttcatggaaagcaactcttgcccctcctcctctgggcacagggtgtgcgttcagatgacttggctcctactcaagggctttcttcccctttaactctctccttctggtgacacatcctgcagcagctgagggggtgccctggcactggctgggagtggagaggcactgtggtgaaatggctccagaggtctgtacatcacatacatatgcacacaggcacacatggcaaaactcggaagtgaaaggacttgtctgaaatcacatggtgagaaggaggatgaagggaggagagagcttttgctctgggtctccagtggataggagaggacctgcctcctgggtgagaagggtcagattttcctattttaattgctttagggaagagcaagcagagtcatgaccagggacacagctgagagatagaggaggctgtgaatgctgagaccagagtttatcatgctggacaagcctggaaggaggcaataagtgggaaaggtaggaggagagaaggctggggagggctgggcagcaagccaggcacagtgagtggcagagcaagagggggaaagcaggatcagtgcctggaaggcaggtgtgcccgtcagcggggagtggaactcatcaggcttgccaagaggttggaagggaaatggctctgggctggaactgtcttcccttggtccttctggtccaggccttggaggaaagcagaggatgatccctgcctgtgagccacacctcctagctctgggggcaaaggggcttagtaaaggaatgctggatgtgtagagggtttagtcccgagctcaggaaatgagagcctataagtgcccagtacatgtttaaaagaagagctcatggaacctctggaaaggacagggaagttgagttagccacataaatgaaccca

SEQ ID NO: 29207 - DNA, 981 bp, Artificial sequence
  DNA replication origin
ccgggagcgcagcacggcccgcgggtcgcgcaccaggtgcacgatgcgtaggttgagcgcggggtcgctgagcagcgggtagagcacctgcaggttgaagaagcgcacctccttgagcaccacgtggctgtaggagcggcaggcctcccgggccagggtgaaggactgccgcgcgcacagtggcttgcacacggcctcgctgctgatggcgcctcggggaaaggcactgcaggcgggtggcgagcacagtgcacggctcacggcccactggaagaggtcggacaggttgcggcgccaaggcagataggcatcaaacacgtccatgtcgcacaggaagacggagcgcaccaggtcgcgcacagccatgtgcagcgttgcggcgctgccctgcgacagggtggtccacacgtgccacgcgggctccattaggtagaagacgtcggggtgctggttgaagagttggcccacgaaggacgagcccgagcgccacgaggacagcaccagcacatgcacgcgcgcctcgccgcctgctggggacgagggccctggccgggaaaccagaaagaggaggaggaaggtctgcgccaggaggagcgcggtcactgctgtgctggagacgcgcggcagccacatgctgactgctgggggccttagggaggagagcgcagcggttaggggctgcagcctgcacgcccatcccgtaccccactgcccagtgcccgcagggggcagattctaccaccagacccgagcatcccatgaacatgatggtctcagtggggagctctcccggaaatgtggccttaagacataactcaggatccagtctagctgagagcaaaagtacaaatgcagaatgcggtcggaaatctgtctacatgtgagtcctaccttcttaatgtgagtcctaccttcttaatgtgagtcctaccttcttagttctacctacccacattaccattgtctatttggagagggaaa

SEQ ID NO: 29208 - DNA, 1414 bp, Artificial sequence
  DNA replication origin
gggacactgcaccgggtccatgtgtcatccaggtgccgtggccttgggaagggtttggattccaagtcacctcgccgcaaggatgcccccgagagtgaggagggtcaagattaagattcgacttccttcactagggcctttgtcctcccaggagccccccttctctggggatttggggtggggtggggtacaacgttcctctgtagtcagatgagaggtgactctgccagcgccctttgacattctgggctaaaagttgagcctctcagagccccagcccacctgggccctcctgccccgccctcggccggcgcccctcccccgaggcgtggcccctcggtcgggggtgggccaaccggctccttccttcccccacggcgctagctcccgctggccacctcgggaccgcagccacgtctgaaagcgcctcattgtgtgcgctcgggcgggctgcaccgggcagcgccgagggttgccggccggcgcgcggggagtagagggcgcgggccgcagtgccgggttccagagggagctctgcgccgggtccttccctgtggtagccccaggacacccccagcctcaacatcccattctgggactcctgccctgttcccacattcgttctacctcgagtctccaggagcttccagtggcttggtcaccgccaactctcgtccatgcctcttagagcccctttcccggcctcaccgggtgtcgcttaatagtcttgggaccttaaggagcaagtcagcccctgcggaccctcccagtgaagagaaagagctggctgtgcggtggaatttggaagagacgacgtttgggagcctttgctgagtccagggagagaggcgtcccccaccgtgccgctgcagctcgggcagagccgccaagctttggggtacgttggttcttcattctccgcgggggatgtccccacactcgggtcggctgggggccgggctggtggcacagctggggacgctcctctgtcctgcaccggggacctggggtggcgggaagagctgggagtggcttttccatcagcaacgtggaaagggcatcgccgctgttggcgccggtttggaagtgtcttgctggggcttcggctgcgcaggagaatcctcactgcgaggggagaaccccttttgtctcgatacttgagtttcaaaggacatgactttcaaaagctctccaagggctttttccatagaattattgagagacggtagcttggcgggttgatttggaaccagacccaggggaattggagtcctgcgtcactgcttctgacggcttcatcttgggcttcaggacaggccctctgggcctcaggacaggtgcctagcaaatgttgactttcctttctcctccctttttcacagaggcaaggcagtcaagtttcccatttttgagg

SEQ ID NO: 29209 - DNA, 1593 bp, Artificial sequence
  DNA replication origin
tgggccgggttatgggcgccccgagtccgggcggcgtccccggtgtgccgctgacctgctgggtgggcgctgtcctcccggaggggggtccctttgctctcccggacccctttacccgtcacttcctcgccggtccctgaggcaggtccccggagccccgctgggcgtgaggtgcagggagcggccgcaggtggacccggggctggagggcgctcggccaccacccgagcgggtcttggccttgagcttccgagcgcctcaggttcagagctgcaccccacgagcccgggaggcggtggtccgcgccctgcctgggttgccccacggcgcccggcctccttcgaggggcctcggagcggcccggcccggcccggctgaggagtcagagctcgcgctccccttgcccgggagctgcagcccggctcctccgtgcgggcgctcgttcgctgatcgcgggcacctcgggccaaatccaccccctccgagacccgctccgctttctaggagtctctttcccagacctggtgccacctgttgctgggtctcccactaagccttcgagatctttggcatagcttcctttgaactcttcctccccgctgcggcttgagctgggcctgctaggagggttgctcagaattccaatgccagaaagaacgctccgtgccctgaaagctggagggaggagagaggacttcacctgggaaggaggagaaaagctttgaggggaggcacagttatttgtgtggtccttgaaaggcaagaagactggggcccgtggccctgaaaggggaggtggggctcccagcagaggggactgaggtcttcataaacaatgagggaccagagcagagggaaggaggacgagattccagactctagttccaaacaaggcacctgtgatttctcatcccctgggcagtgactgccaggcgcccttcagcggacacctgggacttgcagtgttatgtgcccagggattttcctggacgggattgtgaagtagcgggtaaggtcatcaggcaggttggggtcagatgcagatgttcgcttgtggtcattcctgaaatgagaatctggcagctcacgttatttcagaaggtgctaggatcacttttgacagtgataccaaaaaattgatggtattctggtgaccctgtgtgaaaaatgaaatgttcgtgcaatctggagacactactgggaccagattaatctgtttttgtttccttatttatttatttttgagacggagtttagctcttgttgcccaggctggagtacaatggcgcgatctcggctcactgcaacctccccctcctagattcaagcgattctcctgtcacaggctcccgagtacctgggattacaggcatgcaccaccacgcctggctaattttgtatttttagtagagacggggtttctccatgttggtcacgttggtcgtcaactcccaacctcaggtgatctgcctgcctcggcttcccaaagtgttgggattacaggtgtgagcctgcccgcccagccttttttttttgaggcggagtctcgctctgtctcccaggctgcagtgcagtagctcgatctcggctcac

SEQ ID NO: 29210 - DNA, 1336 bp, Artificial sequence
  DNA replication origin
gggagacgttgcgcgcattcctagacgaagtatggaaggcctcgattggcttgccgatccccgacccgtgggtgatgttgtggatccaggcctcgagctgtggcgtgagggtcaggccggtgaaggcgtagagtgcgcggatctctgccagcggctcccgcgccaggtcctcgaagcgcaccaggcggtagcggccgcgcaggaagggtggcggcttgagtgtggcggcctcggcgatgcgcacgtggctgcggcacacctcgcgaatcaggcgcaggtgagggtcggcctccacccacttgccgttggtgcccagcacgatgccgttgtcgcgtgccagtatcgggcccgccgcctcccgggagcgcagcacggcccgcgggtcgcgcaccaggtgcacgatgcgcaggttgagcgcggggtcgctgagcagcgggtagagcacctgcaggttgaagaagcgcacctccttgagcaccacgtggctgtaggagcggcaggcctcccgggccaggctgaatggctgccgcgtgcacagtgtcttgcatacgtcctgcttgctgatggtgcctcggggaaaggcgctgcaggcgggcggcgagcacagcgcgcggctcgttgcccagttgaaaaaggcggacaggtttcggctctgtggcatgtaggcatcaaacacgtccatgtcgcacaaaaagatagagcgcatcaggtcgcgcacggccatgtgcagcgttgccgcgctgccctgcgacagggtggtccacacatgccacgcgggctccatcaggtagaagacgtcggggtgctggctgaagagctggcccaagaaggatgagcccgagcgccacgaggacagcaccagcacgtgcacacgatcctcgccgccggctggggatgagggccctggccgggagatgatgaagagcaggaggcaggtggtctgtgccaggaggagcactgtcactgtcttgctggagaaccgtggcagccacatgcgggcggctgggggccttcgggtggagtgggcaactttagggacccgggccctcatgcccatcccatgccccaattactgcccagtgccctcagggatcagccctcagattcggctaccctacccattggacttcccaagactcccaaggtctcagtcgagcactttcccaggaatacggagtcaagacataggccagaatatagtctgtgctcacagcagaagtccagttgcagaataatgtgggatatcatcaaactgtctacctacccacccacccacctacttacatacctacaggctatctatctgtagagagaaatactatgtttcaaagagaac

SEQ ID NO: 29211 - DNA, 1490 bp, Artificial sequence
  DNA replication origin
cctctccccctgggctcagcaaaagctcccagacgtcgtctcttccaagttccaccgcacagccagctctttctcttcactgggaggttccgcaggggctgacttgctccttaaggtcccaagactattaagggacacccagtgaggctgggaaaggggctctaagaggcatggacgaagagtcgggggtaaccaagccactggaagctcctggagactcgaggcagagcgaatctgggaacagggcaggagtcccagaatgggatgttgaggatgggggtgtcctggggctaccacagggaaggacccggcgcagagctccctccggagcccggcactgcggcccgcgccctctactccccgcgcgccggccaacaaccctcggcgctgccccgcaatcttcagcgctgcctggtgaggagctttcagacgtggctgcggtcccagggtggccggcgggagccagggaaatgggagaaggaaggaaggagcaggttttgcccccagctccctctccccacccccgaccgaggggccatgtctcggggaggggcgctggccgagggcagagcaggagggcccaggtgggctggggctctaagaggcgcaccttttagccggggatgtcaaaggacgctggcagagtcacttctcatctaactgaccacaaatgaacgttgtaacccttcctcacccccccaatcgccagagaacctgggagctcctgggaggacaaaggccctagtgaaggaagtcgaatcttaatcttggccctcctcgctcttgggggcatccttgcagccaagggacttggaatccaaacccttcccaaggccccaacctcagccctaagccaagacccaggcaccttgatgacacaggaatccgtgctgcctcccggtgcagtgtcccagctgggaggagttgaaagaccaggtggccttaggagctgtgccctccctgccctagcctccgcccagaggcgcaggcttgataacatgttccaatgaatacaggatatgtttcagtaaataaaagctccccacccaccccttacaaataacagctcagcctggcctggtggcatatgactgtaatcccggcactttgggaggcaaggcaggcagatcacttgaggtcaggagttcaagaccagcctggtcaacgtggcaaaaccccatctctactgaaaatacaaaatttagccgcgcatggtagcacatgcctgtaatcccagctactaggtaggctgagacaggagaatagcttgaaccccggaggtggaggctgcagtgagcggagatggggccattgcactccagactgggtgacaaagcgagactccatctcaaaaacaaagaaacaaacgggcagagtccagtaatctgaaaaggatagagcattgggaggtcctttaatccatggtggtatctgaaacgaggagtccctgctgctgggagtagaaattagcagtctttcctggctgtggt

SEQ ID NO: 29212 - DNA, 814 bp, Artificial sequence
  DNA replication origin
tattgctcggagtggtgacaggttgggggctcattatgggaggggagggtgtttgaggacactgttggaagcggcactgaggacaacccggaggtccgtattagggacagccgtagtaggttgtcttggacctagaaattgaatttaaacaaatcccgttttcttcctttattcgtgaataaatatttgaataaacatttacgaaaaggtatcacaaatgcacatttgaggcggggtacggtggctcacgcctgtaatcccaacactttgggaggccgacgcgggtggatcacctgaggtcaggagttgaagaccagcctggccaacatggtgaaaccccgtctctactaaaaatacaaaaattagccaggcatggtagtgggcgcctgtagtcccagctcctcgggaggctgaggcaggagaatcgtttgaaccagggaggtggaggtggcagtgagccgagatcacaccactgcactccagcctgggcaacagagcaagactccgcctcaaaaaaaaatgcacatttgaggagtgtaacatcactgatcacagaccccttaattttaactggcagaggagttagaggtgactgtcagactcggagaattcccctgagagctggtcatgagatgggtttccttatttggctgtgggagtggtttagcaatcacagcctgagctgtgtgtgtgtcacctgcccggacatatgctttgaggttctccaatcagtgatgtaatgccttttttccaagcagactcatcaaggcagtctggtctgggtcaccatctgtttataagctgctgaacatgt

SEQ ID NO: 29213 - DNA, 912 bp, Artificial sequence
  DNA replication origin
ggggccgcggtcctgtcccctactagctcccagcaaggcccgcggagggtgacatggggtcagggggccgctgcccgaggcaccagggcatgggcgactccagcccgcagcagggcatccgccccgctccactcggcccagggccgcccgagtgggggagggggcccacccgccgccccagcccccagcagccgggccgacgaccaagtgcttacccagcgagtggtcctccttgaacatccacttcatggcggcggcgggaaggggacggaaccggctcgcggagccgcggagctcagcgcaccgagcacaacaacaacgacggcggcagcggcagcggcagcgacggcggcgactacacggcaggcgggacttccggctgtcggagcctagcaaccggccgggggcggggcttccggcgccatttgtcagggcgccacgccaaggggcggggccgcacgtaaaggggcggggccgcggaggacccctttgggggctcctgggctgcggtggcgaagaagttggttatggggacgtctgtgagcagtatctgcgacattgctcgcaggaatgttcggggaactggtgacaggagtggggtctcgggagcgttggtggcggaaaacgtctggctgatagtgtagggctcttactgagggctgtttgggggtgtggctgatagctgagggctcttagagcggttcataggggaagtctggggaattggtgacaagaacggtctttaggggtaagaatgacataaggagggctttctagagcttggcgataacaagggagctgtttagggcgttgacagtttggggagtattgctcggagtggtgacaggttgggggctcattatgggaggggagggtgtttgaggacactgttggaagcggcactgaggacaa

SEQ ID NO: 29214 - DNA, 1110 bp, Artificial sequence
  DNA replication origin
gatggtctggttgtttggcaggatgttaatgtctggagattgagacactagggtgcatgctcctgaccaattggttggtaggcagagataagagttcctgccacaaaggaagaagacacgtggggtggacggacaaatgttgtaggttatggtggcaaaccataaggaaatgggagctgagtcttcagagaagccctctcggatgcttttctcattctctcatattgaaaagccatctgcaagggcggccccagtgagaagctgataaggtatgtcagtgggggaagaggtgaaggaaatgtgattttgcagggaaaggaaaaaagaggttctgtccactaacagccattgtgagttggaagaagggctgggatggaggaagcatgagagagaggagtcatggcatttcctccaagggagtcccttaacacttggtgggtgtcgctgacagagaggggtgggggagaagataagggaagtgggtgctgagatgaaagaggggccagaaaataacagtagatttttgaaggctgaggaagaccctattcagtgatttatttggtgattttgatgatcctgagatgggttgagagtgagggtgaagttgcacagggatggaagtaggctcccccctagagtcttatgagggggttggagaagaatcagctaaagcagagggggccctgagctatgagtgacgtctgggtggaaataaggccttcagtgggtggtctggggggatttgcctctgttagggatagacgaggattaaggagttatagtagggtaacagccctgcgttcagggttttggaaagagtgaaatgtttgtggagggaaggtgtttaaatggctgagggtataaaaagtttctgtaaatggaatgccctcatatgtgaggtatagggttatgacagacagggtccaggtgtgtaagtctgcagggatggcggtgaaccattgggtctgtggggatatgcataaccagcagttagaggagaggggaggctggcttggctaaggaggttgtgtggcaggttgacgaagggtgcccaactgccaaaggttgggggtggggacttagaacatcccacagacaaagaagacaaga

SEQ ID NO: 29215 - DNA, 1624 bp, Artificial sequence
  DNA replication origin
ttagagtgtttagatcaaagaatgcgctgaagaaagtcaatagactcaacagaggaggactgttgagaagttagtgtttttgaggagtagggtgttatttattaaataatagaagtgggaaggggaatcagtggagttcgatgggcactcagagtatttacatcattgaagtcacttgtagactgttggggaagtctttaagggaccaaatgttagtggatgtgtaaagttgttcatttgagatttaatggaagtcactgagaagtctgtgccattgatcactttggaattagtggatgtaaatggagtcattgggaaggatcagtggacctcactgagaataaatgtggatggggaggttgaggacttgggaattaatagcaggtaagagcagttattaggagggagtaaagatatttggggacatgggagtgtcagtgaatgtcagtgacagaatatgcaattattgggattttatgggaaaattattgagacatagttgcacatggataataatggttgtcattgggggatgaatggaaatcaatgggaataaatggatgtgtcagtaggggctgttgaagttgtgggttttagtgaatgttaatgatggtcatgggtaggggcaatggaagtcattaaagtcttgtgtgttagtggatattatgatggttactgtagggaggggagtggataccaatgagattgaaggtggtcaggggagtgactgaaggtctctgaagtgctgggtgttagtggaggttaatgatggtcattgttgggggtaggggggagtagacatggagtagaataacttgtggatcagggcagtcatggagggtcattgaaaaaccaggtgttaatgattgttaatgtggggtcattggggtgtttgtgaaccacagtgggagtgaatagtggattaggggagtcctaaatatctgggtgttagtggatattaacgacagtcattgggagaaatagtggacattaccaagaatataaatgggcaaccaggagagttagtaggggtcatcaggtatcagtgggcatcactgatagggtagtagcgggggttggggcattcaaacagttaagatattaatagatgttaatggtggccattgggtgagcagatatcaggagaaaaaatagcggtcagaggagttaatgggggatcattgaagatgaataatcgtcatccagagtcaatggggtgctttgaagactttggaataacagtgattgaaagggaagtaattggtctgtaggaacatagcaagtccagtggaataacaatgagaatatgttggtttattagggttttaggaagttcattggaacctaaatgttagtggagatcattgcggggtcctagggcagtcatcgggtcattgaggggcataggagacacttggagttctgcgtcagcatgcaggggtcatggaggggctagtagatatttggtgggtccttggggatgtgggattagttaggagttcacatgcagatgacccaccaggggctccctttcaggatccaaggacaaggaccagccacccagcccatcaccaccgccccagtcagaggccctgtcaagcacctctcggctctggagtcctgc

SEQ ID NO: 29216 - DNA, 1518 bp, Artificial sequence
  DNA replication origin
aactgagacccagagaggttaagtaacttggccagggtctcggtgaagtaacagattagggttcaagccaggatgttatagaatctgtggtgccaaattaccacacgcctcacaaagctttcttgggaaggcagagttcattccatgggggacaggatggacagggtaatgttctcaacagaggcccatgaaggttctcattcaacaggagaaacaagaaaggtgaatgctgtgaacagacatcccaactcccactcctgctggagtgaatgatgggtcattcagagaatatgactgagggttgtctttcccttcccaggaagcacatgctgcaagagtgcatggaacaaatttttgcccataattctcaggtttcagagtctcaaacagaggaatctggggtaactcccaagcctggggcctggcaggccactgtgtagaaagtgggaacagggcttgcatcagggagagtttgttggaagaggtgctacgggaaccaaagcttagaggataaaacccatgaaggggctcccagcagagggagcatgggcaggatctgaaggcctgtgcatgaggagcccccaacagggtgtcaggcctagcatgtgttctcttattcctgggtgtcggcctccaggttggatgtcagaggacagctggaggatctgatgggccagcacaaggacctctgggaattccacgtgagccattatcattgcctgcaaccaaagccactcctccctggctttagtgtcgcactgactggcccagagtccacccctgcccaggctcaatgccgcgggatagtccttgattccttgcttccgcttgcccacctattcagtccctcagcttttatctaaaatcaacttacgcctcaccatgccccactgccacacccagcatcacctgcccagacgggtgcagtaccattgtgatcctgctttccccctgctcatctagtgtatgttcaccttgcagtggcaaatggcagcccagggaaagccatggtcaggtcattccttcatttagctaatgtcagtggttgcaccggtcagcatttgaggcagggagggagggtagcagatcaaagagtccacgtctttgctgtcccaagctggttggggacggtggaggcaccaagaaagttagtggctagatcgtggaacttcagtgggaaggcctctaagcaagtgacatctcaacgcagaggtgaaggaagtgagggaagaagccgtgcaggtatcggtgcagaaggaaggccctggggctggacggtgcctgaaaccgttgaggagccgcagattggggaatggaggatgaggagagtgggaagagttcaagtttgagaggtgcctggagacatggagagcgtttagggggaggtgggtgggtctccagccacagcaggaactgcacattgagttaataaatagttgaatgaatgaatgacctaatgtaggtgaagacttcgcgagaagcacaaaaggggaggggcgggccgtgtagccaagagga

SEQ ID NO: 29217 - DNA, 2079 bp, Artificial sequence
  DNA replication origin
gcggcggctgcgggtggccagacgcggcaggcggagcgcacgggcggcgcgcattctttccgcggccccggagctcggcgccccaggtgcggctccaggtgagagccgccgccgttcacatcgcagcgggggcgcgctgggacctcccctcctccggccgcctgcgcgccctcccttctcccggcgcgggcctgccgagctgcagtttgcggcaccccagagggtacggggggctccctgggccgggactggagcgcaaacggttgggagactgtcggtgtctgcccgcccgtctgtgcgtctgtctgtgtcggtgtgagcgtctgaggcgatggggaagacagcgccagctggctcccccagcgcgccggagccgagcgcccgcctctccaccgcgcggtgattggcgaccagcggctcccgggctcgtccgagcccccgggctggtgcaagggcgtgggattcccggctccagctctgagggagggggcgaagggggcggggaggctgggtgggagtgatagggagggagggaccgaccgccatgagaaggaggggagcgcccagggtcaggcttggaaaacgtaatttaagcgcactgggagatgagttcggaagacgaaaggctcaggtgagtggcgcgactttttcgctgcctgtgcagacttctcattttcaactcttctggcaaagagtcaagatagcgtcctcaacacctcctaagtgctgggagctatcccctgctgtatcgcatttgcctcaggccctacctttttcaggtgggaattattaattccttgataaagatgaggaaaaggaggctcagatgcgcacaagctgacctagcttcccagagtcagcaaatctgaggcagccgggaggaccagaacaatgagctgtcactgtctgcagcatgtaaaaactcatggcacgcgggggcctccctcttctcccggatctctctctctcttcttgacgtgaccgtgcttcccactcttcgagattgaatcttggccccagatacccaaacccacagaaatcagttataacaaacagcgcacgccatcactaggaatgtgcatccagtttgctgtgtgcctgttcgtttactcaagacatttatttgatcctttgatccctgtttgcagaggtgaacaaaatacagtctcacgggccagtggaaacgaatctgattggatagctcgacaacggtaatagaagcaaaatgaacacaaatactaaaaaggaaaagaatagtctcctaaattagatggcagcagaatctaatttagatgggataagatgtgtgtgtgtgtgtgtgtgtgtgtgtgtgtgtgtgggtgtatatatacacacacacatatatatacacacacacacgcatacatacacgtgcaaggcatctgttaggagctgacacttaaaataaggccagagagagtggatcggttttataagggaagaggggagtaggatcttgcatgttaggacagggggcacagcataagtgaaggtctcaaggtagttaagtgattgccacgtgaaaagtgttacaggccagaggaagaagcaaacacagcagttgctgggtcagctggaccttgtaagctggggcgaagcatgttggaaaccattagatttaaatgaatgtgggtttgtgtatgtgtaggaggcaacatcatatccaataataaaaaaatgtgaaccattttttgagcgagtgtagggattggacgagctgaggcagggtcagagagaaacaaaccacgcagctgttgctggcatgaaggggtacaatgacagtgtcttgcttggaccagggtagtggtagtggaagtagatgtattactctgctcagtcctgtgggtactgaagtagttaacatgaggtctatgtcaagcctcgattaagtgatagctcaatacacatagtcggttttatggaatgcagctgggaagaggtaaacccaggctgtagcggcagagaaggtgatgtgtctgcctaaggaacatgaagctaagcctcacagaacatcagggctaaacaaatcatttgggtttccctacttaatctggttaa

SEQ ID NO: 29218 - DNA, 1075 bp, Artificial sequence
  DNA replication origin
gaacagccaagccggctgggaaggggagcagcgtgtatgtaaaccatactggcttaagccggctctgttcctggccagagcagtgcaaaggttcggggaccctgcgggttgctggaggcgagtgctcccccatccggcgctcgcaggtggactggcgggagctgcaaaatcagtcccggccaaaaggccccggtggcctccgctacgatcaaggccgggcctgaccaagctcggggtgccagggcccggaaagcctttacctgactggctcctcgggaagaccaagtcgtgacattgccctggggaatgtttgtttccgggcggactcctcggagctgctcggtcggtcgcgcttgcgcagagcagctctgggcttgggagcggcctaaagccagagagaggggcggggcttagagcacgaggcggggtggtgtctggggcggagacagggggcggggcggtgcgagatctgggatcggaggccgggatcggggcggggcggggcttatagccagaggcgggacttgaggtggggagaggcgcggggcgggacttagggccgggtgttcctggttgctcaaagcagtttctgccgggctccttgggcttctatggaagcaagaggtataggaggagttgtggaatttagagctggaagagttaaaaaaaaaaaaaatacagtgttggtgaggtgataatattttacactcgcattcgctgttgctggaaggttaaggtgattcattcaactttttggaactgctgtcagcacctgttcaccgaccacctgtatgcactgggtgcagatcccacagctagcgaaaagacacgtggagctcacagtcaaatggtagaaacataaattaatcacacagggctggatgcagtggcatatgcttgtaattccaacactttgggaggccaagaggggaggatcacttgaatccaggagttcgagcccagcctgggcaacatggcgaaaccccatctctacaaaataaaaataaaaaattagccaggcgtggtggcacacacctgtggtcccagctactcaagaggctgaggtgggaggatc

SEQ ID NO: 29219 - DNA, 1643 bp, Artificial sequence
  DNA replication origin
tctgcatcctccccagctttggcccggggaggctctgagacccgggtgagggcgcggagggggtgcgcgcggcggttctacccgggcagcatcccagccgcagctttcccaccccctccccagcgcccagcgcgcaaaaagagagaaagcgagaaaggcgcggatactggaccaggctttgacgcggatcttgagctcgccgtcctgaggctcgggcatggccttcctgaagagccgcagcttgttgagccccccgaagccagccagcaccaccgcgcgcatctcctgggcgtccccgaggcggtgcgagccgtcgccgccgccgccctccgccggctccttgcctgcctccttctcgatcatttgctccgtctcctccgccttctccacgccttccttggccatggcgctcgagggcgcggggcgcacgggctgcggtggctgcggtggctgcggcgctgggggagtggggctcctctcccgcgggttcctcctgttgaatgtgggatgctcggctgtgcaatggctgcagcctctgcgagcgccgccgcggtccacagcctccgccgtaatcctcacaagagccgtgccctaagcgcttcacccccgccccacccttctttcctgtcccaacgaagcctcaactccagttcctgaaatagtcccaagttagggtcgggatcgcggccctaaacccaaatttgccgaagatctgtgactaaaacgagcctagagagaccaccctgtcatcccccttcctgtgggcccagtacttggttatatacggcacaggctcgggtgccttgaaatggaccgagactaatgtctgggcctggaggatgccttaccgcgacaaggttgccctctctccctcccatcttcgaggctgggcgggatagtcgggaaattgggtcgtttctcaaacagccagttttgggtggaagggcggagaggtttgggaagcagggaactagagatcccgctcactgccctgaagagtccagtgcagggtcttttcactccagacctgcagggtcagccgggatgctctttgctgggtatcaccaggggcttccttacgacggcgaattctcaccacccacaccatttcgggctattaaagaggcttcagacaagaatcctgtaccagaaaggatcctgttcgtgttctgatccccggaagaccagtgtgtacccgctccccaacatgcatgcacatacacagagtagtaactggcgttttgttttgttatcaggctctttgagaaaaacagctcatagaaaaacttggaatttctgaaataaaataatggggaaggacgtggttttcctaggggcagtttaaggaaagagatgcaggtgaggaagtaggtctatattctattatagttgctatgccattgccagccttgagatcttgggcaactcattcaaccttcctgagcctcaacacactcatctataaattgggtacattgatttttttttctatattgtgtgaagtgctggggtggacatgatttcagtgagacatggtccttatattggaaaaggtcaatttcagagcatgaggcatgaaggacacagtcaacaaatgtggtacaatgaatgatgtaagtgctgcctcttctctcccctcattc

SEQ ID NO: 29220 - DNA, 1248 bp, Artificial sequence
  DNA replication origin
ccatcatgatccgtttacaggtaagaaagccgccgctcagcgagaatgagtgatttgcccaagatcagtcagctgccactaagtggcttggccgggaatttgatacatgatcttttttcacctctatgctgttgtcctgaagggcctgggacagggtgcagggctggatcccgcctcctgcccacttccttccccgtagcctgacggggaaaggaactaggaaggaagagggtcggtaccttgcacccaggcttggtgagggtggagaccagggctgcagcgcaaccccctccatgcccctctccatcctctgtttctccgagaggggaaaaaaccctgatcagtctccccggaattcctggtcccatctcagaaggagctcagctctctaagctgccctctattccccattccccctgggggaacttctccaggccctcacgctcagctgaaattcccggggagagtttaagcctctctgtgtgcgggcactgtaatttccctgaagttctgggaagagcttacccagcagaggcggactggacccaacactaggtttgcatgttaaacttgtaaggggaacttgctattaatcacggtgagacgagcctattccttcccatctgttttctagagccccccagtacatactgctctccaaagcagcagccagctcacgagcttctaggttagatcagaaacccaatatctggacctctctagaggcacgagaaatacaaacgagggtcccctcccgttcaccaccttgagaacagacgcaggtttcatcggccagattagaaagcagctagtgggagaagcagccgctgatccctgccttgctgctcatatatgcagctggtcaggtttgactctgaacacgactcgtgagtctctgtggggaattccgggtaagggaagaggcttttgcaaaccgggggatcctgtacaataaactcttattgaaccaagttgtttgatcccagaaggagagcttatatctgccctttcgcagctaaatccccaaagaccagcccactcccccaccccacactgtttggcccactgcacatcctaaataagttatcgctgaatgaatggattgaggaaagagctcggaggaggattgttgggtcattatttttctttacttgctggtggaagagcttttgcttagtacaattaaaaccatgcatttagaactctccttccttaaccacttcatcaaaaaaaattacctgtatacac

SEQ ID NO: 29221 - DNA, 1073 bp, Artificial sequence
  DNA replication origin
ggaggaaggaaagaaaggaaggaaagaaaggaaggaaagaagggagggagggagggaagaagacagggagggagggagggaggaagggaaggagggagggaggaagggaaggagggagggaggaagggaaggagggagggaggggggaaggagggagggaggaagggaaggagggagggaggaaggagggaggggggaaggagggaggggggaaggagggaggggggaaggagggaggggggaaggagggaggggggaaggagggaggggggaaggagggaggggggaaggagggaggggggaaggagggaggggggaaggaaggaaggaatcttttttaaatctttattaaaggaaatggtatttaacattgaagaaaaagggtaaataatagaatcctaaaagaaatactttaaaattgatacaacgtagctcatgaaaaactcactattttgtatttttctaatttttacaaaagaatggtgaaagttttgtcacagacggacctctgggatttaacagatgacaattctcttttgctcaccctcacagcatcactcagcaccgtgcttggtacaagggctccatgaatatttgctgaataaacgagggcccatgtacagtaacatctgccacactaaagcattcatgagggctagagaagtcagggttaagaggacaagatgtaagaccatgaaggcattggtgtggtagagaaaataaggaagggtgccccaggagttacatttggagtacatgtaaacaaagtattttgggcccatccacatgcatctgaatttgtgtcttcaaaattcagattctaattttatttatttatttattttttagacaaggtctcggtcacccaggctagaattcagtggcgtgatcacagctcactgcagcctccacctcccgggctcaagcgatcctaccgcctcagcctccttagtagctgggactataggtgtgtgccaccatggccaactaattttcttctatgtcttgtagtagaagggtttccctatgttacccaggctgatcttgaactcctaggctcaagcaatcctccc

SEQ ID NO: 29222 - DNA, 857 bp, Artificial sequence
  DNA replication origin
gtaatcttaacactttggaaggctgagggaggagaatcccttgaggccaggagcttgaaaccagcctggccaacacagggagacctccccgccccgtctccacaaataatttaaaaatacgccacgtgtggtggtgcatacctgtggtcccagctacccgggaggctgaggtggggaagatcacttgaccccaggaggttgaggctgcagtgaaccgtgatcatgccactgcactgtaacctgggtgacagagcaagactgtttccaaaaaaaagaagaaaaaaggaaggaaggaagaaaagaaggaaggaaggaaggaaagagagagagagagaaaagagagacacagaaagagaaagagagaaagagaaaaagagagagggagagagggaggcagagagggagggagggagggagggaggaagagggagggagggaagggaagcagggaggagtaaaagtaagaaagaagaaaggaggagaactagaaggagaacaaagagaagaagaaggagaaggaggagaaggagaaggaggaggagaagaaaagaaaggaaaagggaagaggaaagaaaaggaaaggagaaaaaagagaagaaaaggagtagagacagagagacccaatgtgaatgacatgcagcgacaaaggcagattggagtgatgcacctacaagccaaggaacaccaagcaccgcccgcaatgccaaaagctaagacaaaggcatggagtagatcatccctggagccttcagaaagaacgtggctgtgctgacaccttgattttggacttctcactttcagaactgtgagatgatacatttctgttgttttaagccatccaaccctaagaaaccaat

SEQ ID NO: 29223 - DNA, 1115 bp, Artificial sequence
  DNA replication origin
caggaggggcttgataaagggtgagaggaagaatgaaatggaaatgcggctgcgtcaggctttctgtcctaattgccaaagcgcatcatctgctaccggagaggcccagggcaaagcaaatgtgtccccctttcccagtaatgaggcatgggagaaagtgggggaaagagagagaagaaggaggaggagaaggaggaggaggaggaggaggaggagcaggaggaggagaaggaggaggaggagaaggaggagggggaagaggagaaggaggaggacaaaagggagagtagagaagggagaggcgagagagaaggagggagagacagagtaaggaaagagagagagggaagaatgaggagaaggaggacagagaagagaggagaagacagaggagatgcagagaaagaaaagagaaagaaggaaagagagaggaaagagaagaagagagggaactggggagggggagagagagtgaaggaaggagagagggaagaaggaagagaagaaggagagacaagaagagagaggagaaagaaaaagagaaagaaggagggggagaggagaaagagagaaaagagtagaaggaggaggagagaaggaagtggggagagagagagtgaaggaaggagagagagggaggaggaggggagaggagagagaaggaaggagggaggaagggagagacagggagaaggaaaggaaagggaaggaggagaaacaggaaaagagaagaaaaaggagaggagaaagggaagagagaggaggaggagaagggaagggagtgatgagagaaggagggatggagagataggaggagagagagagagagagagagaaacaaagccagtaaacaagagaggagatgaacacgggtggaaccagctgtaataggccacggctttcctatattaccttatttgagccattagccaaaacaatgcctaggatgtttactgatgaggttttacaaatgaacgaggattcagatttgttaggaagagggtgagacttagagcacatgtgaaactcagcccacaccgccatgctgagtaggtagcccagtaggaccaaacccaagtccatctcgctatccccacagcttccctacctttggc

SEQ ID NO: 29224 - DNA, 1178 bp, Artificial sequence
  DNA replication origin
gagttttgatatcccccggagctcgctcgcgctagggcagtccttttgactttttaaaccaaatttgaacacaatccgagctcctgcaggggtgcgggagcttgggtgggcgcggggccctggggcgcgctgggtgtggccgtcattagcgcccccgggcgccgggcggcgtcgtgggcatctccgaggggcgctgcgttgctggcgtctgagcgcaccggctccctgggcactgccgcgggtctgggactgcaggcccggcccaggactgagggactcggtagcttcaggcaatcttcgggacccgccccctctgtctgggctccagtccctgcgcacctactgtacgcccctcgggggacctcagagggtggggagcacacccagccccacgcagctgcagccaccaggctcgggcagtgatgtccagggctattgggccccgcagaacccatgcataaaggactgggatgcggtgttcctgtcccgggccaggttggcggagggggggatgatgggggggcatggagggagggttgttcttagaaaatgggagaggggacaaactcagcatcctctctgcctacatctccttcattccaggcttcaagaccattgcaccaaaagctctggccagctttaaagattccagctgagcttccagtgatgctccccggaccctctgcatagcgctgtctgtgtctacacttaaagtggggcggaggtgacttattgggtcccagatctcagcttctgccacttgttggcctgaggacagtgacttttgaggctctttcatggccctggatgaccaggcatggaaggaaaaggtgtcagaaattatggagaggacactgggattggacaggagtcaggtgggaagggtgcagaccctggtgctaaggacgtcactgttgtttctaggactctgtggagagctcacaacctgtcagcggcttgtcagtcaccctgcaaacagatccttcttggtgggaggttttggggggactctgagaatgacctggagctgacccctggtgactggaggtcataagccaaggttggcctgtgttaaagtctgggccatactctcccagcctctgcaggcaggtcccttcctctcctctgctctctgggcctagtttggggttgcctattgtcctgggatcctcggcctg

SEQ ID NO: 29225 - DNA, 1104 bp, Artificial sequence
  DNA replication origin
tcagccccgaggacgcggtcgaggcgctcatcagcaacagccaccagctccagggcggcttcgatggctacgcgcgcggggcgcagcagctggccgcggcggccggggccggtgccggcgcctccttgggcggcagcggcgaggagatgggccccgccgccgccgtggtgtccgccgtgatcgccgcggccgccgcgcagagcggcgcgggcccgcactaccaccaccaccaccaccacgccgccggccaccaccaccacccgacggccggcgcgcccggcgccgcgggcagcgcggccgcctcggccggtggcgctgggggcgcgggcggcggtggcccggccagcgctgggggcggcggcggcggcggcggcggcggaggcggcgggggcgcggcgggggcggggggcgccctgcacccgcaccacgccgccggcggcctgcacttcgacgaccgcttctccgacgagcagctggtgaccatgtctgtgcgcgagctgaaccggcagctgcgcggggtcagcaaggaggaggtgatccggctgaagcagaagaggcggaccctgaaaaaccgcggctatgcccagtcctgccgcttcaagagggtgcagcagagacacgtcctggagtcggagaagaaccagctgctgcagcaagtcgaccacctcaagcaggagatctccaggctggtgcgcgagagggacgcgtacaaggagaaatacgagaagttggtgagcagcggcttccgagaaaacggctcgagcagcgacaacccgtcctctcccgagtttttcatgtgagtctgacacgcgattccagctagccaccctgataagtgctccgcgggggtccggctcgggtgtgggcttgctagttctagagccatgctcgccaccacctcaccacccccacccccaccgagtttggcccccttggccccctacacacacacaaacccgcacgcacacaccacacacacacacacacacacacacacaccccacaccctgctcgagtttgtggtggtggtggctgttttaaactggggagggaatgggtgtctggctcatggattgccaatctgaaattctccataacttgcta

SEQ ID NO: 29226 - DNA, 1355 bp, Artificial sequence
  DNA replication origin
agtccgaaataattaaaggaaacgtaaaagtgcaaagggcgcgcctgaccctgataaacagaggtcagatttcgtaaggggacgggtgagtgtgagtgtgtgtgtgtttgtgtgtgtgtgtgtaagagagagagagagcgagcgcgcaatatgagtctcaaaggccaaactccggccagtcaggagccggaaggctgagcccggctgacctgactttgagcttccccggagttatctcgcataggcgctcgctctgtccaagggcacgcgacgccagcgggcagccggtctccgtgaagaatggcctctaaacaacttattttacctcgttgtaaagagagggataaaatgggctttccctctccacggatgcccagccttctgggcaggcgcatggccgggcggcgcccagcccgcagccccgatccggacaccccactgcatccctcccttcccggtcccttccccgcacgggcgcccgagagacggacaaagagttggggccaagtttgagcgccgggcacggccaggctcagggaaggaaggtccccggcagacacctgggtaccagagttggtgcgaggaggaaaagctgggaggcgaattcacaatcctgggggtggagggcaggcaggggaggggaatcaggccaatcccagccgagtgagcccccagcgagctggggctccggatgggaggcctgtctcgcgctccaaagaaaagcaaaccgccctcccaggtccgcccggattgccgaagcccctctggaaaaactccttcccctcttacaccaaactttgcgccgggcctcgttccctcccgggtaggcagcggcgcaggaagggttaagccagcccgtcccagctgacagtcagctgattgggccctgattgacagctccgaaaagtttccttgtttctatactattatgctaatcgcggccgctctcgccgcctcccattggcccggagtgccagtcaatttctcatttggacctgacgtcacgagtgctataaaactcagcaattgctttaaactcttcttgctggatcagaggctttaaaatcttttttcatcttctagctgtagctcgggctgcttgtcggcttggcctccccctcccccctttgctctctgcctcgtctttccccaggacttcgctattttgcttttttaaaaaaaggcaagaaagaactaaactcccccctccctctcctccagtcgggctgcacctctgccttgcactttgcacagaggtagagagcgcgcgagggagagagaggaaagaaaaaaaataataaagagagccaagcagaagaggaggcgagaagcatgaagtgttaactcccccgtgc

SEQ ID NO: 29227 - DNA, 1587 bp, Artificial sequence
  DNA replication origin
ctttcctcacccattttcaagcaaaaatgctaggggagcagctgtgtattaaaaaggagttggggcagaaataatgatcataaagatagtgaactttcattgagttatgggtcaaacattgtgttaaatgttcagtatgagccacattcctatgagctggctctattactgtttctattcttttttttttgtgggggggaaattaagtttcaaaggttaattgattatttaaactcaaacaactagtacttcttggaatagatcctaaattggtctgactctcaaaccagtgttttaaaaatactactctaaactgcttccttgggatatggcaatgtgagttcggcgtggcagctatcgtggtggtgtcatggtggtgggaacagcagtgatggtattgttttcactgctcttggtggtggtgaaattaatgatgataagtaactggtgaaggtggttgtcctcatagtggtgtgatggtgttggtggtggtagaagtggtgctggtgatggtggtgtgggtggtgataatagtgataatggtggtagtaattgttgtagcagtgatggcagtgttggtaatggtaatgataactatggtggtggtggtggtgtggcagcagggccagaagtagtgatggtggtggtggtgatggtggtgatgagggacatggtgttggtgggaggtgtgaggagggcatggtgatgatggtgctggtggtggtaatggtggaggtgggggtggggtgatgacggtggaggaggtgatggtggggagggggtggtgacggtgatagcagtggtgatgatgatggtgatggtagtggtggtggtgattgtggtggtgatggtggggagggggtggtgatggtgatagcagtggtgatggtgacggtgatagtggtggtggtgattgtggtggcgatggtggggagggggtggtgatggtgacagcagtggtgatgatgatggtgatggtggtggtggtggtggtggtggtggtggtgatggtgatggtgggagagggatgatgatgatcatgatggtgatggtgctggtggtaatggtggtggtggtggtggtggtggtggacgccatggtaggagagagggtggcaactgttgaggtagtggtgtggtggtggtggtggtggtggtgaggctggtggtggggtggtggtggaaatagaagcgttgttgctggtggtgatgatggtaatggttatggtagtggtagtggtggaggtggtggtgatggtgaggataggggtggggtgatggttaccatgacagaagtgataagagtgatgaggtggtgatgatattgattatggaggtggtagctatgggattcttgacggtggttaattcaccctcccagatgatattttcttttgagaaattctgaaaaaagaacacttccgttttctctgtgcctttaaaggtcgattcacttgtttttttccataggtttcaggaaagaggcactggcctttacttctccacctcgattcacttccatgctgttgacaaatgttatagttgcccaggatcagagggagagactgaccctgtgaccatttcccca

SEQ ID NO: 29228 - DNA, 845 bp, Artificial sequence
  DNA replication origin
tccgtccgcgtcagaatttggcgactaaagcatgcatgagctgggaatggtgacaagttgcaaagggaaagggggagggtaggcagggtaagaaagaaaacttagggctggggtgtgaagggtctcttggtttgttttcctggctgggacagcgaacttctccgcagccaagtttctggagcggggccggccgcttcgcggctcccattggtccggccgcggctgttgctaggcggatggaccaatggcgcgcgaagggcgtctgggctcctcctcttctgggccgcggctggagcccgggaagcggcggcgtccgcgcttctcccggcggctctttctcttcttcttttttttttttttttttaaggcggggcggggctgggggcgcggcgtcgcggagctcgggccggtggaaggtttacctgctaggctcgtcccacctgtgtggagctcccatcgccctccagcgttgcgcagcctgaagggacaggacggacaagcgggtattttttccccctcacgcaaatgtgtattttgtgttttaataattttatcaactcggtgaactctcgcgagagcactcgctgcgtgtcttgcctctgtcgtccttcccagtctctaaccggcccctgggccacctctcacaattgagcccccagcccttgaacacacgcacacacgcacacacgctgagctaccgccaatgcttgagcccccagcccttacacacacccatacacgtgcacaaacacacacacacgctgaaccaacttcaacacttgagcccccagcccctagagagagacacacacacacacgctgatgcgggagcatttagcacagtt

SEQ ID NO: 29229 - DNA, 1844 bp, Artificial sequence
  DNA replication origin
gctgacccccccacctccctcccggacggggcggctggccgggcggggggctgatccccccacctccctccaagatggggcggctggccgggcggggggctgacccccccacttccctcccggacggggcggctggccgggcagaggggctcctcacttcccagtaggggtggccgggcagaggcgcccctcacctcctggacggggcagctggccgggcggggggctgacccccccacgtcactcctggatggggtggctggccgggcggggggctgactgatgcccccacctccctcccagacggggcggctggcctggcggggggctgacccccctacctccctcccggatgggcggctggccgggcagggggctgacccccccacctccctcccggatggggtggctgccgggcggagacgctcctcacttcccagacggggcggctgccgggcggaggggctcctcacttcccagacggggcggctgccaggcggaggggctcctcacttctcagacggggtggccgggcagagatgctcctcacctcccagacggggttgcggccgggcagaggtgctcctcacatcccagacggggcggcggggcagaggcgctccccacatctcagacgatgggcagccgggcagagacgctcctcacttcctagatgtgatggcggccgggcagaggtgctcctcacttcctaggtgggatggcggccgggcggagacgctcctcactttccagactgggcagccaggcagaggggctcctcacatcccagatgatgggcggccaggcagagatgctcctcacttcccagacggggtggcggccgggcagaggctgcaatctcggcactttgggaggccaaggcaggcggctgggaggtggaggttgtagcgagccgagatcacgctactgcattccagccggggcaccattgagcactgagtgaacgagactccatctgcaatccccaggaggccgaggctggtggatcacgtgcggttaggggctggagaccggcctggccaacacagcgaaaccccgtctccaccaaaaccagtcaggcgaggcggcgtgagtctgcaatcgcaggcactcggcaggctgagtcaggagagtcaggcagggaggttgcagtgagccgagatggcagcagtacagtccagcttcggctcagcatgagagggagaccgtggggagagggagagggagagggagaggagggagaggagggagaggagggagaggagggagagggagagggaatagaattatatttttgcaaactttgtacatgctatataaagtcaaaactctaaatatagtattatttaaagactcacaatctctagaagaacctccagaataatacagagaagtataacacaaaatctagtgaagctaatgaaagggaatatttaaagtaataaaaaataaaataaagacttatcccaaaaggaggcaagcagactaagggaaggataaaaatagatgggccaaataacaagatgtatccttaaatctaacaacataaacaaataagttgaatgtaaatggtctaaagagtccaaataaaagacagtgattgttaaacttattttttagcaagtggcaacaagaatcaacatatgtctatgagagattccctataaatacgaagaaagaagtaagttgaaaataatagtgtagaaaaagatataccataaagacattaagctcaaggaaattcttgttgctatactactgtcggattaaataggcatcagtcttaggaatgctatcagaaacatagacacttcataataagagtgtcagctcgttagaaataa

SEQ ID NO: 29230 - DNA, 920 bp, Artificial sequence
  DNA replication origin
gaggtgggggggtcagccccccgccaggccagccgccccgtccgggagggagacgggtgggggggtcagccccccacccggccagccgccccgtccgggaggtgaggggtgcctctgcccggccgcccctactgggaagtgaggagcccctctgcccggccagccgccccatccgggatggaggtgggggggtcagccccccgcctggccagccgccccatccgggaggtgaggggcgcctctgcccggccgcccctactgggaagtgaggagcccctctgcccggccagccgccccatctgggagagaggtggggggggtcagccccccgcccggccagccgccccgtccgggagggaggtgggggggtcagccccccgcccggccagcccccccatccgggaagtgaggggcgcctctgcccggccgcccctgctgggaagtgaggagcccctctgcccggccaccaccccgtctgggaggtgtgcccaacagctcattgagggcaggccaggatgacaatggcggctttgtggaatggagaggcgggaaatgtggggaaaagattgagaaatcggatggttgctgtgtctgtgtagagagaggtagacatgggagacttttcattttgttctgtactgggaaaggttcttctgccttgggatcctgttgatctgtgaccttacccccaaccctgtgctctctgaaacatgtgctgtgtccactcagggttgaatggattaagggcggtgcaagatgtgctttgttaaacagatgcttgaaggcagcatgctcgttaagagtcatcaccactccctaatctcaagtacccagggacacaaacactgaggaaggccgcagggtcctctgcctaggaaaaccagagacctttgttcacttgtttagctgctgaccttccc

SEQ ID NO: 29231 - DNA, 1328 bp, Artificial sequence
  DNA replication origin
cgagttctagttggtgaaatgtagccagaggttcctggaaaggctttccttctcaagtaaagcctggctcagagaaaaccactggtctctttccttttcttcctcctgacatgaacatggggcaggaaggagcatggagaagacaagaacaaggctctcagaaggaaatggtgtggctggagccatgagaactggttgtggagggggtgaggaaggtgggagaggtgggagtgtggttgagtggggagggtgggagaggtgggggtgtgtttgagtggggagggtgggagaggtgggggtgttgttgagtgaggagggtgggagaggtgggggtgtggttgagtggggagggtgggagaggtgggggtgtggttgagtgggaagggtgggagtggtggggatgtggctgagtggggagggtgggagaggtgggggtgcggttgagtggggagggtgggagaggtgggggtgtgggtgagtggggagaatgggagaggtgggggtgtggttgagtgaggagggtgggagaggtgggagtgtggttgagtggggagaatgggagaggtgggggtgtggttgagtagggagggtgggagaggtggggatgtggttgagtggggagaatgggagaggtgggggtgtggttgagtggggagagtgggagacgtggggatgtggttgagtgaggagggtgggagaggtggggatgtggttgactggggagggtggcagtggtggggtgtggcctggagatacagcagccactttgggaccatgaggatatttgaaagacatgaagaatagaatgatagaagcacgtttgtgacattgtgacatacagcagactttatgcccaccttttgatttcttacctatttaaacactgaaatctggtcttttccttgtaggcaaatataatttctgacctacgtaatgatgtatgcacaagaagcctctcttgaatgtattaattcagtaaacagttatggagtccttacaatgtgctagtgggactttgaagatgaatccaaatttggatcctggcctggaaaggctcaaagcccaatatgggaggtaagaaatgtagaatccatataacgatggggtctccccgccccttaagatctagttatgagtagctgcaattcctgtgaattccaaggtagtttcaccacctcaagttcacctttagatctgacttctggcttcttttaggaagttcccatctctaaatctcatctctgttcctttatttctgccagcctggatacaaatgtgaaacttatcttcttttattaaccaatcaatcacctcctgccaaaacaaca

SEQ ID NO: 29232 - DNA, 1431 bp, Artificial sequence
  DNA replication origin
gagaaggggaaaacagtcacacaaaacaacaatgataacaccaagaacaacagaaagcaaaaaggaaagggaggccagcagaggtaaaatcctgagctccatccaattatggcttccccacagaccgaaaagtatggagaatatgaaaaattaacgtggcaccgtcttctagactctaagtgttcataattgtgtaagatgttctctccagcactgtactgtagacatgtcaagaatcatggcagattacccacccttctcacattactagactccaagctcctgtatgactggggctgtctgagtaatctcatgattccccagcacctgtgcagctcctgagacagagcagggggcccattagccattactgaatggatggaagaatggatgaacaaacagatagatggatggatggatgacggatggaaggataatgtatggatgaatggaaggatgatatatggatggatggatggatggataaaaggatgatggatggacgatgggcagatggacaaatagataggatagatggaagaatgacagaatgacaggtgaatatttggattatggacagacagatgaacagataggatggataaatgggtggataaatagatgaataaaagaattacagatgaatggatggttggatgattgacagatggatggataggatggatggatggaaggatggccgatggacagatggttggatgataggtgaatcgacaggatggatggaagaatgggtggacagatggaggaacagaaggatgatggatgaataacggatagatggatagatagaaatggatggatggatagatggaagaatggcagacacatgaacggttggatgatggacaaatggacaggatagatggatgaatggatgggtggatggatggatgggtagatggacggatggatatgggttgtaaaatgaataaaaggatggcagacagatggttggatgatagacagatgaacagataggatggatggttggataacagacagccagatgaatagataggatggatggatgaatggatggatggatgaatgaatgggtggacaaacgaatgaacagaagaatgacggatggatggttggatgatagacatggataggatgggtggatggaaggatggcagatgggcagatggttggatggaaaggcaggtgaataaacaggatgaatagaagaatgggtggagagatgaacagaaggatggtggatagatggatggatgatggacagatagatggataggatggatggaagaatggcagatgcatggatggttggatgatggacaaacaggacagatggattaatggatgggtggatggatggatcaatgaatggttggatgctggactgacagactgataggatggatgggaggaagggtagatgaa

SEQ ID NO: 29233 - DNA, 1435 bp, Artificial sequence
  DNA replication origin
gcgcccgctccctctttctctttctctcgcacacacactctcttactccatctactttgcggccttggaggggaaggaggaagccgggcggagccggggcgggggaggtagcggtcccggggaggtgtttctcgcccgacgagccgcctcgagtacagaaagtacaggtaaaagtcggcgccggacgtgctgggaatgcgggggggcgcgccgcggccggcgggggtgtggggcgggggttgcgcggcccggctgggccgggggcgcgggggaggaggggggcgggcgatcggagcggagcctggccggggcgaggcggggtcccggggggctgcgaagggggaggctgggtgggggttcggggggacaaccgccaaaccgctccccggggtccccgggccacctccctcaccccccacctgctgcccccgcaccagctcggacgccctccgggctcgggcgtgggggtggcccttgcgggtgtcgtgctccctgggggcgaaagggggcgctgcggagggccctgggtgggaggagaacgtggaagtctgaggtgttggggacataggacacagatgccagcccagcgcccagtactctcgtcaccctcagtggatacctggctccaggtcctaatgagtagtggccagcgttggatactctcatgtcttcccaaaagtggcgaaggaagacattagtctggcatctttcaaacaatggaggaacacccatggtctttggggagcaagggcttaggaacacaactgttactgctttgggttttccacaagtggacaacacaaggaacagccagccaccactccccagagggaatggcctcagaggtgttggccgccaagaccaggttcaggataaagaagttaagagaccagccatcttcaaccagagggccttctgggcctccgtgaaaccagccgcatgggttagcctggacctgcacttcccggaacataaattggttaacgccatctggttcttaaggctttggggctccattgagataagcacccagaaggggtagaattagccttttgcataagacattgtagggtgatccacccacgacagactgcagggggtgattcctaagaagctctttcctctaggccctcgtgggcagttgaagctttttcaggtggtgggtttgctgactggcgttagagaagaagaatggagaaaggagcacaggtctcctgtgtgaccatgttcttgtgaatgattctggagttggtgaggcccaggcctggactgccggccagcaggttcaggtggggtgggtgggagaccttagagctccttgaaagaatggtgtatgttgccctcttcactaccctgtggccgtcctcatctctatgctaagagacaaggtgaagttggatagagatcttgtgaagaacttcggcaaatgtggcca

SEQ ID NO: 29234 - DNA, 967 bp, Artificial sequence
  DNA replication origin
acggccgcgcagcgcgcccgggaggcacggacgcggcccgagcgccgcggcccccgcgacccggcgacccggcggcggtggctgcagccggcaacggctcgccccggcgccgcctgcaggaagccgcccggcgcccgccgccggcccggacgctgctgccactgggcgagtccccgccccccgggagcccggcccggcccccggggcggggaggcgggggctgctgcccggccgcgccccgggggaccggtcccagagtcgactagcgctcgggcccgccccgccaccccgggccggcttcgggagcagctggcggggcccccggggggcggcgggccaggtgcccgccgggtgcgcccgatctggggccgcgaaggggcggccggggagccaggtagagggctgcggctgcagacctcagggaaggggccccagccgagccccgccggcccggggtccccacctacctcctccaccctcgaggggagtggacgccgcctgggagacctggcccctcggggctgcgcggcccctccctccaggctgggttgtaagatgtggaggccacagggaggaaggatgaaatggcccatccagaggcaccatggggatccaggacaggcgtggccaccccataaaccctggaaagtctttagagccaggggtggccttccctcaacaacccctctccccgaatttattcactcatcccttactcaaacatttaccaaagtcaacccaagtgcacagtgtccctggacaggcaaaactgggaccctgcccagagacagtttgaatccgcaagtgaggagtgtaatggagcactcagttgttctaaaaggtcatcctgcgtgtgacaggctgcggagctggaggagctagagaagctctccaaaacccaaatccgttcctaagccatctctcatggataaatggtcacccctctgcttaaagggttctccttata

SEQ ID NO: 29235 - DNA, 1137 bp, Artificial sequence
  DNA replication origin
agatggggtttcaccttgttagccaggatggtctcgatctcctgacctcatgatccacccgcctcggcctcccaaagtgctgggattacaggcgtgagccaccgcgcccggccttttttttttttttttttggagacggagtctcactctgtggcccaggctggagtgcaatggcatgatgtcagctcactgcaacttctgcctcccgggttcaagcgattctcctgcctcagcctctcaagtagctgggaccacaggtgcgcgccaccatgcctggccaatttttgtatttttagtagagacagggtttcgccatgttggccaggctggtctcgaactcctgacctcagttgatccaccagcctcagcctcctaaagtgctgggattacaggcgtgagccacctctcccggccccctgacagctttggggaccaagcagtgctgtctacccagacttaaaaaaatgggtaggaattagccaggcaatgggaaaaggttgggggatgggttggagggacagtgcagagagtggcccatgtgttgtggcccaggcagtgggaacaaggtggggggacaggttagagggacagtgcagagagcggcccacgtgttggaggaggtgaatgaaggaggttcatcctggctggagcctgggtcaccaggaagggaaatatagagctgggataactcacccacgtgaggtcatgaagtgtctttatcctaagagaatgtgggccgtcagtggctgtggaatgatgggatttgagaaggggtgataatgaaggcagggagacaaatgcaatccctgtgcctggctacagatgccagaggtgggtggagaggaggagagaagggatgcctcggagaggcactcaggaggcaggaccagcaggacgcaatcacggaatgcatgtggaggtgaggaaggggcagtgttgaaggagatgcatgattctcaacacaaacaatggtggtgttagccactaagagaggggaccccagagaatgtcataagttcaatatttgacatattgaggtccaggtttctgtgggacatccagcgggaggtgatcagtggggaggtgaatgcagatggtgcttctgtcattagtgactggtttccaggttccctgcaa

SEQ ID NO: 29236 - DNA, 1372 bp, Artificial sequence
  DNA replication origin
atgcattcagctatctggaagttctccaaacccatttcttttgggattttatggaggcttcattacctaggaatgattgatcagcttaagcttcagcccctgtctcctccccagaggttgagggggagggctgaaagtctcaagcctctaatcctaccttggtctttccagtgaccagtcccatcctaaagctacctagggactgtgagtcatcagtcaactaattagcatacaaaaaaacaccaatttgctgattccaaggattttaggaattgcatgccaggacaaagaccaaatatatacttcacattatcacagttatcttgcaaggcaaagggacttggcagttggagaaattatcctggatgatttgaatgggcccaatgtcatcacagggggcctcaagaatagaagaatcagagggatcactactgaagaaatcagagtgatgtgatgtgacgaagactcaactcaccgttactgattctggagatggaggaagggtccgcaagccaaggaatgtaggcaacctctagaagctgggaaaggcaagtgaacagattctcccctggagccttgggaaggaatacagccctgctgacaccttgatcttagcccagcagtctcatttcttttgacctccagagctggaagataataaatttgtgttaaggcagtaagtttgtggtaatttattaatagcaagagaaaacgaatatagctgctagtatgtaaaaggtggaaattttcacataaaactctagccataccaaagatgagtagcagctgcccccttttaataaaggatgtgtttccaatttcactgcagtcctcacccctcccttttgtctaccccagcctcctatgtccatttacatgaactacccagtctaagtattaagttttgtaatcgtatactgaactgcagtgtctcccaaacagtaatcctaatttcagcagctaaaatagaagcaagcaaatccagccttcttaaaatgattaatcctatcaataataacaatcttttcatttgtatagtgtggtctaggtcaagttacttaatttatataagcctaaatgtccttctctgcacaaggtggggcaagttacagtacatacccgctacagtcgttttgaagacaaaatgagacacagcatgaaaagtgcatccaccagacccacctggtacccagtaaggcctaggtaataaacaacggcggaaatcagtgtacttctgcctcacctgccactagacatttgggttgtttctaatctttgggaagtaaacgcattgctcaacgtattgctttttcttttatgtgactactgcctgaagtcactttcctaggaagaatggatcgattagagaggc

SEQ ID NO: 29237 - DNA, 1137 bp, Artificial sequence
  DNA replication origin
cgactgaggggcagccggccgcggcccgcgggggcgacgcagcagcccgctgtccccgcgccgccggcgggggagctgatccagccgtcggtgagcgagctgtcccgggccgtgcggaccaacatcctgtgcaccgtgcgcggctgcggcaagatcctgcccaacagccccgcgctcaacatgcacctagtcaagagccaccgcctgcaggtgagcccgacgcggccggcggcccggggggccgggcctggctccaacaaagcgcccggcgccggcgcgcgaagccggcctcggggggacgagcgccctgcgcgctgccgctgccgctgccccaccggcctctgccctccccggccggaggcggctctcgaaccctcgcggcaggcgccgcaggtgcggcctctgggggggaggaggagctgggagccccgggtccgccgtacgcgccagttccctggttccctggctccctggccccgagtgtcgtgccggacgccggcccaggctttttacacttttttgcctgtgagttcttaacggcgttttggcgagggacgcatcgtctccattatattaatgagaaacagattatgcaacctagatgatgcggggctttaaaccggggcctctggttctaaagccctgtgcttgccacgacacccacaatgccgcccttgggtcctgcccagtggactgtatgtgccacaataactagaagagagggttttaaatgttctcaccaccaagagacaatacgtttgaggtcgaggacatgttaaacactctgacttgatcactatgcaatgtatatgtccatccatgctgcacaccgcaccccatcagtaggaataattactgtgtgtcgattatgaataaaaaaatgttttaaaggagcggtaggtttgcctctaaacaccatcagtcagtttcacggtgttggtaagatcagctcaggactgagacctaagggaaattgcccctgtggctcttctttaagagggggacacagtaaatacaccatgacaatagtctcaacaaccctccacgttatgcaaaacagggcagtcattttcaaccttgggacacatctgtgacaagcttattaaaaatccagatgtccagccccaccccggacct

SEQ ID NO: 29238 - DNA, 1660 bp, Artificial sequence
  DNA replication origin
catgcaatccctagggcaaaggctactcgcgggtcctcccgctacttaagggggagaagcggccgcagagccagggatcccaacagaaataagaagggggcagggtccgcgctcgctccgccccggtggctcaggagcggtgccccggcgtcctccgtgtcccgctgggcccgggacaagcagcccaggcggggagggagcagccgcccacgtgcccgccgcgcttacccgagagcagagcgggtccagtgcgcagcgtacggacggcgcccacccccagctgccagggcctcggcgggcagggcgcggcgggtgacgggaccgcgcgcagggtgcagagcagggcccgcacgctccgcaccactcgcagcgccatgttcgcaggggtgcgggggtcgcagcgctacgcctcggccacccgcgccgggaggcggggcggggaggggcagttcgcggccggagggagccggctggatggaggcgcggaggcggtgccgcgggggcgggacagagcctgactgggcagagcgtggagggcggagactcccaggcgagggggcgaggcagggtctgattggccagcacgcggagactggggactccagggcctggcgcgacctcggatacggcgacgcgaaagaggggcgtgggcatggggaagaacctgaggcccggaagaggcagcaccgagaggcggagactagcgcggcgggcctgggtatgattgggctgcccgcaggaggggggcggggcctagccccagactgggttcctttccacatgtgtatctcttttactgcctctgtcataagttttcaaaggtggtttcaccacctcacgaaggaattcaagaacaagtcggaaagtcgtgaaagtacagaggtttactgcaaagtacacactgaagaaagggcggactcaaaagagggccacacaatggggcttggggtttccatctttatgggtttctttgagaaatggaatatacacaaaggtttctggaataaggtggagacttgtcagaactgtggtgccacccatttttacaccaaatatgggtgttcccggaattgttgtggtgccggtgggtgtgtgacttagtatgttaatgagtcctaggtgaagcctaggtcaaagccacaccacgttgggtccagttggttttagccaggttgacccacaccctggtttttcagggtcttagcccatagcttgtgcagctatttcaacagtttccttttgttagacagaactgcagcctggaagtttctattctccttcaactgctctgtaacgttcctgtctcaaagagccccagggaccccaaacaggaccggcagaatccagaagcttacttaaaaaggaataaagacttgtccaagggtcataagtggcttcttggtggagactggacccaagccagtcactaatgcagaaatattcaaaacgcagagagctgagacccagtgtgcacaattccttgtttcatcggccagcggtgtgaccaaggccttccgagaaaagccgaagtcatcatcccaatccaagaagtcagaaaaaaattaggttctgggaaaaacctcacctttaacacagattttatggagtggccatgagtcagcaaagaaatactgttctgaaaaacaccttaagctacaca

SEQ ID NO: 29239 - DNA, 1047 bp, Artificial sequence
  DNA replication origin
tgtgtccatggcctgttgatgatgcctatctctgtgcccaccaggatgagggagtgcccagggtgcctctggggctcaggcagccacctgctaagccaccgcagtgttccccagatgcggtgcaaatacctgacaatgagtctgggcactctgcggctccaaacccttcgctctggggaactgggttgaatggatgatgggcttctgcctgggtgaggacctcccctcactgcattttccctcaccacaacccctcactcccaagactttcccagggctgcagtgtcagagggaggcccagcagcccctggctctgtctctgagttgatgacttttggtcccatgggacactgcaatgtccctgcagcccagacactgcatggaagtctgaagaaattcacattaggatttagaggggagctttcaccaaaatcacagactccaactttccagaacacacccccatcactccctcagtgcaccccacctgtttccaggggtgggagaggaagatcgggtggggctagggatggaaggggtcaagcctgaggtgacagggaggcagagtggggtgagggttggggtggagtggggactaggatgcgatgggctggtggataggatgatcagggaggagaggaaggcaagagactggatggagccagggtgaggatggggaaggccctggggtagggagtgggccaggattgtgctaaaggccagagatgaacggaaggccagggcttgcatgggaacatggtgggcagtagggggtgtatttagaaggacatcaggatgtggtgggggccaggatgtaagaggggctttgtttctcacatgatcataaaaaagaattgaaaatttaatgtttttggctgggcgcggtggctcacgcctgtaatcccagcgctttgggcggccaaggtaggcagattacctgaggtcaggagtttgagaccaacatgatgaaacactgtttttaccaaaaatacaaaaattggccgggtgtcgtggcacatgcctgtagtcccagctactcaggaggct

SEQ ID NO: 29240 - DNA, 1106 bp, Artificial sequence
  DNA replication origin
ggatggaaggatggtgagtgaatagatgggtggtagatgcacatggtagatggatgttgggtgggtggatggatggatggtagatggatagatggatgaatggtgggtgtatagatggtgggtagatggatgaatgatggatggatgggcaggtgggtggctcaatggatggatggtggataagtggatgagtggatggatggcagaacatgtagatggatgaatggattcatggtgggtgggtggatgggtaggtagatggatggtggatggatggtgggtggacggatggatgggtagatggtgtgtgggtggatggatgaatggatggatggtggatgggtgggtggatggatggatgaatgatggatggatgggtgggtgggaagctcaatggatggatggatggtgggtaagtgaatgggttgatggatgggagaatgggtagatggataaatggattcatgatgggtgggcgggtgggtgggtagatagatggtggatgggtggtgggtggatggatgaatggatggatggtggatgggtggatggatgggagaatgggtagatggttgaatggattcatggtgggtggatgggtggatgggtgggtagatggatagtgggtagatggatggatggagggatggtgtgtgggtggatgggtaggtgggtgaatggatgaatggatggatggtgagtggctggctagataaggggtggataggtggatgggtggacggatggtggatgggtgatggataggtggatgaatggtgggtaggtgggtggatggatagtgagtagctgaatgaatggtggatagatggacggtgagtagatgcatgaatggatggatggtagatgaaggaatggttggatggtaaatagatgatggatggatggatggtagatgggtagataaattaataaaataataaactggagcctaaataaaaggaaattagaatagtaaagggatttctttcttccaagaggaatcccagcatctcctcttctcttctaaaggaaagtactgacttcatggtccacctcaataatctacgggagaaagtaccacactggatcttgtgtcatcaacgaaa

SEQ ID NO: 29241 - DNA, 1884 bp, Artificial sequence
  DNA replication origin
cggctccgggcagcaccgccgcgcccgcccgccgtagccccctccccacctgatgtacgggctggccgccgccaggatgttcttctgcaccgggatctcctccccgtcgaggaccaggtgcgcgtcgcagaagcgagactcctcgcggaaagagctgagcgctcgcagcagacgcgcggcgtgctgagggtcagacacggcactgccctcagccatcgcggcgcccgctcctctgccgacgggtccggctcccgacaccgtccggccggacccctcgagcggcccgagtcctgcgcgcgcgcccgcccggcccggctctccgcgctctgagcagaagctggagcccccgggacgtgcctgtgctatccgcggcgcgctgggccggcgcctttaagaagccgcgtcatgaagtcatttctccgcgacgcccccgcaccgtcgctccccgccttctcgcctccgctgctggagatggccaatcagaagcctccttcctccgcccgcctgaccagctgcggctgggtgcagcggaaggtgtctacggatgagataggtcgctcccgcgatggagggatgtgcgggcgggctaggattccgtggttaagcctgtggcctctggagccgcgagtttgaatcctggttgcagctgttccacttactagctctgtggccatgggtaaggtgcccatcctcagtttctccgtctgcaaaatgaaagcgaattcttagtgttgttgtggactcatgagatgatgcatggaagcaagggcgaagtcgctgtagctttctttatttatgagagaaaaggagctgcccaggtgagaggacaaaaacccgagaaaacagacccggaaaagatggttttggttgcgggctaggaaggagatgtagcagatgaagctggagaagtccgaaggaggccttaaattttgcagggcctccttggtgtgggaaggagtttggtttctgcagtggtgaagaaccatggaagtaccgtatttagcaggggattttgtgcaggtcactcagctcctgcgtggagaataaggcggggatggatgtgctaaaggcagatcgatgcttaggtattgcaggactagagagaagggaatgggcacctggatgaaagggtgatgcgggggcgggggtagacaatagtggattgttttaaaagaaattgtgagggagagggagttaaggataaatattctgtttgagtaactgcatgcatgtttgcacctttcagggagagctaggaaatgctgaaggggtgggcagtagagaggcagatgtttagattcagacaggctcccaacccagtgaagatcaaagctgtgatagaaaggatcgctgggtcagctcagctggcaggccaagccccacggtatctgaagtttccctggaggttgctcagggcacatgggagtgtggaatgtagcaaccattttgtgcaaacgttagggactccataagcctctaaaaaattagcaattgtatgaggactccggaccagaagaatgtggctagcattccaggcaagacaggatggaattttcactgtccttcaaccaactgaaaggctccaataaagtcttgggtatttaccctgaaccagccaaggctttggagtcactggcaggaatccgagtatctaactgttttcagggcagaatagatggggagggtacggctgtggaagacacatgcatttccactttcttctgtaaatgcagctcagtgttcccggatgcaatgataaagatgtctaggatttgcttcaaaacaaaacaaagggatggggaagcagatgggagtgtagatgagtcaaaagtggccgcaagttactaattgttaaagccacgtaatggggatgtggagattcgt

SEQ ID NO: 29242 - DNA, 849 bp, Artificial sequence
  DNA replication origin
aacacaggaacagaaaaccaaatactacgtgttcttgcttataagtgggagctgaacattgagaacacatggacacagggaggggaacaacacacactggggcctgtcagcagcggggtgtgaggtgagggaaagcatcaggataaatggctaatgcatgtggggggctcaatacctaggtgatgggttgataagtgcaggaaaccaccatggcacacgtttacctatgtaataaacctgaacattctgcgcatgtatcccggaacttaaaataaaataaaattttaaaaagtggaatttgggggtgtcacagttcctgcctgggccccccatggttgggctctggctgtcactcagagggatgaggctggagtgccaggccccagccagatcaggaaaggcctcagaactcacattaaggagcttgaatttcatcccgagtttattgggaaattgttggtggatgttaagtaggaagtaatgtgatcagatttgcattttagaaaaatcagtctggctgcagagtggatggtggaagggagcagggcaaggctggagccagggaggacagttaggagactgctggggccatcagggtgtacgtgtgtgttggggagggggcagtggtggtctgagtcatccagagggcatattatggtggcatggatcatttggagggggggggtatggtgatggcttgattcatctgggatggggtggggtttacagtggcccccatcttctgtgaggctgggggaagaagtaactgtgacctggattaataactgggcagtggggaaaagagccatgtgcaacctaccctctgtggcccgtgccaggcacggctca

SEQ ID NO: 29243 - DNA, 1090 bp, Artificial sequence
  DNA replication origin
cctgtcctgggtgagctggaccagggccagctcggtggtggccactggacatggagtctcttctggcctccagccgtgccaggtgcccatagccttggcagcaatggcgaggtgcagaagaggagggtggcccacacgcatctgtgcacgcacctgctctgttcccttctatgcatctgtagttgctcggctcacacggagctcagcaaatgtcgggggattgggcatgtgatcgtgggctacaggccaggccctaagctgggtgccctagggaggcagtcaggagtgaggaaagcctgagccccgcctgggagatgctgatgtcaaaggctgggaaacaggttcaaacatcacagctcacagaggagactgggatggggagagcggttttcgatggtgggggaagagttgcactgagataggccttgcaggacaggtaaggtagagacaatgggggaaggagaggtaaagtcagggaggcggctgtgctcaggaatcagggagcaggtctgcagaagcccgggggctgtacatccaaaagggctggatgattgaagacgccggtggtggtgttgggggaaggtgtggggtttgagtcttttaaggaaagttgctgggggtgttgagcggggcagtcgcagactctctagagaatttgaagtgctacattggtatctgtgtcccctctgtgaccttgggcatgtcacctgacctctctgagcctcagtttccccacctgaaaaatgggactaagaatagtcctactttctgggatgcctgtgagtgagcccagcacgggaagtggagccactgctaggattcatgtattcgacatttattgagcacctactgaataccaggcactgaggctgaagtgggggttgatggtgaagggtcaaggctcctggcttcccagggtaggtgtgagtacaaagatgcacagggtaaccaggttctcgggttctggaagtagggtgaatagggccgtggtggcaggaagggatgtttccccagcctgcaggagtcagggtgggttttctggaaaaatgaataatgcatggagacttgaagaaagagaagcctcctagat

SEQ ID NO: 29244 - DNA, 1527 bp, Artificial sequence
  DNA replication origin
gcgtgtgtacagagcgtgtgtccgcgcggccgtccgggcgagagtggccgcgggcggggcgggccgcgcgccgggctcccggagcccggggcgcccgcgcgattggtccccgcagggtcatgtgcccgcccctctgacgtcaatggcggcaacggcggcggccgcggcggcttcggcctctcgcgggcggagtccgcggtccgggcggggtcgcggcccacgacggggaggcgcggcccgacgggaggggcagcccctggggagggggctggggcgggcgagccccgcggggtcccggcccgccccgcctggaatgtggggagggggcggggcgcgggggcggggcgcgtgacgtcacgccagccgcgcccccgcgggtgcccgggcgggagcccagccaggctgccggagcctgggggcccgcgcctcacccacccccgccgcccccgggccggactcggacgggtaaagaaggatacccgagggccgggggctgggtggaaggacggggactggaaccctcgacccctgacgccccctccgctgtccaggctgtccagcgggctggccagatggggccgtgggacggggacgccttcccgactgaaagtgtccccgcggtgatccggaggatgagcccaccctgccctgtctcccactgcgggacccagccggcctcgaactcctggcctttgacgtctgctggctttggccttgggggtcctcaaaccttctggagagaggggacggtccgcccatcccccttctttcttctgcccagggagacagagcctcttctaggaacccacttaaagcaccccccaacctacacagccacccctcttgtgcgcaccccagcagctccccctacttcaccttccctgggaccccacctggtcattttatctgagttcacaggcccagcaccagcccacgagagaaccatattcgattctcttgtgacccagggtatcaggaactgcagcctggatgcaaaaagctccctttctgccatcacaagcagccggcacctaaggccacctagcaaatgctcagctcctcagccaggttttcttatctccacgtgctcctgcagctaataacgttaaaaccctagatttttgcctttttaagtgaaggcgcctctgtagtgaacacatgaatgtgtgcagcgtgtgttgaactgcgtcgtgaacactgcggaatatccacagcatctgtgccgttggtggaaattattcaccccccctctcccaagaacaggcagcatgaaggtgctccccagaggaccctctccccgagcctggccagggtttcaggcaggggatgaaaggcaggtcccaggctgcatccctcaccaaggaaagaagactcacatccagcctgcccaggagatgcctccttggggaggcacaattagattagaaagttagaaattccttagctccccacaatttgctgccatttccttccagttttgagcttgaacagccttgagaaaaccaccaagcatgaaggggcaagccc

SEQ ID NO: 29245 - DNA, 715 bp, Artificial sequence
  DNA replication origin
tggcttctggaaattctttgggtttgggggtttggaggttttgttgtgttgtttgtttttttttttaaatctgaggggtggtattttgttttcccctcccccacccctcagatccagatgggccaggggcttccagagagaacccccaccaccatcagggcccagcgtcgggtccatcctcgagtcccagccaccagaaacacaagagctgggggcagaaggtccccaggcacccagcctggcggtgggccgagtctccagcattttaagggtctctcctgagcccggtcggctggtttgggcttcagactccaaaatcgagccccgcgagcaggccaggagcgaggcgccctggttctccccgttcccccggcaccccccaccgccccccaggccctgggctccaggtgcagcgccagggggcagccagggagggcgcatctcgggccccgaggagaggcgggggtgcagccgcgcagagccactcaccgtggcggacgccaggctgttgtcggccagcgttaggtggtgcggctcccagcgcctcaggaatttcgaggtgaggatcttgctgagaaaggtccgcgggtgccggatgacacagacctgaatgtcgccctcctgcagcagtttgtacctcatcccgttgcaaagcagaagagcccggcggcagggcacggcgcccatcttcgtgccttcgggggccgacacgtcg

SEQ ID NO: 29246 - DNA, 1567 bp, Artificial sequence
  DNA replication origin
aacgggatgaggtacaaactgctgcaggagggcgacattcaggtctgtgtcatccggcacccgcggacctttctcagcaagatcctcacctcgaaattcctgaggcgctgggagccgcaccacctaacgctggccgacaacagcctggcgtccgccacggtgagtggctctgcgcggctgcacccccgcctctcctcggggcccgagatgcgccctccctggctgccccctggcgctgcacctggagcccagggcctggggggcggtggggggtgccgggggaacggggagaaccagggcgcctcgctcctggcctgctcgcggggctcgattttggagtctgaagcccaaaccagccgaccgggctcaggagagacccttaaaatgctggagactcggcccaccgccaggctgggtgcctggggaccttctgcccccagctcttgtgtttctggtggctgggactcgaggatggacccgacgctgggccctgatggtggtgggggttctctctggaagcccctggcccatctggatctgaggggtgggggaggggaaaacaaaataccacccctcagatttaaaaaaaaaaacaaacaacacaacaaaacctccaaacccccaaacccaaagaatttccagaagccagtttctctgtttggtttacccgtcctttattctctttcctgccagggctggcaggcagaacggggtgcttccctttctgaaaatctcattcgcacattgagaggttggaagtggagggggagggggcagtggtcctggaatatctcaggacccagcggtggtcgagttctagcctagaagctgcttggtggagccctggtccggcattgtctgtagagtgtgtgtatacgtgtgtgttttgttgctggaggtttaattttgttattgtttttaaatacatgggtaggactgggtcagctggatgagtcggagaggaaaaaccattgatctgtttctgaaatcagatctgcaaatggtggccttcttcgtacgtggagaaagacagctgtggtggggtcgaggggagagtgggggtggcgggtaggagcctgaacaggatgctttgtgttttgaaacaaggacagtttcaaataccggctgtggcttgggcctgaggcttgccgtgggggtcccatcctcattgggggtgtagcttgtcttccccagaatgcacactcctccctggggccaccgtgatcctgtttactaagcgcagtgggagggggccgaatccactgcctgcccacacctgtgccaagaaaacccagccaggaaatagggtgtcgcttacatggcatgtcacaaacgtgtagcgtgtgtagacatttccctggcatccatgttcccttggcggtgtgtcacaggccatgacacatgccccaaggaatggggaggggggaaaagttagctgaagaatcctactctttgaaccagtcccccaccccccaccccagagcgttgcagccctcgaggacttttattcttaatttggggtccgacatgcttagagcacctattttctctttcctgtgggcacgtt

SEQ ID NO: 29247 - DNA, 962 bp, Artificial sequence
  DNA replication origin
agatcagcctggccaatatggtgaaacccagtctctactaaaaatacaaaaattagctggatgtggtggcacgcgcctgtagtcccagctactcaggaggctgaggcaggagaatcacttcaacccgggaggcagaggttgcagtgagcggagatcgcaccactgcactccagcctggcgacagagtgagactccatctcaaaaaaaaaaaagaaagaaagaaagaaaagggggaggaaagaaggagggagggagggaggaagggagagagagagagggagggaggggagggaggagggagagaaggagagagagaaggaggaagggaggaaaggagagaggaagggaggaaaggagagagggagggagggagggacagagggaggcagggagggagggaggcaggaaggaaggaaggaaggaaggaaggaaggacggaaggaaggaaggacggaaggaaggaaggaaattttgataaagaatcaaaattcaccaaaagaatcgttaagccacagcccatggcgtcatgttcaccgatgctcaggcaggactgcgcaccagctctaaaagtcgccagaggctggggctggcaggacacagagtgagggagggaaagaggagcagagaccaaggagtggctgaagaaggccgattgccccagggagactgggtatgttctgcatcaggagagagaaggaagaaagggctcctccagaagtcagcagcccaagcaaagcagaggagccaggtgaagcccagagtgcgtggggcgccccggaaggcaagggcagaggagtttggatgcctcccatagggccaaaataggagagtctcgcccgggctgacaagcccagacttgaatctgaatgccacaggcaacaactgcgagttgctgggcaggaccggagctgccgcccccaaaactgtttcagattcagagggcgctgctgggtaaaggaggg

SEQ ID NO: 29248 - DNA, 1462 bp, Artificial sequence
  DNA replication origin
tgaaatcaacccaactgtacactttgaattagattacaactaagaaaaaggtaatgctggccaggcgcggtggctcacacctgtcagcccagcactttgggaggctgaggctggtggatggctctgagctcttaagttcaagaccagcctggacaacatggcgaaactccgtctctacaaaaaaatacaacaattagccaggcatggtggtgggtgcctgtagtcccagctacttgggaggctgaggtgggaggatcacttgaacccaggagttggaggttgcactgagccgatattgcaccagtgcgctccagcccatgcaacagagccagatcttgtctcaaaaaagggaggaggggggagaatggggaggagggggaggaagaggaggaggagcgggggaagagggggagggggaagaggaggaggagaaggagggggaggaggaggagaagggggggaggaagaggaggaaagagggggaggagggggaggaggagcaggaggaggaaaggtatggtagggggaaggtaagggtagagggaagagggaagggaaggaatactgtacctgccttaagggtgtttgcagagagcacctgaatgggccagggcatgtggcgtgctcagcacaggtgagcatctgatacaggtaactatgattatgctgccccctcccccagactcctcaagagggtgctagggagggagtgtagctgtgagaaagcagatgggagaggctacaggcaggcaccgggtgaggcgaggatccatttgtgccagcggccaatgagctcaatgcccagacgcgccaggtggtcggcgggcactcaatacacggaggcgattactttcaagcctcaacaagaaaaaagagctttgctgaaatgcttgccaagctcctccatcatccacggattactccgaaaagagcggagaggaaagctccggcttggagtcggcctggtgcatggggtgaccgaccagctccacatgatggatggcaagcaggtcgcacagctcttgatggcctggggtcagagacccgatggcacctgcgcatcacagggctgcagagcagaaactccccccgccctccaaccccccaggctaggcacaacaccacctctcgccaatctcaaccaagcctacaatacccaactctccttggggacccaggaggggtcatgggttcatcaagacgacagaaagaccctccaggcacccttctctgctgcccagacctcagcagcacagcctgcagctgggctgggagggcagagctggtgcctggggctctgtggagacggtcaagaggcaggacgtgggctcattaatcacgaaaccagctatggcagccacccccttttatggccacatggctcaaggtttaataatagagcaaacgactgatatttccacattcaaacccctccagccccagtcatcttcgtgggcatgag

SEQ ID NO: 29249 - DNA, 1743 bp, Artificial sequence
  DNA replication origin
acacaccaggctcctagaggagccccgagaagccaggatgcacctgctatgggagctggagctcctggtgcctctccaccttctcgcttcctgagaggggttcctcaggccgaggcacactagtcctggaaaccaagatggtttttccccaggggaagtgaggtcactcagaacagccccaggggccaagccccagagccggggaccaatgagcagactgtgtgtcacaagaagctggcctgtattcctgtcccagggctgccagggccagaggagtgcccttggctctgggaaaatcccagcccagctttggatcctttctggctgcctgccctggccacgctgccttcttcttgctgggcaggtttcccagccccctagggtggccacagcccctcgatcaccgcatccaggcccaggcctctgtccctcctctgtggagaaaggtggaaaagaatgtggggtgtgtgagtgtgagagtgagtgtgtgtgcgcgtgagaatgtgtgtaagagtgaatgtgtgagtgtgtgtgagagcgagagtgactgagtgtgactgtgtgttgtgtggggtgactattttatgagtgtggtgaggtgactggtgtgtctgtgtgtggtgtgtgaggtgactgttttgagtatgtgtggtgactattttatgagtgtgtgtggcgtgtggggtgactatgagtgtgtgtggggtgtgggatgactatcttatgagtgtgtgtgtgtatgtgtggcatgtggggtgacttttatgaatgtgtggggtgactgagcatgtgtgtgtgtggtgtgtggggtgactatgggtgtgcatgtgtgtgtggtgtgtgggtggcttatgagtgtgtgagtggtgtgtggggtgacggtgtgcgtgtgtgtgtggtgtgtgggtggcttatgagtgtgtgtgtgtggtgtgtggggtgactatttgtgtgtatatgtggcatgtggggtcatttgtatgagggtgtgtggtgtggggagattattttatgacagtgggtgtgggtgtgtgtgtggtgtgtggagtgacagagagagagagagtgtgtgtgtgtgtgtgtgtgtgtgtgtggggtgcatatggggtgactattttatgagtgtgtgtgtgtgtcctgtggggtaactattttatgtgtgtgtgtgtggcctgtggggtgactattttatgtgtgtgtttgtgtatgtgtggtgtgtgggggtgactgagtgtgtgtgtggcatatggggcgactattttatgaatgtgtgtgtgtgtggcctgtagggtgactgttttatgagtatgtgtgcatggcatgtgaggtgactgttttatgtgtgtgtttgtgtatgtgtggtgtgtgggggtgactgtgagagtgtgtgtgtggtgtgtgtgtggcatatgggccaactattttatgaatgtgtgtgtgtgtggcctgtagggtgactattttatgagtgtgtgtgtgtggcatgtgggatgactgttttatgtgtgtgtgagtgtgtgtgtggcctgtggggatactatgagtatgctggtttggagtgtgtttctttgggcctcagttttctcctctgtggaatggggatgatcatggcgtctcgtcactgggccgtgtgaggatcgaaggctgtgttgtttgtgcagcaggcagaagggatcctggtaggagcccacgcgtgggagcctctcatgcgccatcatcagtgtctccaagtgggtccgacat

SEQ ID NO: 29250 - DNA, 1214 bp, Artificial sequence
  DNA replication origin
agatccagaaacaagatccacaaggctctgagagtggaggccaggtaaccagaaggcggtggaagcagcagggggagggtgggctacggctctgcgggtgcggggggagggtgggctacggctctgcgggtgtggggggagggtgggctacggctctgcgggtgcggggggagggtgggctacggctctgcgggtgcggggggagggtgggctacggcgttgtgggtgcgggctgcaggcaggcccctgttcccagaagaggctctgagccccaggtcagggtggccacagggatgagggaggcctgtccaggatcaacagggccctgtccctcctccctaggtgacaaattagcatgcctcatcccaggaactctgatgagctcatcaggtgatgaatcatggtggagctgggatagggacgcctccggaatccctgctccaggctccctggaggctggccctcagctttgcaatatggtcttcctgctgagtgcgctttgccaggtggggtgggtggcctggtggtttgtctagcatggaccccacaggccactggattcttctgaagtggggagtacacaggggccttggaactgttctgtggctgggcacacgacctggtgttttcacagaaaggggctgacttagagcagggttggtgaactatagcatgcggtgaaacccagccccctgcctgtttttgttcgatgagaccaagaatggtctcacaaactgtaggagttgtgacggaaaataaacacagaatatgcaacagaaatccaatgtggcccacaaagccccaaatatttgctatctggccctttgtagaaaacagtttgccaaggtctggctttaaaagtcaaattccagcctaggagtaagcatgcaaagaagatgctcaacgtcattagccctcgggaaaacgcaagctaaaaccataaagagatacgacttcgtcctacgaggatggctgtaatagaaaatgacagacaacgccaagtgttggcaaaggtgtggagaaactgggaatcttgtgtgttgctggtgggaaggtaaactggtacagccaccttggaaaattgtttgaaagtttcttaaaacattatacataaatttatcatatgacccagcaattctgttcctagaaatctacccaagagaaagagaaacaaactccaaagacatgcccaagaatgtccatagcagcattct

SEQ ID NO: 29251 - DNA, 1999 bp, Artificial sequence
  DNA replication origin
accaccccccccccccccaaaaaaaacccaaaacaccaaccccaagaaccaaaagtgagtaagagcaagaacatttggcttcctcttggttatgtttatggggtgattgttcaagcacccgacgatgacgctctgggaccaccaggggtgggacagagtcctaaacatgtggcacctacagcctgaggggtcgtgggacctgaggaaacagcagtgttgctgaggtccagtgtgtccgagttcctatcgggcaccgtgcagtaggctaggggcttcctcatagagggagtcttcatttaattacacgacagccccccgtggatatctgagtaaacaggatccgagaggaaagtggctcctaggccacagagggacgtcgcgccggagacccacctctgaatgaacttcttcaccacttccatccccgcgttgagctcgttcaaggcaaggatgtactcctgagtaaacagcctcagtcgcgggcacttcccaaagtcctgtggagacagcagaggacaggagtcgggacggtgctaggcagggcaggagcccagggcagccaggacaccagaaagaagggcgggaccgagctctgcctggagctgttgatgtggaaggcaatggggagacaccaaccctctggaaagcacaggtggcgtctacttcaaagaatagcactgcgacacccgcgcttccactctgaaggaccatctgatgagcaggtgcttctggctgtagagaaagccaccctcaaaaggcacttgtgagacaaatgagacgagaaagagaaaagagagccagaaaggctggggggacaagagagggtgcttccgaggggaatgtggagtgtggaaggaggtgtgtgagaggtgggtgtggaaggagaagagaggtgggtgtggaaggaggtgagtgtgaggtgggtatgggaggaggtgaatgtgaggtgggtgtggaaggaggtgagtgtgaggtgggtgtggaaggtgtgaggtgggtgtggaaggaggtgagaggttggtgcggaaggaggtgagaggtgggtgtggaaggaggtgagaggtgggtgtggaaggaagtatgaagtgggtgtggaaggaggtgagtgtgagaggtgggtgtggaggtgtgaggtggatgtggaaggaggtgagagaggtgggtgtggaaggtgagaggtggatgtggaaggaggtgagaggggtgtggaaggaggtatgaagtgggtgtggaaggaggtgagtgtgagaggtgggtgtggaaggtgaggtgggtgtggaaggaggtgagaggggtgtggaaggaggtatgaagtgggtgtggaaggaggtgagtgtgagaggtgggtgtggaggtgtgaggtggatgtggaaggaggtgagtgtgagaggtgggtgtggaggtgtgaggtggatgtggaaggtgagtgtgagagatgggtgtggaaggtgagaggtgggtgtggaaggaggtgagaggggtgtggaaggaggtatgaagtgggtgtggaaggaggtgagtgtgagaggtgggtgtggaggtgtgaggtggatgtggaaggaggtgagtgtgagaggtgggtgtggaaggaggagagtgtggtgggtgtggaaggaggagtgtgaggtgggtgtggaaggaggagagtgtgaggtgggtgtggaaggagtgtgaggtgggtgtggaaggtgtgaggtgggtgtggaaggccgtgagtgtgaggtgggtgtggaaggtgtgaggtgggtacggaaggcaatgagtgtgaggtgggtgtggaaggcagtgagtgtgaggtgggtgtggaaggcagtgagtgtgaggtgggtgtgaatggatgtgtgtttgtgacaggctgctgtggacagaggcatacatgtgcaatgaggagttgggcaccaggcattagtggcaggggaggcactggcacgtgtcactatgatgaggggacagggacaccaccctggttggaggccccatctgtgccacgctagggaaa

SEQ ID NO: 29252 - DNA, 898 bp, Artificial sequence
  DNA replication origin
ttgtgtatctgtgagcatatggtgtgtgtatatacacacgtggggtgcatgcatggctttgtacctgtatgcttgagtgcctgggcacatgtgcaaggtgcatgcccaagcatacatgtgtacatatgtctacatgagtttgtgtgtgtgtgtgaggatctggatacatctgccagggtgtgcaggagcacaggggtgcccaagtgtgtctttgagtgtgtggacatctctactgtgttgggtgtgtgggatccttagagcttgtgagtgtctttgtgtgcctgaacggccatgggtggatgtgggtgcgacagcacacgtggtctgccgagtgtgtgtgtttataggagagatgggtgtgggcatgcctgtggatttctctgtagggatgtgtgtgtgtgtgtgtgtgtgtgttaaatgcacagcagtgggtgtgtctaggcacttgggctagttttgtgcactagtggctgtggctgcatgcatgtgggtgtaaccatttgtgctgtagggttagagagcatgtgtgtttctctgtatgtttgcaggtatgtgcatgagcccatgtatgtgtgtgttgtgtgagccatgcatgccgtgtgtctttggggtgtgagtatctgtgcatatgcatgtgtctgagtgagtgacgggtcatgtgcaggagtgtgtgagtctgtcttgggtatgtggctgtgcgtatttgtgccgtgtgcctgggtgtctatgtgtgcacattggtgttgtgtgtgcctgggtgtgggtgtaggagacccgtggacccggggctgctctgggtggtgtggcttctgagctggctccttctgtgcctgtccctccccgtccctgaacctcaactctgtgactctagggtggaggggagtacagttcttaatcc

SEQ ID NO: 29253 - DNA, 807 bp, Artificial sequence
  DNA replication origin
ggagggggagggggcagggaggaggctgaggggaaaggaagatggtacgggggaatagggaggagagtgcagaggtgaaggaggagggtgtgggggactgcagcagggcgggaggacgtacctgagtggaccacaggttcagctgcttgagcgaaggcagtttgatgaggtgctcggcgcaggcactggttacattggtgaaggccaaactgaggttctccaggtttccgaaggagccggagctcagcaaacgagccaagtcagcgtcctgcgggcagacgggggagaggcctgagggtgctgctgggagttcccgagaccctgagccctcctatcccctatcctcctcctctcccctcgccctacagagagctgttcctggggggcggtaaatcccaggagctgagatgggggcacagctcggtgggatgggccaagggggtggccagagagggaggggctgccacgcatcccatggacgacagctgccaggcggaggagaaagcctccagtgctgtgactcacaccctgaggcaccagcggggtgttccaaggccacgatcctcccacaggcgtctgtgtgtgtgtgtgtctgtgtgtgtgtgcctgtatgtgtgtatatctgtgtgtgtctgtgtgcacgtttgtgtatgcatgtgtctgtacatgtgtgtgtctgtgcacgtctgtgtatatttgtgtgtgtgtgtgttggtgtgtctctgtgtgtctgtgtctgtgcatcagggtgtgtgactggctgcctcactcctgggcagcagctcatgccaacactgaggccacact

SEQ ID NO: 29254 - DNA, 993 bp, Artificial sequence
  DNA replication origin
aggcacagaattctcaaggaacctagaaaggccagttcctgtgtgccaaaccccaggtgactgaactagcctcagggatattgagcccgggattctgtatttgaccagctttcccttttccaggcccactgctttagacgggaagacccgtggctcagtgggaagagtcagaaaaggcttcccggggaggtgctgttgagtctgggtgtgaagacagatttgtgggagttggccaagggggaggcaccctgagcaggggccatgactcctaccgggccgctggcaaatgctgggtggcttgggaggaggtgggagcaggtgactgggtcagtggaggcagagcggcagcgctcggccagtttggctgcaaatgcagatgcgctgcttccactggagtcccccgggggggcgcggtcctcatcaacagcacagattcctggtccctgctgcggccctgctcagcgtctctgggagtgggtggaggggtctgccccccgtgcgactccaacacaaaccagaggttgaggcttgctttcaagaagcagcaccgagtcaatgacgacggggggaccatccggggttcccttagtggggaggcctcgggcctgatctggggtgtggcaggcaagctctggggacatcaggtccaggcagtgggggcacacgacagagggaccagaagggagggaggctcagagggtgggaagaaaacgaaggctctgttcagaccagcacgtgcctgaaatagactttcggtgtctagtgggccacctaccctggctgtgtctacgaaacctccctccccagccccatctcctaacagggggcctggcacctgcattgagctcctccagcttggccatcccataccttcatacctttggggcctcgctctcctaacaactgtatctgtctcttgtgcagccatgaagagtctctgcagtttaaacatgaacagcaccaagctctcagctgacacctacgaagatctga

SEQ ID NO: 29255 - DNA, 892 bp, Artificial sequence
  DNA replication origin
agaacacactcacacacacacgaaataaaacctggcacggaaaatgaattaagactggaacccagtttcttttttttttccttttttaaaaaaatgagggcatagtgggggggtaataaagtctacctagcaaagtataaaacgacaaaagcatggtttccattgaataagattaaatatatataaaacaagtacactgactgtggggtaggtttggaggtgccggaggagggaagtatttgtgctaaaccaacagaaaaaagggctggggggagagggggaccccaaataaaccatcaacgggctgttctgtacagtgagggcttattaagaaaaagccgactgtttataaaagaaacggaggttggtttgtcttcggagcaggtggggacagaaggagtgtcttcgttgcagtggtcacatgtggggggtggcgggggtggggtggggagggcagtcggactggcggaggcgacacatctctcttttcccaagagaccatgcagagaggcgggcatgcatggggccacgtgaagcacacgatggcagggggagcccaggggtgacagagtctccgttggggacaggggacagcaaaggctgacagggacaggagctccctgggggtggggaacagctcttttaccggggtggactggagagggcgggttagcagcctcccattcaagtctaaaaggtgccgagagaaagagcttgggccttagtggagcaaggggatcttaatccctcctcctccagcctgagccccacctcgtgagggagttggagacatttggaaatcagaaacgcacagtggtgggtgggggagtgggcagacagacagacagacgagagagcattagcatagagaatccattacgaaaaagcaatt

SEQ ID NO: 29256 - DNA, 1297 bp, Artificial sequence
  DNA replication origin
ggtgtcccttttggggatccctcccacacatacttcagacaggcctttgacattgctagggagacacgtgaggttcccactagtgagctctgccatggggccccacagtcattcattcactaaagcaagtattgagcacctacaccttaccaggtccttgacaaactgtgaagtgctgtgcactgctttgtgaatttccaagtggatcaccacccagcttggtacaaggtataggcaaaaggaaatggaaaggagatgggaaaggaggggaatgaggtgaggaggggtggaaatgaggtggtggggaggaggtggggaggaggtggggaggggtggggaggaggtggggaggggaggggaggaggtggggaggggtggggaggaggtggggaggggaggggaggaggtggggatgggcgggaaggaggtgacaggggaaggaggtgggggaggcgagggaaggaggtggggaggggagggaatgagatggggagggaagggaaggaggtggggatgggtggagaagggcagagtttccccaggaagcttctccatcccctctcaactcaggtggaggtggagacggagatggagatggaggcggcaaacctagaagtgggtccctagaacctgtgtcactgggtcaaccctgagggatagttaccaaggagcgaagtcctttcaggcctggcctggactttcctcctagaatcttctccccgggggtgggcctgtgatggcggccaggccaggcaagagaagacacagggcagcgcctcacacaggctcagcctccacccaaggtgggaccatctagcccaaccatggagccctggctgttggcccagggatgggggagtctcacctccgcagccacttcccactccccaggccctctcccagccctccagctgcttctcctggagataaaacggctgagctcccttcatattttccccatcctacagtcatggctgtggcatctgcattagtggctgtggcatctgtcacctcctggttccctcatcccctcccaaaagtcagcactgctgggtgcagtggctcatgcctgtaatcccagtactttgggaggccaaggcagggagatcacttgaggccaggtcagcctggccaacatggtgaaacccttctctactgaaaatacaaaaattagctgggcgtggtaatgtgcgcctataatcccagctactaatgaggctgatacaggagaatcgcttgaacctgggaggtggaggcatcagtgagccaagatacaactactgcactccagcttggg

SEQ ID NO: 29257 - DNA, 1501 bp, Artificial sequence
  DNA replication origin
cgagaggcggacccggctgggcgcgcctggggcggggcgaggcggggcgaggctgggcggtgcggggggcggcccccgaggatcacgtggcgcggcgccgcggccgaagcagaagtagcgagcgccggcggcggagggcgtgagcggcgctgagtgacccgagtcgggacgcgggctgcgcgcgcgggaccccggagcccaaacccggggcaggcgggcagctgtgcccgggcggcacggccaggtgagctgcccggccgggagcgaggcaggcagggcgcccagggacctgcgccccgcggggaccggctcccagggcgctgcgtccgagggggtctgcgtcctggctcagccggagcgggcagggacggggcgcaccctcggggaccccggcccgccgtgcccggggtccgtttggtgacggcagggatcctggcccagccgctggccacttcctcaccccgggccggcgccacctctccggtccgtgcggtggggcggccccagctttgaatggggaccgggaggaaggtcaggggtcgtgtgggggctggcgttcaaaactcctcttttcgagcggctctgcgtggggtggcgccgtctctcttgacggcccttgtgcccagagctcgcggacgctcggagccacacttccctgtctcacttcggtggttgcgggtggcgggtgggagcgataccgcgggaggcgcagtccttcccggagacttttggagagcttgcaggacactcgcgatgcccgctccgcagctgtctgcgtaattatgcgtgtgtctgtgcgtgttgtgttttgttgtgttttggaatcccaaagagggcattacccgcacagcgcaagagttcaggttaaagacgtgccccgtttggacggggagctcctggattccagcaggacggtggggcggggctctcttggtaccctaatcttgaactagggtgagaaactatggggggcggggtggtaaaggggtgacatggcgcgagggaaacaggtggccttgcccgtcggaacttaatttgaatttcagttccatcagtgggaccctgggcaagttgaagaacctttttgagtctgtttccccctctggatactggagccacccaattttccagggctgtgtcgagaattggggcttattgctgttccacgaggttcgctgagaatcggggcgcatccatggagagtccttgggcagttcctgactctctggttcaagggcattctctggggcatgggccctcgtccttgactacagttctgcggggaagttttacagaattttgaagtctatgccagcctcaagcagtttctcttgcaaaggtgtgtgtgcagtcacgtgtataccagctcagggacaatcgtcattgtgagcctcactgatgtttaagtcacctaatgatgcagctgccttcccccaccagcgactggagtatgggcagttcctctggaagtggaaaagcacagaccccatgaatagccctt

SEQ ID NO: 29258 - DNA, 941 bp, Artificial sequence
  DNA replication origin
acaccttgtgctctcacctgctgttcatgtatgagaaacctctggaagtcatgcaggtaaacagcagaggcatccggcctgtcagtgttcctatcctcggggaaagggggtgcagttagagacagacacattcaacagaggagtcgagaggagatgccagccaatggggcagcctgccacccagaacgccccacttagtctggcactgtgttaggtaccaggttggccaacaggaagacacaggtgagtgacacaatgtccctcacctacaaggattcagagggaccctgacatcggaatctcaaggggcaggccctggtgtctacatttagctgctccaaaatagctctggtgcaccccagagtctgaggagcccctccaggagtgtggccatggggaagacaggtgaaccaggcatatgggatacagtgtagcaagagatgagggtgggaagggaggggaagagtgggaatggctgagaaggccccaaacccagacctggaggaccagaggggctttcctgaggaaaaggcacctacttgagctccagagagtgaggtgggatgagccagaacgaggtggggtgagccagaatgaggtggggtgagcaagaatgaggtggggtgagcaagaaggaggtgcagagagtacctggcaaggaaaccagagaagcagcggcctcgaggaaaaaagagaagggaggggaggaaagaaagaggagtaggagcgagggaacgcaggccagagggagggattgcagagcaaaaggtgtggggaacacagggatgtgagtgtgcctatccaatacccagacagggctcgacacaccacccgcccgtagagggagagctggtgttggagaaaggacaggagccagacccaagggcctcctcagaagccacgatccagagttccctgggtcattgagtgctctggagtgg

SEQ ID NO: 29259 - DNA, 1404 bp, Artificial sequence
  DNA replication origin
gcgccggcgccggccgcacccgcatcggggtccttttgctcccagaccccgggcccgaaagggccggagcgtgtcccccgccagggcgcaggccccagccccccgcacccctattgtccagccagctggagctccggccagatcccgggctgccgcctctgctgccttccctgagcgggagcggagcgcagagaaaagttcaagccttgcccacccgggctgcagctgcttgttaaccctcagagcgccacggcgcgagggaagggcacgccaaccaggagagggggcgagggagatgcggtccgcctgcagtcacctctgcacctcagagatttcgggaagtttgagtgcaggaaagcagcgctccgaggccaggcctggggtgctggccgctgcggggggcacgccctgcgctgctcaggggcctgtggtttcggagagcaccccgatccagtcccccatcgcctctctggcaggcgttgggacttggagtgagctggcagcctgcaagtgggtggataagagccagggcagggcagggccgggcagagtaaggagggaaagagacagggagtgcctcagggtgctaggaatgagtgttgagttcctggccggggtagaggctcaggtgagagtttgcgggtgaaaggcaggggaagggagttgggttcccaggtagggactgtctgggatggggagactggtgcagacttctaagggagaccactgttagagcaatgttgggtttagactttggaaatgggctaacatctcagaaatgcagtgatgggtgatagtaccaggggagattcaagtgcccggctgctgagcccgctcccaagctcctgacttctttcttggatatacagtcccgattaaggactgcccagttatagctccttttctaccaggcttttctggttgattatcttggggtccctacagccttgagtcttgccatggatcccaagcctggctgtgaaccagttttccagatgtcctgtaccctagagaccccaaggctgtatgtgtgtacatataccccaatttagcaaggcggtttggagcatgcctcagacagaaaggattcagacagatccttcctgccatctgctagtggtaccaacccgggcaagttgtttaacctctttgagcttccaagttctccattgtaaaataatctgctgccttcctaggactgctgagtggataggattgcattcaacaggatgtcctatgcaatgcatgccagtctgggagctgtcggtgtctgagagcacttaccattgccttgtccaggacttcacagtcctctttctttcttggcaggtttcaacctcagttcatattccagggcttgcccaaagttatgcctcctttaaagcaagacagaccacgtgacag

SEQ ID NO: 29260 - DNA, 2061 bp, Artificial sequence
  DNA replication origin
aggctgagacaggagaattgcttgaacccgggaggtggaggttgcagtgagccaagatcatgccactgcactccagcctgggcgacagagtgagactccatctcaaaaaaaaaaaaaaaaaaaggttgtggactgctgctctaactcatgggtacctttctggtaaattctgcaagatctctgagtcccagttcacttatctgagaaaagggtatcagactaaagctgtcattcttaaccctgactacacattaaaacacctgaaagccttaaaacaaacccactaatgatatggggtcctgctttcagagatcgttcttggatggggcccaggcatacgtatttctgaaaacacccccctgtgattctaatgaacagccaagggctgagaacaacagcttgaggtaaccactgaggtcccttttagttctaagatcaaatgataaaagaaacctgatggcacattctaacttgtgttgggaccttgctggtgaggacatgggacctggtgttgaggacatgggacctggtggtgaggacatgggaccttgctggtgaggacatgggacctggtggtgaggacatgagaccttgctggtgaggatacgggacctggtggtgaggacatgagaccttgctggtgaggacatgggacctggtggtgaggacatgggaccttgctggtgaggatatgggacctggtggtgaggatatgggaccttcctggtgaggatatgggacctggtggtgaggacatgggaccttgctggtgaggacatgggacctggtggtgaggatatgggacctggtggtgaggacatgggaccttgctggtgaggatatgggacctggtggtgaggacatggaaccttgctggtgaggatatgggacctggtggtgaggacatgggacctggtggtgaggacatgggaccttgctggtgaggatacgggacctggtggtgaggacatgggaccttgctggtgaggatatgggaccttgctggtgaggatacgggacctggtggtgaggacaggagaccttgctggtgaggatacgggacctggtggtgaggacatgggaccttgctggtgaggatatgggacctggtggtgaggacatgagaccttgctggtgaggatatgggaccttgctggtgaggacatgggacctggtggtgaggacatgagaccttgctggtgaggatatgggacctggtggtgaggatatgggaccttgctggtgaggatatgggacctggtggtgaggacatgagaccttgctggtgaggacatgggacctggtggtgaggatatgggaccttgctggtgaggacatgggacctggtggtgaggatatgggaccttgctggtgaggatacgggacctggtggtgaggacatgggaccttgctggtgaggatacgggacctggtggtgaggacatgggaccttgctggtgaggatatgggaccttgctgctgaggatacgggacctggtggtgaggacatgagaccttgctggtgaggatacgggacctggtggtgaggacatgggaccttgctggtgaggatatgggaccttgctggtgaggatacgggacctggtggtgaggacatgagaccttgctggtgaggatacgggacctggtggtgaggacatgggaccttgctggtgaggatatgggacctggtggtgaggacatgagaccttgctggtgaggatatgggaccttgctggtgaggacatgggacctggtggtgaggacatgagaccttgctggtgaggatatggcacctggtggtgaggatatgggaccttgctggtgaggacatggcacctggtggtgaggatatgggaccttgctggtgaggacatgggacctggtggtgaggatatgggaccttgctggtgaggatatgggacctggtggtgaggacatgagaccttgctggtgaggatatgggacctggtggtggggacatgggaccttgctggtgaggatatgggacctggtggtgatgatatgggaccttgctggtgaggatatgggacctgctgg

SEQ ID NO: 29261 - DNA, 1138 bp, Artificial sequence
  DNA replication origin
tttcatgccttgttctctttcatatatgcagagtaaagaagaatgtctgacatataatagctacacaataaatattgaaagaatgaggggatgggtggacagatgcatagatccatggaagaatggatggatggatggatggatggatagatggatggatacatgaattgatggatgcatggatagacacatggatgagtgatgaatgcctgggtgggtgatgaatgcatggatgaatgtggaatgcatggatggatgatgaatgcatgggtgggtgatgaacgcatgggtgagtggtgaatgcgtgggtgagtgatgaatgcatgggtgagtgtggaaagcatgggtgggtgatgaatgtatgggtgagtgatgaatgcatgggtgggtgatgaatgcatgggtgggtgatgaatacatgggtgagtgataaatgcatgggtgggtgatgaatgcatgggtgggtgatgaatgcatggatgaatgtggaatgcatgggtggatgatgaatgcatgggtgggtgattaatgcatgggtaggtgatgaatgcatgggtgagtgatgaatgaatggatgagtgtggaatgcatggctgagtgatgaatgcatgggtgggggatgaatgcatgggtgggtgatgaatgcatgggtgagtgatgaatgcataggtgagtgaggaatgcatgggtggatgatgaatgcatgggtggatgatgaatgcatggatgagtgtggaatgcatgggtgagtgataaatgcatgagtcggtggatgaatgcatggatgaatgatgaatgcatgaatggatggatacatggatggatgaagttgtacaagctcaaaccagctcagattggaggaagcgtcttacttgaagccccctgtgactatgttggggcttgtctcctaccatctcactgaaggagcctatctcctaagctctctcctagacacctgtatccttactttcccctcccttcccagcctgagcagtgtcagcgtcaggagcaagatgattgatgaagtgtcagcagggacacaaccagctgggtgagcaggggctatattgtaacctgcagccaggagctgctcccttgagatggcctttgggtacaactctatatggcttcccagcct

SEQ ID NO: 29262 - DNA, 1282 bp, Artificial sequence
  DNA replication origin
ggggcggggcatagagggaggggaggggctatgcgaaagaaggcggggagagtggggtggggccgctccttggaacggaagcgcgcggcctcgaggcccttccggtgcgggagaaactactactcccataatgccccgcggtcccgcgagctgccagtctcgtcgcgagaagcagcggcccggggcgactgagcggacaaacggaagtgtaggttacggtctgagacatcaccgccaagctgggcatcggggagatggccgagactgaccccaagaccgtgcaggacctcacctcggtggtaagggacggctgtgagggccggaggccgcggccttcccgggcggcgccgggccaagccctgctggacagaggcgcgcccaccgcggccgcgcgtggcgtctgccgaggccccgtttctggaagcgtctctggccgaggctcccggccaccttgacccccggggcgctcggtgcgggccagtctccccgcgggcgcccccaagcccgaccccttccagtagccccattcatctgtcgcgaacgccctccgggtccctcccgcctacctctgacaccctccccgcccttcaactcctcacacacccccgggtgccccagcccggcagaaacaacctaaagaccctgagctttgagtcgcagcggcctccccagcccagcagtctaattggacaggttggaaaacggaagcccagagaaggaagatcttgctgaaggccgcacagctgtccagaggcagaaatggggctggaaccccgggaccagggcttgcgtcctgatcccaggaagttgtctcaggatcgatgtggaccgtgtttgtttgtttcggtttttcttaggtgcagacactcctgcagcagatgcaagataaatttcagaccatgtctgaccagatcattgggagaaatatcctttttatctgcagtcggcctcctgtgggcctttggagcctatttgccgggcagtggtggggataaatgagtagttttcaggctagcttcagccattcacttgtagaatttgagcttggattgtactgtgtttctgagaaggactgcgccgagagctaggggcaaagctgagttagactcctggctcaaggagcatacgtctaccaatcctaatagctggtgtggtggaccatgcactgtgaactaagcgcttttgtgtgtgtcttttgatgctcagcatgaccttatgagtgggttgtagtgttatcatctttagcaaatgaataaattgaggtttaggggttccatcacta

SEQ ID NO: 29263 - DNA, 1749 bp, Artificial sequence
  DNA replication origin
gaagccccgcgccaggcggcccagcagttcggcccgctgggccgtctcggccagcccaccgtagaagctcacgaagtccgcgcactgaccctcggcgggcgccggtgtcttctcgcgcagctcgtaggccggcgtcggcggcaccgcgcggcgcagcagctcgtccatggcccgctccagggcgccggccgcctgcccgctcgccagccggggcccgggcggccgcgggggcaaccgcagcgggaggagacgcctggccgtcaagcctggcccgaagcctcgcatggtgccccacaacagctgccgagggggagcgccgccgccgctgccgcgcttccggcttccggcgcgcgccggccccattggccgaggccgcgagcccggctggggacgcggccaataggagggcggggcggtgggggcgaggcggcgggggcggagcggctctggcggcggccggaggccaagtgtggctaaaggttactgccccgcggctgggctgcctcggggcctgctcccgcgcggctggcggcttgtactccggtcctaacacctgaccgcctaaaggcaccggcccagcccctcctctctttcccgactgcactgcacaagtgccgcctcctctctagatccgagcgcctccagcctcccggtgcatcagagtcacctgggaactcctgcaccggaggattcctgggctccgaaatcagaatcctagagattcagattcagtgtgtctgggaggagccaaggaatatgcttgcttaagaggtgtttgtggcaatcctctggcatggtaggtagcctttgtttgacccctgcctaggcactcaccattcgcgtcagtgtcttacacacatgacgctcagagccacagaggttggaggggtgtgtgagtgtgtgtggagagagagagaatatgtctatatgtatggatgtatgtacacatacgcacgcatatacacatacatatgtatgtaaaagagacatggagacagagagactgatggaaagccatacccttgagcaaatgccagaatgagacaaagagttttctttgaaatagttttcagataattgcagttatcaaggcatatttattttgtcctctagaaagataggcctgaactctagttccccctccttccccaatccattacaatctgtagaagagaatgtcacataccagccatgtctcccacatgcaaaattgcaggaggcattaggaacacagtgggattttgttccactctgatggaaatatggcatctttggttggagggtgagggagccatgtacttggttgactatgtctaggtgctaggatttctataggtagaaccctttggtgcaggtcttgcagtataaaagacacctggaggtagttctgtatgaggacagcctttgctgggtgtgtctcatcttatggggcacgaagaaagtacgtttggctcattctgccaagacacagacacacaaaacattctgaaagcctagtggtggcttttgaggacacctctccattcctcttttctaagaagtggtgaaaccatattgccagctggctaagggagttggtggggtccaaactctggtgtttgtctctttgccttgtcgagtgagcttttgtctgtcctaggatactcctgccttgctttaggaatcttgtcttgaaagcttgactttgcttaagcatttgctaagtgtagtactcccacaaccctgttctttctcatctttcccggtgcc

SEQ ID NO: 29264 - DNA, 1287 bp, Artificial sequence
  DNA replication origin
cggccaggcgtctcctcccgctgcggttgcccccgcggccgcccgggccccggctggcgagcgggcaggcggccggcgccctggagcgggccatggacgagctgctgcgccgcgcggtgccgccgacgccggcctacgagctgcgcgagaagacaccggcgcccgccgagggtcagtgcgcggacttcgtgagcttctacggtgggctggccgagacggcccagcgggccgaactgctgggccgcctggcgcggggcttcggcgtggaccacggccaggtggcggagcagagcgccggcgtgctccatctgcgccagcagcagcgggaggcggcggtgctgctgcaggccgaggaccggctgcgctacgcgctggtgccgcgctatcgcggcctcttccaccacatcagcaagctggacggcggcgtgcgcttcctggtgcagctgcgggccgacctgctggaggcgcaggccctcaagctggtggaggggccggacgtccgggtaaggggccgccgtcgatcccccggcagcgcggactggccgccctcctcgagtagtcctcacttgccccctccaagtcccacacaccccgccttccctgcccgatagcacgctcacttcgcccgcagttaccgcctgccaactgtgtccccttcccacgctgtctgagtcctggcctcgtcagagcacacccccgccttcctccagtctgtccttgaagtcctcacttgtatagtgtttactaaatactcagcacttggtggtctttaaggtagctgtcacctctcgtacctgattagtgtgtgctctacagtcttttgaaattattgtagctgagaagtgtttcatctatatggtatacctgaactagagcatcaggcagccttctgagaccctggatggtgtttcagaagttcactgggcacccgctatgtgtgagacattgtcctgagaagtcctgtgaaatgcacaaaggtaaataggactcaaggtcaccaccaccacccaggagtctccatggcttctggccttgtctgtgctccatgacttttgggagggcatttaactccctgcgttcagtacttaatgtgatgattctgagttgacttgaggtaatcaggcattagcacagttcattcatgttaaatgcagacacatactttgagatttaaatgattatgacccgaaagaaggcctagagcaacatatactcttcttttatactgttagtattaaatacggcgaaaaactaacctgccctttttttatttttatttttgttgcc

SEQ ID NO: 29265 - DNA, 1212 bp, Artificial sequence
  DNA replication origin
tggagggttaatggaaggaaggaagatggatgggtggaaggaagatgggtggatggatggtggagggtggatagaaggaagatgggtatatgaatagatggctgggtgggtggaaggaaggaagatggttggatggatggaagatggatggatggatggatggagggtagagttttaatggaaggaagatggatggacgaatagatggaaggaagatgggtggatggaaggaagatggatggatggaatgatggatgggtggtagagggtggatggaaggaagatggatgaatagatgggtgggtgggtggatgtttggatggatggtggagggcagagtgttaatggaaggaagatgaatggatagatggagggtagagtgtagatggaaggaaaggaaaggaggatggatggatggatggatggatagatggatggaggagggtggatggaaggaaggaggatggatggatggatgggtgggtgggtgggtggatggatggcgcagggtatatggaaggaagatggatgaatgatggaagatggatggatgggggacagatgaattgatggcggaggatgttaggatgggtggatggatgtattaacatcccttctccatgcctcagtccccatcataaggagaaagagcctgtcgtccctctatgatactgcactgaaccaatattcccctcacttcatgggtgttacaaacctcttatcatctgtttacgtctcactcttactgtagaacctctagaaaggcaggtggcttccagctcctcgcttttcctgagggatgatctgaccacccattcttacacatgtcatctttcccacagtggcagtgcagaggagacaaaagcagaacaaaagcagacagcggccaggtctgagggtgataggctactcactgggtcctagtgttctgaactacaccctacaggaaagtgctactcagtgcccaggtgacatcgtcacaaggggaacacagtggctaagagggcaggggctcagtctcacagacctggtttccatcccacttgctctcaggaaccctgggcaacaactgtgaccacagtgtcttcctctggaaagtgcccagcagtgttgggctcaccgtagctgcacaataaattgtcatgagtgctttccactgtgtcccaggttcaaggctgaagtcacaaccccacccctgccacagagcctgcc

SEQ ID NO: 29266 - DNA, 1716 bp, Artificial sequence
  DNA replication origin
gggacttggggaacgctgtctagcctgcgagaggtggaagtgggctcctgagaagggcggccgcgtgtggcttcaccgtccccttttgggtttaaagggaacttccccggatggattaggtgtcacggcagcagtgtgagaatggaagcgcccaagcccgtcccctcggccagccccttcagctctctgggcctcagtgtcgtcacccgtcaaacggggacagggaccctccttcccagtgcagggtggggtccgagtgagctagggcaagccagcgttcagtgcagggcaactggggtctgagtccttggggagctgggcttggagaaagtgagatctcgtgggctctgggagggagggcctgtgctctgttcccacacagcacccccagcggcagggctccttggggaggccagaccagggccaggcgtggccagaaagaccctgcctttaaggggctgtggaaccctgggcaaggagtgtacccaagtaaccagcgtggccccaggccaggggtcccctctgcaagtgtcacattggagggggccctgatgatcttgcagaccctgcagccacctcgggccagaagcgaagcagggtccctgccctcagagagcgtctagtctagtggagatacacacatgaaactgccttgtttagaagctaccaggaaggagaggccccagtgagaagacggcaaataaagggggactgtgacctagtcaagccaccagggaaatcttcctgaggagaggacgatggatgaactttggaggcagagtgggcattgcctgggaggcagggaggggagagcgtttcaagaagagggaggagcatgtgccacgcaggaaggagggaggacagggagtcccagactgagggaggacagtgccaggagggcctggaaaagcagaggggagggtcaggccacagcaggcttgagaggccacggagggggctgtgtgtgacagggagggtgacggggatggtgggaggtaggaaaggagaggagagatggaacctgatttgcatttcacaatgacaactctgcctgctggggtggagaaggatctggaagagtctggcgtaggcaggtgggcagagcacctgcgaggttagttaatgcacataatcaggaaggagactttgtaacctgggccagggaaatgaagagaacaaggccagtggtctgtccaggggcccggggacgggtgggaggtgggggtgaggggagccccagggatggcacccaggcttctgtgttacacagttggaggtggcctcgccaggaaggaacagctggaggaggccaggttttggagggagggcatctgcattcagccttggccgtgctgagcctgagctgctgctgagctatgcaggggaaacacacaggtatggggtgtctgtgtcaccagtgaggggactgtgcaagtgactgtcctaactgaacacttcagagtgaaaagaagctctgttaacaatgatgccacaccagggccccagacagggcctgtccccggcaaacaggggcactagtgcccttgctatcggtagttaggagacagcagagacacggatgggggtgagatccttagagaaggaggggactcccggaagccgagaggaatggctgactaagagtggcggagcacaggtggggatggccaagagggtgtgcatctgtgccagtgccgggagcatttgggaagtgca

SEQ ID NO: 29267 - DNA, 1514 bp, Artificial sequence
  DNA replication origin
gaggggcgggggatgggggtgcacctttgagtgcaaactttaagagggaaccaaaaccagtaaacaaaataatattttgaggcaattaaaaaaaatctaaatgaatgcaaaaaagccaggataaacccagacaggttccagagcagtgccttggggctgatgggaagaggagaaccaggacttccgatgccgtctgtgtttataataaaagtttgatattttttccattctggattttttttcatgaattttgatgtgtaagaacactgcatggacacagtatgtattctggtgatgggagtgctttgctgcccctaaaattttgtgcctgaggtgatgcctccccctcctcaccctcgtcctggccctggtggccacagccctgccctggagtcaggcacatcctggaagccacagcccagggtaccggagcatctgccagcaggggctggggctggggctggggctggttcctggtagaaaacaactctgatgaggtgagagtagcaggaacctacagagggcgagagagagagagagggaatgaggatgtgtgtgcatgtgtatgtgtgcacatgtgctcatgtgtgcatgtgtgtgtacgtgtgccagtatgtatgtgcatgtgtgcacatgtgctcacgtgtgcatgtgtgtgtacgtgtgtgccagtatgtatgtgcatgtgtgcacatgtgctcacgtgtgcatgtgtgtgtacgtgtgccagtatgtatgtgcatgtgtgcacatgtgctcacgtgtgcatgtgtgtgtacgtgtgtgccagtatgtatgtgcatgtgtgcacatgtgctcatgtgtgcatgtgtgtacgtgtgccagtatgtatgtgcatgtgtgcacatgtgctcatgtgtgcatgtgtgtgtacgtgtgccagtatgtatgtgcatgtgtgcacatgtgctcacgtgtgcatgtgtgtgtacgtgtgtgctagtatgtatgtgcatgtgtgcacatgtgctcatgtgtgcatgtgtgtgcatgtgtgcacatgtgctcatgtgtgcgtgtgtgtacgtgtgccggtatgtatgtgcatgtgtgcacatgtgctcatgtgtgcatgtgtgtgtacgtgtgtgccagtgtgtatgtgcatgtgtgcacatgtgctcatgtgtgcatgtgtgtgtacgtgtgtgccagtatgtatgtgcatgtgtgcacatgtgctcatgtgtgcatgtgtgtgtacgtgtgtgccagtgtgtatgtgcatgtgtgcacatgtgctcatgtgtgcatgtgtgtgtacgtgtgtgccagtatgtatgtgcatgtgtgcacatgtgctcacgtgtgcatgtgtgtgtacgtgtgtgctggtatgtatgcgcatgtctgtgtgtgcgtatctgccagtgctggcagtaagggagggcctgatagctgggggtaagggtttagggagcacaatgagaagctggggtgaaaaaggcttagggaagaggttaggcacagctggggccatgtgcacagagagc

SEQ ID NO: 29268 - DNA, 917 bp, Artificial sequence
  DNA replication origin
gtatattcgtgactgctctacacagtgtctagaacagcgcttaggacacataggcactcaacatcggttaaacagaagggaggcagggagggagggaagcagggggggaaggagggaggaaggcagggagggagggaagtagggagggaaggagggaggaaagcagggagggaaggagggagggaaggaaggaggtagggagggaagcagggggggaaggagggaggaaggcagggagggagggaagtagggagggaaggagggaggaaagcagggagagaaggaggaaggaggaagggaagagggagggaaagagggaggaagggaaagagggaggaaggcagggagggagggaaggagggatggaaggagggaggaaggcaggaagggaaggagggagggagggaaggagggtggaaggcagggagggagggagggagctgccgcggtgcacacatgacctcagtgtccattcgctgttgttttcagtgttgatgttgttgtcgcccgccctcgtcctcctgtctgccaccctcgaggggcgggggatgggggtgcacctttgagtgcaaactttaagagggaaccaaaaccagtaaacaaaataatattttgaggcaattaaaaaaaatctaaatgaatgcaaaaaagccaggataaacccagacaggttccagagcagtgccttggggctgatgggaagaggagaaccaggacttccgatgccgtctgtgtttataataaaagtttgatattttttccattctggattttttttcatgaattttgatgtgtaagaacactgcatggacacagtatgtattctggtgatgggagtgctttgctgcccctaaaattttgtgcctgaggtgatgcctccccctcctcaccctcgtcctggccctggtggccacagc

SEQ ID NO: 29269 - DNA, 964 bp, Artificial sequence
  DNA replication origin
tgtcgaacgtgcctgtggcgaggaccacgttgcgggcccacagcgagaagggctgctgggcctggttcctggtcaggaagccgctcacctggaagagggggctggagtcctgggccccacagctgctgggatcgggggtcccccactccacggctgtgactacagcaccggacacaaagttatgccccagacccttcttgaccacgtagtccctgtagtagtgggcgatgtccccggcagtggcccggctgttgcgaagacctctgttggggaggatgcaggacgccagagtcagacactgttaggggttggggggctgggtgggacgggagatgtccagggcagtgtcaggccctggagctggactaggctgtagctgtaggactaggccaggtaattcaacctctctaagcctcagtctcctcttctgtaaaatggagctaacaagggtgcctccctcaggagaggtggtgtagggtggtgtaggatgctctagggtggtgtagggtggggttcagagggcagcctccagagccccgctgcctgggctcgaatcctgactctgccatcagggagctgtgtctgtttccccagtttgcaaaatgaggaagatgttggtggcaggacctatttcgtgaggtcgtggggaggatttggtgagctgacaaacacaaagtgcttaggatggaacctgactggaagtaagtgccatgtaaggataggccaccatgattgtcacctcaaatgattaaatatggtatgattccatttttacagagttcagaaacaggcagaactcatctatggagctggatgtcaagagaggggttacctccggggatggggaatgggatcctgatcagaaagggcatgggggcttctgggagggggcctgcttcttcattctctgtgcttaccttgagaaatttcatcaacctgtactcacaggagttacgtacttttc

SEQ ID NO: 29270 - DNA, 1066 bp, Artificial sequence
  DNA replication origin
tcctgaccagccgctgagcgccaagaggaaccccattgacgtggaccccttcacctaccagagcacccgccaggagggcctgtacgccatggggccgctggccggggacaacttcgtgaggtttgtgcaggggggcgccttggctgtggccagctccctgctaaggaaggagaccaggaagccaccctaacactcggccagacccgctggctcccaggccctgagaggacagagatgaccacatccctgctggatgcaggacccgtccaaagatgccccggggaggggtgtcagcccacgttgctggcctttggggtcaagaggagtagggatcccaggctgccctggacttagaccagtgtctgaggtggtaacagcggccgcaggccagggttggcctagacctgggatttgtggggaaagctgctggtgtgaccagctgagcacccagccaggagacctgcagccctgcgccttccagaagcaggtcccaaataaagccagtgcccacctgctctcatgcgtctgaggactctgtgctcggagggagctgcgttcccggaaccctgcactgggctggggggaagggaggaaaggggattgtgggaggagtcctggggcatgtggtcctggatgaggtccatggctggggccttggggtacaaaggatggtgccccaagtgtgggggcagttgagcgggcagctgtactagagtctgggggtgggagtggcgggtgtgtgcaggcagtgatgtccaggagggcgctgcagccccgccccctccgcagcctgtcccaggcctccctcctctctgttctgccatgcggcctcctttcagtccctcctgctggccaggtctctgcctgccccaaggcctttgcacagagagtccccagcccaggacagtttcccgcctttctttaactccttttccttgggatgtctcagcataagaatcacttcctctaggaagcctcttctgacacaaacccctccactgccgtcacagcaaatactcctttcatggtctaaggtgctaccttttcatagcagtgcagttttttt

SEQ ID NO: 29271 - DNA, 1092 bp, Artificial sequence
  DNA replication origin
ggtgactgccacctcgcccagctagttattgtatttttaatagagacggggtttcaccatgttggccaggctggtcttgaactcctgacctcaagtgatccgccctctttggctccccaaagtgttggtatcacaggcatgagccaccacacccttccagcagttcagttttaattgttcatttgtttgtggaatcatttcagtgtttggctctgcccacttggatgtaagctccaggagctctgggagaccaagtacaccatctgttttgcccattgctggaactccgtggttgggcacctgcctggcacctagtgggttctccttaattcatcttttaaatggatgggtggatggatggatgggaggatgggtgggtgggtggacagatggatagatgagaggatggttggatggatgggaggatggtgggtgggtggatggatggatggatggatgggagggaggggggtgggtgggtgggtggatggatgggagggaggatggatggatggatgggagggagggaggatagatggatggatggaaggatggtgggtggatggatgggagggtgtgtaggtgggtggatggatggatggatgagagggtaggggggtggatagatggatagatgggagggtgggtgggtggatggacagacagatgggcgggcgggcagatggatggacggatggatggatggatggatggatggatggatggatggatgggagggtggatggatggatggatggagggtggatggatggatgccagggagggaggatgagtgggtgggtgaatggatggatggatgggaggatgctgggtgggtggatggatggatggatgaatggttgggagggtgggtggatggatggacggacagtcggccggccggatggatggatgggaggatgggtggatggatgtatagatggattgatggacgggtaggcaggtggatggatggatggatggatggacggacaggtgggtgggtggatagatggatgggtggatggagtatgaaggaaagatgttctggggtgaagactggttctgggcgttttgtaaccaagggggcgg

SEQ ID NO: 29272 - DNA, 948 bp, Artificial sequence
  DNA replication origin
gactttcagtgggagctctgcgggggtcctgaggaggggatggtttggctgcatgggtgtgtctctggctgtgtgtgcgtgcgtaagcgagtgcgtgagtgtgtgaatgtgtgcctgcgagtgtggcactctagagctccccctgctctggccggccctcccagcccagaccccggccaagggttccaggagcagggaagaggagagaggaagggagggaatcccccgactcacagggatccgcgatacacgcgtgtgcacattcacacacacccaccactctcccagaaatccaccacacaggcagaggcagcccccagccccaccccagcaggaccctcgctgaaacacgcagtcaacatccccagaagcctcctccacctcctcctagcactctctgctgggagaagtcctcctcctccgagccgccccctgaagattcctccctcccgggtggggcgggtgggagggtgaggtgggcttcccagagatgggtgatttgggtcccaggggagttaggaggggtgaggggtgagtctggtccatgaagaggacccagctctctgtagggtagaggggtgtggggaagggaacagaggacttggaatggaagggggcggggtggggaagaccagaggggtaccagctcagggctgatgggcgatggctctggctcaatggaaaggagacgagaagacagaaggtggggagggggcttcacttttaaagtggcagtagctggggcaaagggtctttgagcgtgagatgaacgggggctcagggtctagggcgaagagaggtgggctagaggtaggggttgttaggggtctcagaaaagtatcgctccggacaggatccgggatggagaggaggaggcggctggacgcggcgaggggctccggtcccgcggggtaaagggtgggggtttggcttggacaaaactagggg

SEQ ID NO: 29273 - DNA, 966 bp, Artificial sequence
  DNA replication origin
cccgcgggaccggagcccctcgccgcgtccagccgcctcctcctctccatcccggatcctgtccggagcgatacttttctgagacccctaacaacccctacctctagcccacctctcttcgccctagaccctgagcccccgttcatctcacgctcaaagaccctttgccccagctactgccactttaaaagtgaagccccctccccaccttctgtcttctcgtctcctttccattgagccagagccatcgcccatcagccctgagctggtacccctctggtcttccccaccccgcccccttccattccaagtcctctgttcccttccccacacccctctaccctacagagagctgggtcctcttcatggaccagactcacccctcacccctcctaactcccctgggacccaaatcacccatctctgggaagcccacctcaccctcccacccgccccacccgggagggaggaatcttcagggggcggctcggaggaggaggacttctcccagcagagagtgctaggaggaggtggaggaggcttctggggatgttgactgcgtgtttcagcgagggtcctgctggggtggggctgggggctgcctctgcctgtgtggtggatttctgggagagtggtgggtgtgtgtgaatgtgcacacgcgtgtatcgcggatccctgtgagtcgggggattccctcccttcctctctcctcttccctgctcctggaacccttggccggggtctgggctgggagggccggccagagcagggggagctctagagtgccacactcgcaggcacacattcacacactcacgcactcgcttacgcacgcacacacagccagagacacacccatgcagccaaaccatcccctcctcaggacccccgcagagctcccactgaaagtcctgggcagagccctgcagccccaagctgccctgcatggaagccctgcccagtcag

SEQ ID NO: 29274 - DNA, 1489 bp, Artificial sequence
  DNA replication origin
tgctgcaggctccccccatcagaggccatgtgtccaccccctgagcacagctgtgggactctcagtttccttactgcagcctcctcaaaggccgagcctgttccttctccttggggcttacatcttaccagccaccactatgtgaccgttaggggctgtcaccagggtgaatgtgggtgtgagatgcgggttccagcaagagcttcccaggtcccccagcctgactgcctaggctcaagtcctggctcagccgcgtaccggctctggcctcaggcaagtcaccaaattctgcagtctcagtttccttatctgtaaatgggaataattacagcacccacctcagagggctgtctgaggatagatagttgctctcctggcttcgctcattgaagatatcaataagtccccgctgctctgcctcaaatgcctcggaaatgggagtccgcaggtgtggcttgtccagaggggtttgattcctctgtgctcagcagggaattcggtctgggggaggctgccagcagtcactgaacgtctgttatgcaccaggacttgaatgtgctttttcctttaatcttcattgtgatcctcctgagacaagaagtatcaacccccaccctccttccagatgacgaaaacaaggctcggagatggcacgtgatattcttcacatggtcggggggcagcggtgcaggcaggttctgattcaacacagcagcttaaaagcttgtaggagtggggatgggacttggtgtgggtatagataggggagtggtgtgggaatagaatggctggggaaagaggaatgagtgtaggggtgagaataggtgtcaaggaggtgtggatccaagaatgagagcaggtgtgcagggaggtgtgggtgcagggatgagagcaggtgtgcagggaggcgtgggtgcggggatgggaacaggtgtgcagggaggtgtgggtgcagggatgggaacaggtgtgcagggaggtgtgggtgcgggaatgtgaaccggtgtgcagggatgagagcaggtgtgcagggaggtgtgcagggatgagagcaggtgtgcagggaggtgtgggtgcagggatgagaacaggtgtgcagggatgagagcaggtgtgcagggaggtgtgcagggatgagagcaggtgtgcagggaggtgtgggtgcagggatgggaacaggtgtgcagggaggtgttggtgcggggatgggaacaggtgtgcagggaggtgttggtgcgggaatgtgaaccggtgtgcagggaggcgtgggtgcggggatgggaacaggtgtgcagggatgagagcaggtgtgcagggaggtgtgggtgcggggatgggaacaggtgtgcagggatgagaacaggtgtgcagggggtgcagatgtggaggccgataggcccacaagcacacacaggactgctcaacactgacgctagccctgcctcacgtgtccacaggaaggatggatgggatgcctcaggggagcggg

SEQ ID NO: 29275 - DNA, 697 bp, Artificial sequence
  DNA replication origin
cccaggggctgcgaccagaacaggaagggctctgccacaaccccaggaactccaggacccagcaggcagggtcgactgggggtgggtcagtgggtcagatgagagctttgctgacagcccgtcacagtaatgggtccccactctctgtccctttacccctttcctggcccccagcttggccctccccttggtgtcatttattcatgatggggtcagcagactccgagaaaacagaacaagggtgggtggtgtgggggatcagacagacgtgggccttcaggggcgggggtgtcacctacctgctgcaccctcttctgtaaggcggagcttgtggggccagcacacaggctgcaaagagcaggcaggatgtgtgtttcgcaggctgtgcagggtcaggcctgctaaccccctctctgtctctgtctgtctctgcctctgtctgtctctgcagccatgtggacaccaaggagctgtgtggtaggtgcctggctatgctgggaccaagatggggatgctgggatggggctggatgagaagggcctgaggcaggggaggctggaggtagcgcaggtgggaggtgcaggagtgctgagtgggaggggcaggacctgtgacccctgacctttgcctttccttccccagattactttgtggaccacatgggtgactatgaggatgtcctggcctccctggagac

SEQ ID NO: 29276 - DNA, 944 bp, Artificial sequence
  DNA replication origin
tcacgtcattttaaaggtgctgatagtctatgccgccccagaatcctctctgcaagtgcactacaatgaggaagccccaagtgaccataaagcgggggccaaaagctggggaggaggggctacagtgctcagcctagaggaaggggccgggctggattccatcttggggtggacacacctccgtgcagctttaggtgcaccatgcctgggaagtagaatctcacctggctctccaggcttgccgtctccaactcgacaaaccagagcctctacgtccaccgtgcctcctctccacagcgcatcggggtggccctacttcaccctggagcctcccacttattcacgtaatggaaaaagatcaagtctggcccctgctcctgtgcagtctgtcctcctggagtggagtgggtcctgcccccccatcctggctacttactcaagaatggcccctcgtggccacgccgagtctcgggaacggccgcactcctgcccaggctactcctcccctcgtgctacaggtcaggctgttgtcactcaagcctcagtgcacagggggcccaagaagacccctctcaaagaccctgtgctaggacctggcctgcctggttcacagccatgtccccaggcaatggggtgaatgagtgtgtgctctggggatggaagaaagccctgggaagggagttgggcagagccttgctgcagaaacggggggcgggggaccactaccagcaagaacaaagggctgttgtcttctgcaaccccctccactctggccctggccacatgccttagctttaccaaggagctacatcagcctggtgggatgaacaggaatttgaaggtaaggccgcttgccccgccctggacatctcagcacatcagggggagaagggcaactacatgacttgggcatttcccttcagctaccgactctcctctccttc

SEQ ID NO: 29277 - DNA, 1681 bp, Artificial sequence
  DNA replication origin
cttgcctgctggtcttagctcaaaaactaaagctgggccgggcacggtggctcgtgcctataatcgcagccctttgggaggccaaggtggacggatcacctgaggtcaggagtttgagaccagcctggcccatatggtgaaaccctgtctctactggaaatacaaaaattagcggggcgtggtggcgggcgcctgtaatccaagttactcaggaggtggagtcaggagaatcgcttgaacctgggaggcggaggttgcagtgagctgagactgtgcgctccagcctgggcgacggagtgagactctgtcttaaacacacaaaaacaaagctcgactcctgtgtgcagattgagcctaaaactggtgtgacactcccacactccccacacagagccgggccggccttgcctggtgtcggatgttccgctctcctgcctgccgggtgcaaagccagaattcccttttggggaagcgcggacgccgcgctcttctctttgctgcgggagagccactgatgagcacagctttattttctaagatcctttgccgctggctgatggaatgaattgctgcattttgtggtaagctctttggccggctttttctcacacgtcttacggcagctggtggataatggctgagttccaaccgtttgtgtgccctgaggctcttcgggtctgtttggaaactagtgtcgggtgtaacccatgacacccctggcgttggccgagctcctgccccgtgcctggcctaggatggatgacgcagtgtggtccctgtcctcatggagctttgttttaatgggaagtcagacaagatgcatgtcatcagcttcagatggtggatcatgccgggagggtcatgtgtctctggggatcgggggatgatatgacatggcgtggtcggaagcctctcggaggaggtgacctttgcgctgagccccactggaaatggtaagagcttcctgaggtgcacgtgacggggcagcacgcctgcgtttggactagtgtgtcaggaagcctgccattacagcagtgagggagaagccccatctcaagccacagagggcaggtggggcttgggggtagggttgtggccaatccccgggcagcaggaatggccatgagccagagagtgggaaccctgttccacaagcaccgtgcaggcatttcacacagatcttgctgaaatgcagatgctggccctgcagggctgggtgggcctgagaccacatttgtgacttgcttctggggaaacagctgttttgttttgcttaggatgagctccagatcccttcactcagcagacttgaggagaagggaaccctgaggtgaataaatggaaactcatggcagagcagaggagccagcctggctcttgacacgctcccgccaccccaagttgttccttttagcctccagggctaccggggagatggagttggggctggagtgatgtcactgtgaatgatggaagatttgggggaggctgctatcctccacttagctggtgaggcttctgcatggggagcgtttaaatgtgaagtcagtgggcagaggttggaagcctgacgcgttagggttggcggtttagtgccatttgatgaaaacagtctagggccataccaccttgaacgcacctgatctcatctgatctcaggagctaagcagggtcgggcgcg

SEQ ID NO: 29278 - DNA, 904 bp, Artificial sequence
  DNA replication origin
gatggacgaaggtctcgcgacatttgcggcggcgggggccggtggcagggtggaagcggaggggcgtggccagcgagctgccaggcggcgagaacgcgctgggggaacccttggtccgctctgcgcgtcgctctaggatccccgaaaaggagcacgggcgcgaaagcggccaggctgggccaggatctagaaagactgcctggcgcaggctccctgcccccgcgggcctgctgtcatggactcgtggagagctcgcttcccgcgcggacccttcctgcaggggtccacgtccaggcaccggcggctcggacaccccacccccggccgggcacctgccctgggtgccccttaacccgggcggtagctcgttaagatggcgaagtgtccggtccggaacacgcgaaaccccaaatcccgcctgcccgacctcctgacccccggccccacgggacgacagactgggcctcccgacgcgcagcgcgctgccgggacaccggtgcgtgcgaaacggaggacctttgtaacgccacgtgtttgctctttttgaaaaaacaagaataaatgtgttaaactgtctgaaaagcttgccgcctaaaagatgtctgggtgacttagatgctaggatcagtttgttttcaatgtaaatggaccagcccggactccgtacggcactagcaggggactgaaagcgtcttcaggtactgctggtgggcggtgatgcgctacaggccgatcagacagttttgtgtcttttggaacttgacactgcaccacggtaatgctgaactgcaccaatattacagatcacagcgcatcatcttccttcaacatgatttaacacagttgacttaatatggtggataaatgtagaatcacaaattaccataccccacctcaggcttct

SEQ ID NO: 29279 - DNA, 1261 bp, Artificial sequence
  DNA replication origin
tcccgtggtcacccgcagactcctccacgccgggctcctgcgcgcaatccagctctgctgcaccacctgtcgcaggctccgagggctcagggtgcatgtttacttcggcgacaccgaacgccccgcagctttggggggcccaggttcgcggcggacgtcgctacggccccagcccagccagagagtaccctctttccttcttcgccagccgctggcgccctagtctttacagcccaacgcttccccggtcgcccaggcaaccgctgcgcacgcgcactcgggacggaccggcgcgctggggacgccggggggtgggggcgggtctgagacggctccgcccccggcgcgtacgcgggtcacgtgagggcgcggcgcggcagcagctccggcggccgagacgggggcggcggccgcgcgggtctggcgggaccggtttggaagactttgccggcctgcaggtaccgcgccccccgcgccctgggcgccctctcgcggtcctttcgccccagacccctcctcggtcccctcagcgccagccggctgcttggcgagacccctctgagctctcaccacgccccccaggccccgggccccctccgctgcatccggccccgaagccccttggcgcccctgaccccaggaaatcttcgtccctccgtcccgtgagactccttccttcagaccaaaaagccccagccccgccccttcacatctcagagccccccttcccccggctccatcctcacgccccccgccgcggcgctgcacccctgttctctctcttcccccgggccttgccccccaaaccgcgaaccccgttgtcgccggcgcatgccctgccctccctgcagcctctcacccggctcctcccccgagcggccccagcaatcgcctcctttgtcggtgcttctttattctcatttctgaacgatttggtttgagttgttgttgccgtgtttttctaaaatggaaatatgcagcggtcgtgggttcagccaggatttccgagtttgctcgtgttgactgggccttgccgggtgctggaggggaagggctgggaagaagaaccaggcaggtccccgttctgaacgtgccacccagacgcagccccagaaaccggatcgctgcagcgcccctcggcgatcccaacatgatgtgtacaggtgactgcgaggcagtcggggggtctcacagtgggctccctggacaggactctgcgccttgctatacctccatctgaattgcaggtagcccctttctg

SEQ ID NO: 29280 - DNA, 1715 bp, Artificial sequence
  DNA replication origin
tttggtctgaaggaaggagtctcacgggacggagggacgaagatttcctggggtcaggggcgccaaggggcttcggggccggatgcagcggagggggcccggggcctggggggcgtggtgagagctcagaggggtctcgccaagcagccggctggcgctgaggggaccgaggaggggtctggggcgaaaggaccgcgagagggcgcccagggcgcggggggcgcggtacctgcaggccggcaaagtcttccaaaccggtcccgccagacccgcgcggccgccgcccccgtctcggccgccggagctgctgccgcgccgcgccctcacgtgacccgcgtacgcgccgggggcggagccgtctcagacccgcccccaccccccggcgtccccagcgcgccggtccgtcccgagtgcgcgtgcgcagcggttgcctgggcgaccggggaagcgttgggctgtaaagactagggcgccagcggctggcgaagaaggaaagagggtactctctggctgggctggggccgtagcgacgtccgccgcgaacctgggccccccaaagctgcggggcgttcggtgtcgccgaagtaaacatgcaccctgagccctcggagcctgcgacaggtggtgcagcagagctggattgcgcgcaggagcccggcgtggaggagtctgcgggtgaccacgggagcgcaggccgagggggctgcaaggaaggtgccgactgccccccagggagggcggtgggcgaggggcagacacggctaggcgctccagcccccttcccacaccacatacccgatcttcacagccaaataataacaataataataatggtagcaagcaacgctctgcagtaggggcttctctcgccatttcgtactgaggaggaaacatacttaagaggttacaaaacttgcaccaaacagataaccctcggctagtcagtgacagaagagacttggccgggtgcggtggctcaacgcctgtaattccagcactttgggaggccgaggcgggcggatcatcaggtcagtcaggagttcgagaccagcctggccaacatagtgaaaccctgtctctactaaaaatacaaaaaatgagctgggcgtggtggcgggcgcctgtagtctcagctacttgggaggctgaggcaggagaatcgcttgaacccgggaggcggaggttgcagtgagccaagatctcgccattgcattccagcccggacgacagtgggagactccgtctcaaacaaacaaacaaacaaacaagcaaacaaaacccaccagactcaggcccagacagtctgggtctccagagccccagccctaacccaccacgctattctccctggtcccaactttgatgctttaaatgtgtccctttattgctatcactatgtaagatcaaaggctttctctccctccagactgcatgttgtgtcagggcaagacatcttgattgaatttggagtctagtccagtgcctgacctagggtagagagtccgaatgaagacttggttctggggtcagtgtgtgatcccctcaccaaagtttgccagaatggacttgaaagataaccttcatggccaggcacggtggctcacgcctgtaatcccagcaatttgggaggcagaggcaggtgggtcacctgaagtcaggagttcgagaccagtctggccaacatattgaaaccctgtctttgctaaaaacacaaa

SEQ ID NO: 29281 - DNA, 914 bp, Artificial sequence
  DNA replication origin
ggctgccgtcgtcccgcccttgccctcagcgcccacaccaggcctggtgctcttccagctctcggcggcgggagatgtcttctaccagcagctccgcccccaggtggactccagcctccgcagagatgctgggcctcctggcgacacccaacctgactgccatgcccccacagcttcctggacctcccaggacactgccggctgcagccagtggctgaaggccctgctaaaagtgcccctggctcctcctgtgtggacagcacccaccttcacccaccgccagatgctgggcagcacagagctgcggagggaggaagaggaagggcagcggctgggtgtgctccgcaaggccatggcccgagggcagctcctgctgcagagagacctgggctccctccctgcggcagagccaccccctgcacccgagtcaggcctagaggacaagctcagtgagcgcctgggggaagcctgggcaggccgaggggctgcctggtgggagaggcagcagggcaggacctcggagcccgggagacagaccaggcggcccaagcgccggacccagctgtccagcagcttttcgctcagtggccatgtggatccctcagaggacaccagctcccctcatagccctgagtggccacctgctgatgctctgcccctgccccccacgaccccgccctcccaggagttgactccggatgcatgcgcccagggcgtcccatcagagcagcggcagatgctccgtgactacatggccaagctaccaccccagagggacaccccaggctgtgccaccacacctccccactcccaggcctccagcgtccgggccactcgctcccagcagcacacacccgtcctctctagctctcagcccctccggaagaagcctcgaatgggcttctgaggacaca

SEQ ID NO: 29282 - DNA, 1017 bp, Artificial sequence
  DNA replication origin
ctgctggtagaagacatctcccgccgccgagagctggaagagcaccaggcctggtgtgggcgctgagggcaagggcgggacgacggcagccagacctggtgacgggaatgacaatgacctccagggcctagcggggggaggggatgttttccactgcgccccccaagctcactcccccacccagcacacctatggtcggtgctttcaggcgctcctgcagccgccactggatcttaggctccagcagaggaaatgcagggagggagtcgatcctggaaggaagagactggggggggcctgccaggcggggcaccgacgccccttctcctgaggaaggacagacagctgaggccctgtccaggccccgaccgccccatctcccacacgccgcccaccctggcctggaccctcacctgccaggtgcagcagctgcagctgcccaccctggcctccgaggagcaggggctgcacgcagctgggccggggcggaggcagcagtcgggccagcaggagcggggaggggaggccatggttccacttcagcatcggcaccaggggaaggcgctcgtccactaggtagagagagaactggggcccgagaaggaagggggatgtggccgaacttgggagctgagctgtgtagtggccctccaggccccatgtggctctccaggtgagtgcagagccctgaggggcagcagcatctcccatcagcctccacgtgcctctcagacttcacctgccagccctgaacaggtgccgcttccttcaccaattctgaccgacagtccggtggacagacagaacaagtgggaaaggggtgctcagaagaggtgtgggggagccttgccagcagaaacctgcctggccttctcgcagccacccccactctcctgacccgggagcctgtgctcgaggcacgcctacgaatgtccccgggagggcgggtggaggacagacctgcttcctcagagcccccgcctcctgcacagcagaaactctccagctctgcacgga

SEQ ID NO: 29283 - DNA, 852 bp, Artificial sequence
  DNA replication origin
tgaggaggggctggaggcagggctgagcagcccgatgtgaatgcattcctgccctgtagccctcacctgcccggggagctggccatctgcagccgctcgggagccgtctgcctgtggagccctgaggatgggtatcgccgcttcctgtgaaaccccccaccctaacgaactgaactccgccctgttgagcatgtcgcgacccttgagccccttccccatcagcctgtccccctgcccacggcttgcctgtctccccaaggctgcggcaaatctacagggaccctgagaccctcgtgttccgggactcctcttcgtggcgttgggcagacttcactgcgcaccctcgggtgctgaccgtgggtgaccgcaccggagtgaagatgctggacactcaggtacgggctggcggcagaggacccaccccgactgcgggagcggccgcagagcggtgagtcccaggctggctgcggcctgggcgaggacagcgtcaccggcctgggactgtggggagggctgaccctgtgtttatcttccagggcccgccgggctgtggtctgttgctttttcgtttgggggcagaggcttcgtgccagaaaggggaacgtgtcctgcttacccagtacctggggcactccagccccaaatgcctcccccctactcttcatctcgtctgtacccaggtgagtggcacacaacaccgccccgccccacctctgctctgtctcagatggtcactagaggctgctgcttaccagcggctctgctgggcccagacaaccacccagcaaaccaaactcaaccctggatgaatctgtggcccaaacacgcagtggatcccacagtcggtgctaa

SEQ ID NO: 29284 - DNA, 1245 bp, Artificial sequence
  DNA replication origin
gggccacagattcatccagggttgagtttggtttgctgggtggttgtctgggcccagcagagccgctggtaagcagcagcctctagtgaccatctgagacagagcagaggtggggcggggcggtgttgtgtgccactcacctgggtacagacgagatgaagagtaggggggaggcatttggggctggagtgccccaggtactgggtaagcaggacacgttcccctttctggcacgaagcctctgcccccaaacgaaaaagcaacagaccacagcccggcgggccctggaagataaacacagggtcagccctccccacagtcccaggccggtgacgctgtcctcgcccaggccgcagccagcctgggactcaccgctctgcggccgctcccgcagtcggggtgggtcctctgccgccagcccgtacctgagtgtccagcatcttcactccggtgcggtcacccacggtcagcacccgagggtgcgcagtgaagtctgcccaacgccacgaagaggagtcccggaacacgagggtctcagggtccctgtagatttgccgcagccttggggagacaggcaagccgtgggcagggggacaggctgatggggaaggggctcaagggtcgcgacatgctcaacagggcggagttcagttcgttagggtggggggtttcacaggaagcggcgatacccatcctcagggctccacaggcagacggctcccgagcggctgcagatggccagctccccgggcaggtgagggctacagggcaggaatgcattcacatcgggctgctcagccctgcctccagcccctcctcaccgaccaacctgacccccctcacctgaggctgatccccgtggcccctttctccacctgcattgcctgcagaagggttggctgccactgtttaccaaacttccacacggcacagtggtagtcagagcggacggccagcagagctgaggagggatggaaagggccaggggtcaggtagcaggtcagccagtgagggaggaaagtgtatataagggccttactttctccctggacggtgcatgtcaccacttgccggacaggtccctggagctggatgcgtccaggtttcccaaggaattggggattgtcacctggggtcagaacgacctcttggaaatctgggcctctcactaaggatcagtgcacgagctatgatcactgcaagccccccaaattcctgcccttctctggaccatgccaagagcac

SEQ ID NO: 29285 - DNA, 1145 bp, Artificial sequence
  DNA replication origin
gctcaggccaggtcctgctccggcggtgtctctgagcatagggaccaaggtccaccttccccagaccccctgctccccacgtcctgggacccagccctccgtggctctgccctctggcacagccatgccccggcccggcctcacctggtggctggtcctcccggaagagcaggaagatgcccaggctggccgcgtactccgtgagcaaggacacggcctggctggcaggtgggtctttgagcggcaggctgagccctgctgggggcacagggaccctcggggccttccccatctgttcccccaagttttcccacgcccgggctgcccccagttccccgactccggcccctgccccaggcccactgtccctcaacaccgagacctggggccacccgccctccgcgcgatacgtcgcgggcgcgggcgcgggcccccaggcactttgggcctgggcgggtagcggtcgccaggggcggggctgggggctgatctgcaacgatgcagccaggcggggcttcctacgactgccgtcgtcgtcagcgccctgagaagccgaagccatggccgccaacgaagatctgaggcgctaggccctatctcgcgctgctctcgccctttcacacgcgcagggcgggtgccttcacgtggggagcacgcggacgaagcgtggtgagctccacccctgccatacgatggccaatgagagccctgagatctgtgatggacagtgcaccctgccaatgggaaggccagtctcccaacgacggcggcttggatgcttatggctgaggccaaggtcccactgcctggacggaagttccggctgagaccaacgtcccatggcctggagggaagttccggtgggtgggtgaggggttgctctagcagctgcttctttaaccgtgggtggtcgcggagcctgcaaggcgggggaggagcatctgggggcgtcaggtccagtttcacactctagctcctgccctaggcccctaggcacctccacatcacaggctgctcagctgcttcactggctgagcctggagacttcaacacaggaattaggggttcacactgtcagcaggatcattggatataaaatttcactgcaggcctttctgaagccaaacataagtgttccccagcca

SEQ ID NO: 29286 - DNA, 1072 bp, Artificial sequence
  DNA replication origin
tgggtcctgactcaagttgggcaaaccgcctgccgtttctgctcatctgtgaaatggagtcacgcatccctgctgtggaggagttgggtgaggacttggttgaatcagcgatgggtcacagcctgcagaggcactcaagggtgtgcgcggcatggggtggcgatggagcctgctggaggaagggaagggtggtgagggtctcattattctgaccgtcctcgatatcaggtgtcaggaggaggcagaggtggtacctgtcacagggcgaaggccagggggctgcttcctcacctggctccttccccaggtccctgcttccccttctcggtgagcgcggaactggatggggtggtctgccctgcgggcactgcgaatagcaagacggaggccaaacagcaggcagcgctctctgccctctgctacatccggagtcagctggagaacccaggtaatggagggagggccaggcagctgagccgcagctggggacaagaggactgaggctggcagtcccgtggggaggcggaagtggctgtgcgtgtgagcaggaggtgggttgctgtacaaaccatctgagcatcaggacgtcacctgcagggagctggggcggggtacatgtgccggtccctgctttcacgtcctctggggacaccgggggtagggaccgctagaagagcagctcgtgtaatgtcctgtgtctggaagatgaaaacttcctctccccgcctccttggcttcctgagggacggagggtgggccttggcacccacaccagcccgccctccttgcctctttcagagtccccccagacctccagccggcctccactggcccccctgagcgtaggtaggtgagcattcccggacccaggcttgtagtgtcgaggggagaggcgtgggcccccttctacctgcagtctctcgccctggcgcagagaacatcctgacccatgagcagcgctgcgcagcgttggtgagcgccggctttgacctcctgttggacgagcgctcgccatactgggcctgtaaggggactgtggctggagtcatcctggagaggggtagggatcgcc

SEQ ID NO: 29287 - DNA, 871 bp, Artificial sequence
  DNA replication origin
ataaacacacacacacacacacacacagccaactacacacacaggaaccagaaatacttctttattcaagcccaaacgtgcagcagccgcctcccaaccacagcaggctcctccttccctccagccccagtttcaccccgcacaacccatgttctccccacaacgctcctcagatagggcactcccccagcaggggtacagcttggctccgggacctcggtcccgccgaggctggcttcagtttctgaatttgcccaccagtggcttcgagggccaagcccccaggccctgctggtccaggaggagagacagctgcctgcgagcctcctggtagggcccagcctagggcgggagatgagaggtggggtgagaggaggtacctgcagggggcagggactgcagggctggagagggaccgggacggggggagggtggggaaccaaccttggcagcctcgtaggtcttcaaggccaggaggtagggcttccccacagccctggccgcctggtgaaaggcccggagaaaggaggccttgcagagacgggagggaggccccagggcggcactggatgaagagaggataccactgagatcagagagatacaagctggaccagcaggcctgctacacacctcacactacctcctctcacactgtgacaatgtcacaggactcacagggcagacagaggtgtggccaccactacggagctaggaaggggttgagcgaaggggttgagcgaaggggttgcgctgggattagactgaggtgaggaagctcatgcatgagccctccatcaccagcactgctccacagcccggccccagggggcccttctcacttggccttcacacgcccggtggccacatcc

SEQ ID NO: 29288 - DNA, 1079 bp, Artificial sequence
  DNA replication origin
atgattttctccgcagccacttgtcactcttgtatcttcctgtctgatttgtttattgcctgtctcctgctcaaggtcagcttcaagagagtagagaccccgcctaccttgtacactagtgattcctcagtgcctagagctgaacatgcaatagagtaggtattcaaatatcagatggatgatggatggatggaagactggtgaatggatgggaagataaaaggatgtgtggatagaaaaatggatggaaggatggagctatggaaagaaatatggaaccatgggtagatggttggatggaaggatggatagatggaaaactggtggatggaaggaaaattgattaatggattaaagggttaatggatggcaaaacaggttgtcagcaggatgagtaaaatgagaagatgggtggacggatggatggatggatggatggatggatggattggtgggtagataaagaataggcagatagaaggatgtttggatggattaaaggatgggtggtgaaggatagaaagttggattgatggaatgatagaaggatagaataatggaagaataaatggatggtgaatgaatgtataggttgattaaaaaagatggaagatgaatcaatagaataatggacaaatggaagaatgagtggatggatgaatgatgggaggatggttagatggaaggatggaaggttgaatgaatgaaagagaaaatgggtagatcaaaggataggtgggtggaaatacatggatggaaggaaagatagatgatgaggggatagaatagaaggtgacagaatggaggatatatggaaagaaatggaagtaaatggatggaaggaaggatagatgtaaaattcctcaaaatgtggctaccagactgagctggatcaatattttccatctgtttttaaagaggttgctctatgccttcctgacagacttttgttaccaagtgacagaagtcaacaggctgtttgcacctctaatcctcagaaccagattctgtaatcatcttatcttatcagcaaatatctatatttaataaactccccacctgatgtctggccccacaca

SEQ ID NO: 29289 - DNA, 871 bp, Artificial sequence
  DNA replication origin
agccctagagccgggatttgaaccaaggccgttagctgtggagcccgctctggttgcccgtctgctctgccggatgagacaagctcagctggaggaaacggtttgaagagatgaatgtgcttggagggcgaggggaggagggagggcagtttgctggcatgtaaggacaaggagggtcggggcgatgagatgaggccaatgtatcctatatctaagttattaaatcgaaaaagtaacatgtacctggttggcgcagggctcggaggtcgagtggggagctgggactttgtcccgagggtgctgggaagcctctggggccttggagcacagaggtgaccaaatccacaggtgcctttcataaagcctctttgggctgcagtttggagaatggatggatttggaggcatcgaggccagggacgaggccactgtggaggcactgatggggacttgggcctggggtggggttcatttatagaatgtgcctggcagagggacagatatcaagtttccaggggccgccgtaacaaatgaccacaaactggggtgggaggggtggttaagccaacagaaatgaattgtctcatggttctggggccagaagttcagcatcagcttcactggactgagatcaaggggtcagcagagccgcgcccccccaactccagaggttccttccttgccaatccctgttccggtggctgctggcaatcatggtcactccttggtctgtagacgccatctctgcctccctcttcacatgactttcttgtgtgcatgtgtgtgtgcgtgcgtgtgtacatgtgtgtgtggggggggcgtgcttgtgtgtgtgtgtgtgtgtgatctccctctgctcccctcttctcaga

SEQ ID NO: 29290 - DNA, 1216 bp, Artificial sequence
  DNA replication origin
tctctctcacaccgggtagatacttaagtaattgtccttcagcaaacacaccaagatttgcttatccttttgctctgggctttcagttatttcgtgccgactgttataaaaagatacatggtatcttctgaccttctgagccgccctccgaggctggctctgcctgcttgctgtttctcacaagaggaaacgcaggctcagagaggcccggcgcactgcccacccccttgcaagctccgggtggcgccgggactcgaacgcgcgccccagagctgctgacaccgccctctccccgcaggccgaggaggcgggcgcgcccggcggcccccggcagccccgagcagaccgctgcccgccgcctccgcggacgctgccccccggcgcctgccaggccgcgcgctgtcaggcggactccgagtgcccgcggcaccggcgctgctgctacaacggatgcgcctacgcctgcctagaagctgtgccgcccccgccaggtaggtcctgggcccgagggagggggctgagggaggaggacaggtgaacagagctgtcccgggggaggggaagaaaggagctgggcttaaagctgggccacctgggcgggtctcgggcgcctccactgcgcacctgtgaactgggacgggcgctccttgagcaggcgtggcgctgctgtgcagctgctgtgtgtcccactgcccctggggacttgcgttgtaggagatgcccttccagagaaaatgccacttcctatgaaaatgggatgggggcagggaccctagatgcctccagggagccacagtccagcagacacccattcccgggaaaatgcccgctgataggatgcgggtgcagtgggatttctcatttaaaagatcaagattcgaggcttttctttaaaataccggaccatgttccctgggctgccaccagctggaacctcaggtgcccctggatgaggaggtgtcctctagcttcccactcaccccatcaacccaccaggcccgccacacttctcatgcctggccctggggtatttgaggtggagaccaggagcttagcaatccagatggggcgtgccccagagaggagcgggtgcgtggcttcagatccaccggccagctgtcactttcttgagtctcctctcctgtgaaatgggtggatcacctgaggtcaggagttcaagaccagtctgggcaacatgctgaaaccccgtctctac

SEQ ID NO: 29291 - DNA, 1172 bp, Artificial sequence
  DNA replication origin
ggtgggtgggtggatggatggatggatgggtgggtaggtggatggatgaatggatgggtgagtgggtggatggatggatgggtggatggatgggtggatgggtgggtggacgggtgtgtggataggtgggtgggtaggtggatggatgaatgtatgggtgggtgggtggatggatgaatgggtggatggatgggtggatggaagggtggatggatgggtggatgaatgggtgggtggatgggtggatgaatgggtggatggatgggtggatgggtggatgaatgagtggatggatgagtggatgggtgagtgggtggatggatggatgggtagatggatgggtggatgggtgggtggatgcgtgggtggatggatgggtgggtaggtagttggatgaatggatgggtgggtgggtgggtggatggatggatgggtggatggatggggtgggtaggtggatggatgaatggatggatgggtgggtgcacaggtgggtgggtgggcgggtggtctagctggaggcagtgcagcatgataggagtgcaggttctggcatctgactcctgggcatctgactctaggaacacagaacctggcttttcatcttctcttagctgtgtggctgtgatcaacagactcaaccaccatgtgtctcggatcgtgtctcaggtcaggttccacagaagcaggtcctgagacaaagactcacatgctggtgatttccacccaacccgccaagagagttttactctgtcacccaggctggagtacagtggcacagtcacagctcactgtagcctggaattcccaggctcaggcaatcctcctgtcttagccccctgagtagctgggaccgcaggagcacaccaccacacctggcttattttaaaattatttgtagagatgggctctccctaggctggtctcgaactcctgggctcaagcgattctcctgcctcggcttcccaaagtgctgggattacaggtgtgagccaccatcccaggccacatgccagtgatttatgaaggaagtgccacaacagaaactggcaagggagtgtaggaacacagtgcggatgggtacagttttaggccaagtcccaggcctggcctcaccccattgggagctgtgaagggcgagttatgcctctgccttgtcccaccaaaggcta

SEQ ID NO: 29292 - DNA, 1987 bp, Artificial sequence
  DNA replication origin
gggaggagggcgagttcgcggatcgcagcgcgaacgcggggtctcgggccggggacggttacgacggaggggatggggggtcgggtcgcacgcccggcgcggagtcgcggggactcaccaaggcttcctcttcgtccttctccagcgcctggtactggcggcccccgcccgagaagccgagtttcttcaggaactcggagacgcgtccctcgaccatggtgagcgggcgcaggcgttgcctgcgtccctaggtccccggcgaggcccgggatggctgcgcgcgcccaagcctcctgggccggacccggttaccaggtagctgtctacctgcccgcggcaggtgaggccccgcccctggggcggggctgcgcacagggaggtgccggctcacccggccccgccccgcgagctcgcctgggaccccaggggctctggggacagcgccggctggccatgaaaggcccagggagaggctgcgtcgcctcagggcttgggctgtttcccaaacttacagatcctaagaatcacctggagtgggggaggtggaggagcaaatgctggtttaaaatccggattcccagacccctccctgcccagtcacggtttggagccgccgggagctgggtttttaacgagccccaggtgatcctcttgaggaacccagggtgggcggctctaaggcgccgggagcgaggtggctggagctcagtcagactcacacctgcggctgtgcactctggacgggtcacgtggcctttctgagcctcggcaacctagcctgtcattgagcggggagcagcagaaggctaagacccccacctccagggccctgggagtgagtccaggaacaggagcgactgagagccctgctgcctttggcgcctgcatggtctcggatggtcagggcccctgtcctcgtctgcaggatgagcgccgctcttgctcgtcgtgggacctgagcaggtttcttatatttttagcgccttggtttactgctctgcagaatggccaccacgatagcgcctccttcacagtgacatggagaggccccagcggacagtgctgtacaggaaggtctcgagcagggcttggagtagagaatgtgctggtgtccccatgacaccatcctcctcctcttcatcatcagaaggtgctgggctcaaatggctcccaaagtatgtgagtccatacgcagtgtagacagttgccagcagccaagtgggtgctttgaagttccagggctttctttggcttcaggtaggactagatccgtaactagacccaccacttagcagagggggagctctggggaagtccgtgccacccgcctttccgctggcttcctcatctctacagggaagttactcacgggctacaggaggtgccctctgcatttgtccacgaaattcagccaccccttttgagcaaatatttgccacctacctcaattgctcccgagggttgactccaggccacgaaaacctgcagggcagttccagtgccccttcttgtatctcctgcatcttcctctttcaaggaaacaaaggctacggtatcagcctggccccactccccagtttcaacaaaggtgcaggaataatggtaacagcaaacctctgatgtgagtgagtccagatttgaatcccaggaatgttcctttccgaccttgggcaattttcttcacctctctccacctcagtttactcatccataaaatggggatgtcactacctacccgtaggagtcagggtcccagtaggaaatagtaatttgaggagagtttgagaaacagactttttacaaagctgtggggaagacgtagagaaaccagaagtgcttgtgtcattaacgaagactagcaaagagtgagaagtggctttggtcccacccaaggcctgaagggccagacgagagaggagttacctggagggggagctctggggcactgataacttctgcagagggcaactgcttagatcaaaagcca

SEQ ID NO: 29293 - DNA, 894 bp, Artificial sequence
  DNA replication origin
ggcctggcctgagtcattggccgccctctccaggcgcctccttggtacgcacgcagccgggccggattcccgggcctgcagccgctcctcccgcagaccgcggccccgccccgagccgcacccaccgggttcggctcactccctgtgaggcgcgtcaccattggctgactcctctcttgggttccgccccacacctccgcttccacgattggaccaaatgactgcccctcagcaatgttgcctggcaacagggaaggggcggctctcgagaggagcccgtgggctgctggaccggaccggacagcaccaggaagcccggcagggtaggtacctgggctgaggttcgcagtgagctgacccagaggcgcaggcccagctgagtcgggggactggagcagacgggtccagagtaggcctgggccctgcccctccctggcctcccacgcctcttcaggccctcgggtcgggggagggagaggtgaaggctgcggggaggtgaggggtggggacagcggggcgggatggagggagggtctcctgggggggatcagaatcatcctgcacctcccgctgtttatgtggtcaaggtaagagggtggcgaggtgcttcccccagggccaaggccagccgtgttgaagggggattcagagcctgtgtagacgcggaaagggaggggtgcctccacggaggaggcgagtctggggtagacactgaagtgtgtgtggagggggttttccttcttgtattctgaccacacccatctgggcttttccaggacagtgagctgataactgttcccaggccatgtaggtggccagcacaggacaggtcaccttctggcccacaggaacttcttgcccaggctcaagctgccccttcgcacaagggcctct

SEQ ID NO: 29294 - DNA, 1328 bp, Artificial sequence
  DNA replication origin
tcacacctggccagaaccctgtttctaaaaaacgaaaccaaaacaacaacaacaacattagccgtgtggtggcgtgcacctgtagaaccaactacccaggaggctgaggcaggaggatcgcttgagcccaggaggttgaggccgcagtgagtcgtgatggtgctgccgcaccccagcctgcgtaacagagcaagaccgtgtctccaaaaaaaattaaaaaattaaaaaattaaaagttaacacgtctccatgtcctctgagcttccaagtagggctggtgaatggatgaacggtttggcaggtctgggatcctggtggctctgatcaggtagcagcttatgttgacatcagggagagtgccgtggaaagatccacggaagaggaggtcatgcaggggtgaggaagaggtgttggaggcccacgctgggcaggctgctgcttggcgtgggcctctggggccacgtgtgagcaccgaggacgcttgttacatgtctttggaatcccattcctagatttgggggcaagcacacattatgagttctgagctagaaaccactctttgccagttccagtctcatgggaaacagattcgaatcccgagtgggagttagatgtgccagcaatgtactggatgtaatgcccatgtgggtcgaggaactggggagaggagtgggtgctgaagggcttcagccgtgggacgtgtctgacactgacagagcggagggggagggaggatggcagtttgggagcggggaagagcctcagcctgcagagcagcaatgagaaagtcggggagcccagaataaagaggactgagcggagggggcggagtggccgggctctaggagaggactgagtggagggggcggagtggccgggctctaggagaggactgagtggagggggcggagtggccgggctctaggagaggactgagtggagggggcggagtggccgggctctaggagaggactgagtggagggggcggagtggccgggctctaggagccatgccctgtctcacattggctgggagccgggacaccaccagattctgtcttgcagggagatctgagccgtgcacccccatggccaccacaaacccaagaacacagacacagtagcccaaaaagagggatggattctgttattggagctggggtaaggtgaggagggggtcccaggctgagggctgcagggggacccataggatggaagcactttcaacactgtttcaaacaggctgccacatgggaaccacctagacctgcaggttcctaaagctgccctttggtgccacaaggccccatgtcttcccaaagctcccg

SEQ ID NO: 29295 - DNA, 1256 bp, Artificial sequence
  DNA replication origin
cctttaaactccatgctactggcccaagagcagacggggcccaaggcccagggagggctgttcgtagggcagatggtacagtccaagaatccaaaaggcactaacacaggcgggatgatgaggaggagtccagatcagatcaggacaaagagacataggcctttctcttcaccaaatgtatcagcaatgcagtgagaggggccaggcaggaccctgacatttcttgctaatgtgtccaaacacttgcagctttggctatattatgtttaattaactggaattaactgaataccgtactcattctccatggtggtttcaaataccgccctccaattctttataaactcttaggttagaaagaagaagaaaagaaaagaagaaggagaagaagaaggagaaggaggaagaggaggggaaagagggggagggggaggagtgggagaaggaggagggagtagggggaggggggaggagtgagagaaggaagagaagttgggggagaaggaggaagaaggggagggaggaggagtgggagaaggaagaggagtaaggggagaaggaataggagcaggaggggaggagtgggagaaggaggaggaatggggagaggaggaggaggaatggggggaaaaggagggcgaggagggggagaaggagaaagaagaagatgattttggattggataaaaccgttctgtgtgcagcatccgagttgctggggctccgagtggaaggggatcagtcagcggtgaccatacagggggctctcttagctggctgtgtctgcccaggtcaggagcacattgcatctaggcaccatgctgagggctgatggggcatgggcgtatcagagatagcctgcctctctgcctctttccagatcgctcattagactgttggccaggacatgctgagcccatagccctgtgacatgtcacccccttgggtggccatcagtcctgcccatgaatcagtaggttcccattcagggctgtcttgcaacaatttggaacccacctaactggattaaatgtcaaggaaataatgagagaccttgccagccatctgacatccaggttcactgtgtctgttgccttttcctggttgacagccttttgtagcctgttggaaataggttggcatggtgctcttagtgtcatggagatcaggcttaggttgtgaatgggtctagatctgagtcacagcatctccacttatgggctctgtagccttgggaaagtcacttaacctgtctga

SEQ ID NO: 29296 - DNA, 1172 bp, Artificial sequence
  DNA replication origin
tggcggcccctgtgtgacccctacagccacagccccctctgggcccctgcctaacagagggacagagagagggctgtgtccaccctgcagctctctggatttggccaaacctggctgctgtgtggcccattcttgggaacaccacactctcttcctgggtgactttggtcactcatccccccaacacatataaactgagcactcacggtctgctgggcactcgtgctgggagagctcagtggggtgcatcaccatgcacaaccttgtgaatggaccgaaacccactgaaatgtccactttcacagggtgcagttcatgctgtgtaaataatatcttaggatgaaaaagcataaagaaaaaaggaggatgaggctcctgggtgggcaggaggacaggaacctagtagggccatggggtgggggccgtgggaggggagcgtgggtggggagtgagggtggagagcagggggtgagggctgtggagggtgagtgtggggtggggagcagggggtggggaccgtggcatgagggctatggccggtgagtgtggatggggagcgcaggggttggggagtagggggtagtgtaggtgggggccatggggtgagggctgtggagcagggagcatgggtggggagtgggaggggagcatgggtgagaaggcggttggggagtatggggttgggccgtggtggggcagcgggagggagaggggagttgcgggggtagtagggagtggggagcatggggtgggggccatcagggagggaggtgggtggggagtggcgggtagaaagtggggggaggtgggtagctggcagggcccagggtgcagtggccccgggagccatgtgaggcctctgggttttcctggagcagtgcgcattttattctgatcacttttgtttcatgtcctcctagaactttgccttggccctttctgtggctcattcccagctgggcagggtcttattctgccacttcttctgggtccccaggcatgatgcgccaaccccacaggccctgagcagcccttttccctgagcacagccctgcctctcccctctgaactcccggctcccccactgcctccattcgcttcatagtctgttgccattgtcaccgttggtcccaaggccgccttgtccttatcatcctcacctagcgcttccc

SEQ ID NO: 29297 - DNA, 1002 bp, Artificial sequence
  DNA replication origin
cccccacccactccagaggtgggcatgtgatccaggcctggccacgcagagtctccatgattggtctagggatgggcacatgacctcagggccaaagacagtccagggacccccaaaatcactggcaaagaggcttgctccgtctttccaccaagatggctctgcccaggggctaaacctcccccctccccgcaagaatggaggtgaaggatgaagacagagctaggaggaggaggagaggctgtttggagttcgggcagtctttgctgctgctaggacttcccctggagtttccaggctagaggccacagtggattttctgcttacattaatctgcactgggcatttctcaccgccctcgcaaggtctctgaccatcccaggcgaactgagctatggagcaagaagcaagagcggaggtagcggaggggcaggcagcgaggaaggccgggagccaggcaagctcgggaagaagcagcgcagacccagagcaggcagaaagattgggaggatgagtgcgggggtgggagggaactggcctggcagcacagacaccccgtggccctctggaaaacagctctgagggaggaaaggccaggccaggaggctgggaagaaatgaggaggggaggctgggtggagagatcccattctggaaagccgtgggggaggaaggggagaagggacagtagcctgaggtgggagggccagggaagggggtgtttcagagagaatgcctgagtgccagagtggggagggttgggagaagagcaggaccccaggaaggcccacaccctgaggttataaggaagaaactgggtgctgtttctggccttccaagtctgctggccaccttgtgagatgtttggaagcaggaagcccgaaccagagtggaacctttcttctcaggcctgtcaggatacctggcagggaactggggccacaaaagagccctctctgagtcacaagtgggcaaccatgtcatttgcaacctgcaagcaatc

SEQ ID NO: 29298 - DNA, 1561 bp, Artificial sequence
  DNA replication origin
tccgcccccgcagcccgacggccaatgaagaggcgggccgccgcctgggcggccaatgggcgcgggggggcggggcgggccacggcctggggtccccgcgcgctctccgtccgcagtggaagccgccgccgcgctcgcagcttgcaggcgccgcgtagccgtcgccaccgccgccagcccgtgcgccctcggcgcgtacccgccgcgctcccatccccgccgccggccaggggcgcgctcggccgccccggacagtgtcccgctgcggctccgcggcgatggccaccaagatcgacaaagaggcttgccgggcggcgtacaacctggtgcgcgacgacggctcggccgtcatctggtaggaacttttcattcgtctccacgccccgctccccgggctcgcgcggggcctcgtgcaccgagccggcctccaggcgggacggattcgggcctcccgcgctgtcttcctcgccttattccgggacggcgtgccaggcccccgcgggcttctccgtggccagcgcgtctgttagattgtcctctgcaagcgccgcgtcgcgcggccaccagcgctgatgtgtgtgtgtgtttttttcttctcccaacccaaagggtgacttttaaatatgacggctccaccatcgtccccggcgagcagggagcggagtaccagcacttcatccagcagtgcacaggtagggaggcgcgcctgccgggcggatgcgcggtcgttgggaggttgtctgcacccggggagccccggccagagcgaacccgggaggaaccggtggccacatggggtgcccctggcgcatggcgtgggaggaacccggtgtgagcgttttaaggcctcataaaaccttctcccctctggacatccgaagcaacagaagtgacccacctgcctccgccatcctacaatgccttctccaggcggggcagctcttttgccccctgcggtccactggttttctaaggtcaactcctgtgtttccaaactccagtgtccatccagctcttcccactgtcccctttgatcagtcactgagcccaaatacgaacaggctagggggctgcttggaagggaaagaaactcagccgcgccctcctttctcccgctatcattgtctgcccgtgtgctgattttatgtgatttttaatttgacgagtagaatcagatgcaaaagagtacacaccatatgattccatttagaaatcctagacaaggcgaaactaatctatggtgtgaatgtcagaatcgagattagcttttggggctagatagccactgatggggaggggcacaccacccggactgctgggagctgaaaatgtctctgtagacatttgttgatctgggagggggttatgcaggtgtgtacccgcgtgaaaaatcatcagactgtatacttaagatttgtgtgccttaggcacttccctgtggcttgtgaaccatgaaaagaaagaccacgtggcaggcatcgccataaacccttcggtagtggcagaggctctgtgatgttggtaatgggaccttttaaagagattggagaatgcgactccc

SEQ ID NO: 29299 - DNA, 1789 bp, Artificial sequence
  DNA replication origin
tgcaatggtgcgatctcagctcactgcaacctctgccccccgccccgggttcaagcgattctcctgcctcagcctcccaagtagctgggattacagtcgtctgccaccacgcctggctaatttttgtatttttagtagagatgggctttccccctgttatccaggctggtctcgaactcctgagcttatgagatcctcccacttcagcctcccaaaatgctgggattacaggagtgatccactgcgactggtctgatttcctttatttgtgtttaaatttttgatccttttggaattttccctgatcaaaggatccacctttgttcttctttctaatggccaattgtcccattacccttgtcaaggagtaaggtaggaatggctttgtggggtatgaaatgtgaatttctttttgtcttatttataacagcatctgcctctactcttctgaaactgtgttcctgtccacccacccattcaactacccattgattgactgattgattgattcattcaatttctcgtttttgtttttttgcttgttgagaattctaacattaattggacattgtccctgaccttttgggtttctatttaggatttgtttttatcacttaataaccaacaatgatgacattttatcgaatgtctagtatatttgttccaagtatcatttcaattacacttaaaacaaagcagtgatgtcagttatactatttttcccatttgaggagtcatttaaaagaggttttgaggctttccaatggcccccagttggaaagtggcagtactggatgcaattcaagagcccagtcttcaggatcctgcctttttacctacctggacgctgtaactggtctctgtggaatggctggatgagggaatgaatgaatgagtcagtgaaggaatgaggaagacagaatgagtcagctcgtgctttcagaggagcccaaagggagaggttaagataggaatgcaaatgaccagaatccagagtaaacgcgagcccaccagcgttttggaagcagtccactttctaccccctcctatttaaaatgcttcattctttccagttcctccccacctagaatccatggaaccaaacgctggggtagggacagtggccagcctgtctccttgggtttgacgcattacatcatccacgtggaggtcccctgtggagctctgcagccctgcagcctcaggggcaggggggtggggagaatgaggaagggggagagggggaataggaggagggagtaggggacagggagggaggagatgccaggagggtaagtggagaagagggaggcgaagccgggggcagcaggggagggggtcaaggaggaggaaagaggagagcttggggagaaggaaatagggaggatggagaagttttgggctgggataggcaagaagagggaggaggagagaggaagaagaataaagggggaagggagaaagagggggagggaagggagggggaagaggtcagggaagtgggggaagcaagcagtgggggaagaagaggaaggaggagggagaggaggaaggcggggtgggaaagggggttggggtagtgggagtttccagggaggggtcgggaggggaggaggggaagtgagaaggagaaggagagagaagagggatgttgggggagaagagagcgggagggaggagggagagtgagagggaggaggcaaagcccctactccagcccccaccgcggagttgcgcaagccttccggtctgggattggccgccagagaatcaagacgctccgcccccg

SEQ ID NO: 29300 - DNA, 998 bp, Artificial sequence
  DNA replication origin
ggcccgggttcaggagacccccggccagcccgctgcgcagccatggctccgccaggaagtgcgaggccgagggcggaggcggcgcgcgcggccaatggcggcggccgcggggaggcggggccgggcggcgcggggcggggcctgcggctgagggcgggacgcgggggccgtggggtgagctcgcagggtggacgcccccctcgtccgcgccccggggatccccggtgtccaccccaccacgacgcccgactccgtcccttcaaaggcaggccccagccccgccgcgcgaaatgctccctggtgccacccaccgtcacggacgcagggccacggcggggaccagacacgcagggtcccgggcctcgaggcaccgacgcgtgcgctgggagctctttgctggcccagagtcgccgggacgggcaccgcgcctctcgcctccttccgggctgagcgggagcgtccctgcggccaccctgcggcgaggcctttgctgaccgctctgctcgaagtcacagcccctctctctgcacccaacttccaaccccatgcttcacttgagctcttatcagcgtctaatattccaaataatgtactagtttattcggtttattgtctctcctccctaccagaagccctccagggcagggtttactgttagttctattcctgactgggtcgtcgccaagactggcacacagtaggtgctcagtaaatgtgtatggaatgaatgaatgtaaccttcatcgatccatctatcaattgtcacacttcgctcatgctacagcgggatgaaccttggagatgtaatacttagtgaaagaagccagacacaaaagaccacacactgtatgattccgtgtatgtgaaatgtccggaacaagccaatccatagagacagaaagtagatgagtggttgccaggggcggggagttgctggagtgggaaatggctgctgaaggatcagcgatttcttttgtgtagtgctcactacagcctcc

SEQ ID NO: 29301 - DNA, 1926 bp, Artificial sequence
  DNA replication origin
catggctgcgcagcgggctggccgggggtctcctgaacccgggccccgccgccccgaccgcccggccccgccgccggggctgtccccgccgcgtccgtagcgcgtcctgccaggtgggcctccgcgcgcgcccaccctccagcccgggaccgccaggaagccgcgcccggccggggcggggagctggcggagatcgggagggtccccggccaccgcgagccgcgacccccctgcgccccttggtgccggggcgggcgggtgggcgagtgggggcgccgcggccgggggaggggccgccgcccccgcaggtgacacaggtgcggcctgtgcggaccgccccgcgcgtggcaggtgagtggcccccgccccgggccgtcccgactccgcctcctcgccgccggctggagcctgctgggcggccgttgcgctgagttccgcctgggctgcggggtccgagcgaacgacagcggcgtccccggagaccccgccggcgagccggtgtcagcagcgtcgctttctccaacgctgaggtcgggagggagcttggggaggaggcgctctgggaaacccccggccggacggggcctgcggtcccatgtttactggaagaccttttccagtgacctgggattgtcactgtgcttgggggtggccttgacccttcacctgcttccaaaaagcgtcggaggccgctgacgtccaacacgggtggaaatcagaccccacccccacgcacttgcaggagacagcagggagcctccggccccgcgaactctctctaggtatcttggcctagaaaataaagcgttgagcgttagaaggcctggttgattctgggcaggctgcctggggcggtggagagagagggcacctgctgcttgctgttctgtgaccttgggcaaccccccctggggcacccgagcgccaggtctcactgtgggaacgacggtgtcacctctcagcgtgaaggtggaatgaagtcgagtccgcggtgggcaccgcaccaacgctgggtttcttctcttccctctctgggctctccagcatcctaggggagggccggggtgggaacagcttgtcattgtcacaaagtttctagtttgtcgagaggaatccagttgccccttctctccctaggggagttgcacgggacggactgtgcccgaattcattccttccatgggaacactggagtgccctccctgtgtccccagttatctaagaacagtgctgacttcttgtcacattgttctttattagtgaagactatttgttcaataggtaacaaactcttctcatgaactcaaatagcgggggaaaaaaatcctctttaaaaccttcgtctcagtatgtgacttgtgctaatattagttggcaaagtcccttctctgtgttcccttccatctttgaagcacctgcccctccccctgcctcccccgccccccacacaccaaagcttaactctgtctgcagtgatcccccacccaagagccaggcagtgtagcctaagagttaagagcatgggcgcttccctgagctggaatcccaattctgccagttcccagctgtgtgacgccgggcagcttatttcacctcactgctctcagcatcctccagtcacagtgctggcctcatggggttgcagtggggactaagtgaagatgcagagaagcacttggggacagtgtgtgtctagaatgtactgtgtacatggtagtcatcactgtaccacatcctcatctgcatcatgatatttttaaagtgtgatactctcgaacccgggcctcattcagcagcgtgtcatggtgatggatccaggttttgaagctggacagaccgaggcgtgattctcggccgtttactagctttgtgaccatgagatcaatatcctcatctgtgaaatgaaataagtgatatcagcctggc

SEQ ID NO: 29302 - DNA, 1392 bp, Artificial sequence
  DNA replication origin
gaaggcgcagaccggcggctacctgcgggctgtggagggccatggctgcccgtttcattgggactccgcgatcctccggctgctcacgctgcttcccccgccgccgccatcttctcgcccgcacatacacactcgcatcggccgccgcgcctgcgcactggccgcgcgccgcggggcgcggggaggccggcccgctgctgcgcctgcgcggccgacaggtgggcgtgcgcctgccgggccgcggacatcccctgccccgcctggagcctgccggactctgagccccgcgaccctcgggcggaagcggccgggcggctgcacaccaggagcccgccgaggcctggctgtggatccggaaggggagagggcaggcaggtagaggtggcaacgccaaggcgccggcgggcccggctcctcacctactgggggccacctgggcccccggagcccgggagtcgcgggctgaggtcggcctggggcccacgagccgccctcagcgtacctgggcccgggcctcgggagtgttcgcattagatccccgaggagggtctggtttatgaagatcccgttgccgcgcattcattcatttgttcactcttcattcactccccaagtcctgcctgggcgcctgggccacgcctttggctaggcattaggggaaaaaagcaaaacagacaaaaacaaaacgtagggcataaaagcacgcgtaaagtgcttgacatgaggcctggcaagtagcaaacactcagcaagtgctacgtgttgcacacgtgcgtgcgtgtgcacgggcaaaccagccttgggggtcgttggttcattcattattaagaaacaggggcccctgcctaactgcactgttttccagccagtgggtccacccttgggttttggccccttttctagctgtgatttcagacaagcgactttccttccctaagccttggtttcctcacctgtgaataagacaaatatgtcataacgcgtaagatttctgtgaggttcaaattagattaacgtgagcacactggccaagagaatagtcaataaaaattggctactgggattgttattaataaccattactattggtttcatttattcaacaaacacctacagagagtctgctcttgctagaccgtacactgagcagaggagatgaacaggaagatccattcccacgttacataaaatagggagcctggtctcttcataaatgggatgccatgaaaaatataagtgggccaggcgcagcggctcacacccggaatcccacacattgggaggccgaggcgggcggatcacttgaagtcaggagttggagaccagcctggctaatatgatgaaaccccaactctactaaaaatacaaaaattggtgggatgtagtgtggca

SEQ ID NO: 29303 - DNA, 1157 bp, Artificial sequence
  DNA replication origin
cggcgggggaagcagcgtgagcagccggaggatcgcggagtcccaatgaaacgggcagccatggccctccacagcccgcaggtagccgccggtctgcgccttcggccggaaggggcccgagccccgggcgggcggacgccgcggcgggcgggcgtccgcgccctgcccggagcgagcgtgtgggagtgggggagggcgctgggacacgctgcccgggcctaggccggagccacccgccgcctccgcgcccgccgcgccttcgtcccctgagccacccggaccccctagtcccggggaggtcgaagggcgggggctccgggccccgcttggggagggcgtggagggcgccgaaggggttaacctccctggggctggaccgcggggcgagcccggggtgtggagtggggccctccccgccgcgccggccgggggaggcggcccgggggctccgggagtcccctggagcgcaggggccccagagcagctcaggttgctgcctctgcctggagcgagcctcagagatttgggggtgccctgttgcccctttgccccaagagcttcctttctcagcttgattgatgatgcgggggttgccgattttctgttttttagatagaagtagcagagtagcggccttgggctgctgttgcaaagaaaactcgaaataagtcgcaaggaccgtactttcacttgcgtttgagtgacatcccttgcacgaatccatcccagccaggctgacaactaacgcaccctgcctgaacagtagctaaagcttgggggccctttacaataatcccgtggtggaaagaaagagctctttttgggagatgtgcgtgtagagttaagctcttattcccctctcccaccccttctctcacatcttctcccccctccgccattataattattctggacaaaaatcggcatgatgtattatttgtcagccttgctttagactgctaatttgttgacatctggtccctataaattgttgcacacttttaaaccatctcattgtgtatttgtattaaatatggggaaatgaaacaaagtagccattcgggaaactgattgcgagtaaaatcataacccttcatgagcaattgggttttgttgcccttctgcagatgaagtcaatctgactacacctcttttga

SEQ ID NO: 29304 - DNA, 1562 bp, Artificial sequence
  DNA replication origin
cgcagggctccaatcaccagctcgctggcgtctcccgcgtccagcagacgcggtagcagcggcgacagcgcgggcacagcaggcacagcgggcacagcgagcagacagctcaataggagcagccggagacgccctgggatgcgagtgggtgccggggctcagcgtaccgcctcttgtaggctccccggagcccggaggccacgcccccagatcgctggcggcgctggtaggaccgagcatcaccggccccgcccccggccccgccccgcaggctcagcgggctgaaggaggcggggggcagctgaggcgcgggcgccgggtgggcgaggaaggcggggccgctggcctccagggccggctagggacaaggagacgctcagctccctcgccactggccacacaagcatagttttcattgagcgcttactatgcgcctggcgcggtgccaagcgcttcccacaaggggcttgcaaatttaccaaaccccagctctctgcagctcaactggaaaataggaataaggaggcgacctcccaggattttagcaaatgaaatccgcaagggctgggcgctgtgaactgtggcgcggtgcagagtacacagttactgaggtgactcccaccctctacacgtgctcagaaaacttaggccccctcttcccaatttgcagacgaagaaagggagacttgtttccggatggggccgctagcgcggggatccaggctccgcactttaccttcaacgaccctaggacgcgttcccaggaatccagggaggtggaaatcacctcatttcacagatccagtagctgaggcttggagaagagcgtgccccaagtcccgtagctaggagcagtgcagcatgttcatatctcttttgcccggaggcatttagcatttttaacctgtgcaggtacatacggaaatcaatttagagccagacgaaatcacctttgaaacaggtaaatccacgttccttaagagctaagggactgccccgtgctcccgcctcagtcacaaaatgtggacgggtatgcaggcactgcgcggtaaggtgctggggcccaagggcaggagggggcctgtccgcactgctcatctccgcaccaagacaccggaattagctcctccagcattaactcattccccaaatacccatcgagtcgctctgtgccgggccctgtgctatacagcaggcacaaacaagacacctccgggatctcagagtctggggcccccacgagctagggcacgtgggagaaacaaggatggggaatgggtggaacaaggactatggaaggctgcctgcgtgacgtggactcaaacagggaaggcttgcctaagattttggtgcggctcaaatgcagatacagaataatgcagactggccgggcgcggtggctcacacctgtaatcccagcactgtgggagtttgaggcgggcggatcacctgagatcaggagttcgaaaccatcccggccaacatggtgacactgtctctactaaaaatacaaaaattagccgggcatggtggtgcatgcctgtagtcccagctacttggga

SEQ ID NO: 29305 - DNA, 1940 bp, Artificial sequence
  DNA replication origin
tattttccagttgagctgcagagagctggggtttggtaaatttgcaagccccttgtgggaagcgcttggcaccgcgccaggcgcatagtaagcgctcaatgaaaactatgcttgtgtggccagtggcgagggagctgagcgtctccttgtccctagccggccctggaggccagcggccccgccttcctcgcccacccggcgcccgcgcctcagctgccccccgcctccttcagcccgctgagcctgcggggcggggccgggggcggggccggtgatgctcggtcctaccagcgccgccagcgatctgggggcgtggcctccgggctccggggagcctacaagaggcggtacgctgagccccggcacccactcgcatcccagggcgtctccggctgctcctattgagctgtctgctcgctgtgcccgctgtgcctgctgtgcccgcgctgtcgccgctgctaccgcgtctgctggacgcgggagacgccagcgagctggtgattggagccctgcggaggtaagtgtgatttccatgcttctcccttttgcaaactgttacccccccgagaagctggaataactaggacagatgccacctcgcagggctgactgtgtgctggcaccacaccgagtgctctgcttgcatagcggaacacagctttgcgacatgcccttttgcagatggagaaactgaggctcagcgaggacaactcatttgtccaggacctcgcagccaggactccaaggacccaggattcaacgccgatctgagcgcagaatcctgctccttagaggctgtttactctcttgccttcctcgtgcagttcactagcatttgttgcattcctgtgttcgtagtgggtgtcaataactggaaagctgatggcatggatatggcaggcattagaatgtgtcctactcatgtctggaggaccagggtgatctagtggcatgtgcattcagctgcagtttagagggccacgcccctctgtgatttcatttgcaaggtagccttcttcccacatttcagatgaagatgctgagggtcagagaggtgaagtaagttgtccgggcagagccagggctggaacccagctctgtctgtctccagagcttcaaatggatgtgtagagacttggggccatgtcagggttctgcagtctgggggaacacgtttctgggtttctttagccagagcgggcacctgcataactcctgcgtggggagagttaccctggaagcggagggctcactctggagtgtgggggagatcggtcgtcccacgtggacagagccagggctagtccctcatgtgctgcagacccagagcctcccttgctaaggctgggctggtggacaagccagggaggacttcgctgatgcctgctcatcgcagtccaacttgaattgggcgtctctcagccaaaatgtgagttgctgccctggctgagagaagcatcccgtgcaaatgcctagcttgccttgcaaccgagagtggggttgtgagtttcccctttgggcctttggacctcttgccctggtagaatggggtgagcctgctttccccatccagggtctgatgtctgacagtgaggagagcctgcagaacaggaccggggcgtggtcctttccagtagactgaggccatgagttgtgactgtcggctgtcccagggctccttgggttgtatgcacctgattttctgcttctgcccctgatctggctgttcccactcaggagaaggggtgggtgtgtgactgtgttgcctgtgcggcaggcacgcggtctgtgccacgcagtttacctgtattgtcatcgctgcaacaccccggggagtaggcctcttgatgcccacttcacagctgaggaaactgaggctcagcaaggtgaagtgcttgcctaagatcccccagctggtatggaatgctgtcacccccagg

SEQ ID NO: 29306 - DNA, 1622 bp, Artificial sequence
  DNA replication origin
caagagctgttgtcgtggcgggaggttggtctcacttggatgttctttcaaagtcccttggcagttgcaaagcagagattgaaactttcttcaacatctgcccgggttgcacatttctgtcctcagctgatggtaggaaggcctggcggaaggccccaaaaggagggaaacacaccaagggccgggtctcagtcagggtgcagcccccacacgcagatcaggacccagaggagtcatggagagcccaggctgccgcccccacgctctcaagccagaaggagccttggggttaagcgggggcgtgtgttccccggcacacgtgttcattcctaaggccaccccagccaacggctgcaaatgcagaggctgaaaccagcctaacacgtggaaggccccagggccacgccattcagtgtgatttcagcgccgcgttaatggggggaatgtcgcttcccggctggggcccctgtgtgtgcggcgtctgcacgctcccgtgtctgcgtgggttttctaggggcactccgctttcctcctacatcaaagatgggatgtgaaggaaatggcacgtctgcgtggtgccagcctgagtggctgtgagtgtgggtgagtgggtgtgggtgtgtgggtgtggtgagtgggtgtgggtgtgggtgagtgggtgtgggtgtgagtggtgtgggagtgggtgagtgggtgtgagtgagtgtatgggtgtgagtgggtgtgggtgagtgggtgtgtgtgggtgtgagtgtgggtgagtgggtgtgggtgtcagtgggggtgtgggtgtggataaatgggcgtgggtgagtggctgtgagtgtgggtgagtgggtgtgggtgagtgggtgtgggtgtggatgaatgggtatgggtgtgggtgagtggatgtgggtgaatgggtatgggtgagtaggtgtgggtgacagtgtgagtggctgtgaatgggtgtgggagtgggtgtgggtgagtggctgtggatgtgggtgagtgggtgtagttcagtgggtgtgagtgggtgtgggtgtgagtgggtaggggtgtgggtgagtgggtgtgagtgggtgtgggtgagtgggcgtgggtgagcgggtgtgggtgtgagtgggtaggggtgtgggtgtgggtgagtgggtgtgggtgagtgggcatgggtgtgagtgggtgtgggtgagtgggcctgggtgtggataagtgggtgtgggcatgggtgtggatgtgggcgttggtgagtgggtgtggcaagggcatggtgtgggcatgggcatggctgtgttgagtcggggagattcatcccttgcttgccttttccagcttcctagaggtcacccgcatcccttggctcatggtctccttcctccgtcttcaaaatgcatcactccaacctcagagtctattgtcccatctcccctctgactctgaccccctcacctccctcttagaaagggcccctgtgatgacattgggctcgcccagttaattcaggaaaacctccccatccaaaggtcctcaacttaatcacatttgcctttccttccttcccactatctgggatgtagacatgatggcaggagctgaagcaaccactttggatccagaggttaaaaaaccatgtgctg

SEQ ID NO: 29307 - DNA, 1775 bp, Artificial sequence
  DNA replication origin
aggctgcggggtcagaggcccagctcccttgcctgaagactgcctcccgcttgcctgcccacgaatcaggctggggctgggctggggctgaaatggggccctggccaggcttcctccggtccctagcctgccctgcttctgcacccaaagcccgcccggccgggcactcccacggtgcctgcacgcaggtcctcacctggggctgcgcctctagggcctcccacctgagacaggcgttgggactctcccccagtgcctcccactgtggcacatgaggggcagtgctgacttcctcagtcactcagcagatactgactgagcaccgaccttgtgccggccaggactccaggtgccaggcggtgctgtggctatgtgtgtgtgtgtgtgtgttcctgtgtagttttgtgtgtgtgtgtccctgtgtggttttgtctgtgtgtgtgtctctgtgtgtttttttccgtgtgtgtgcatgtgtctgtgtggtttggtctgtgtgtgcttgtgtctgtgtggttttgtctgtgtgtgtctctgtgtggttttgtctgtgtgtgcatgtgtgaatctgtgtggttttgtctgtgtgtgtgtgtgtgtctgtgtgcttttgtctgtgtctgtgtgtgtgtgtgtctgtggttttgtctgtgtgtgtgcatgtgtctctgtgtggttttgtctgtgtgtgtgtgtgcatgtctgtgtggttttgtctgtgtgtgcacgtgtctctgtgtggttttgtctgtgtgtgtgtgcgtgtctgtgtctgtgtgtgtctgtgtggttttgtctgtgtgtgtgcacgtgtctctgtgtgcttttgtctgtgtgtgcgtgtgtggttttgtctgtgtctgtgcgtgtctgtgtggttttgtctgtgtgtgtgcacatgtctgtggttttgtctgtgtgtgtttgtggttttgtctgtgtctgtgtgtgcttgtctgtgtggttttgtctgtgtgtgtgtgcgtgtctgtgtggttttatgtgtgcatgtgtgcctcaggtgcatctctgcgtgtgtctccgtgtgtgtggtggggtgtgcctctctctgatgtttctacaggggaggagcaggtatcaggtcacacaggtgctaagtcgcagaactagggtctaagcccgagtcctgaggctctccaccaacctgtgcctctgagaaaggaagcgcgaatcctccaccgcggggcctgcgtatcccttagtttgtatttgatacttgccaaaagagctctgcgagacttatttagattcttatgaacactccgggcacacgtaaacaaaggaaacacgagtgaaatgggtggattacagaatgtcctaaacttcttcacttttggagtctgactctctgaatcactccttaactctgagtgatcaaggtccatgttctctcggtgccaccaaccatgagtacagcagcaactcttcaagggctccactcaagggctaaacctttgcttcttgaaccggctttgcaattaccgtatttcatcaaatatgagctgccactgcaggtgaggagcatcctgattccagagacattaaaatggaaaggaggtgtgtttctccagtttgataaaaagagaaagtggcctggactccttttgactcccacatccaactaacacctccttcagctttctgcacagccatgtaattatcttcccagctatcctagccctctccctctccctccaggttggcatcggctcctagttctctaaacagaaggatgtcctgcctcaggccttcgt

SEQ ID NO: 29308 - DNA, 860 bp, Artificial sequence
  DNA replication origin
gtgaggactggtggagaggaaggggaccctccggtggagcttgattggaacacacgccctgcaagggtggaggctggggactaactgaggtccttcagcaatggggtgggctgcggggtgttggaagagactggagaaagtagccactgcagatgatccgcccacacccacccctcccaaagctggagcctctgtcgtgttctggccacgaagttcagggcctccttcaccccccgtcacctctccttgggcagagcgggagggagaaagaacatgcccagccaggggaaagctctaaagacgagaaactccagcagaagaggagatgatgacgagggggaccagccgcagggcagatagtgaaacacaggatgcatttcgggactggtcctcgccagttaaggcgcaccgtgtctgccacttggctttcctcctcctctgctctccaaggggagctctgcctttcccaggctggttccacttctagcagagtcggggaaggggcagcgagagacaggacctagagaggaaggaggggacaggcgaggaggctgtcctttatggcggagaatccagattctagaggaggccatgagaaaacaagcagaactggaagaagaagctcctccctctaagccaagcaagggctgggggaggcgaggggaggaggagaggcagaaatgagggctggatgtcgggggcagttctgggtgactgaaggaaggttctggagcagagcaggatacaggagaagcagggaggagaggaagcaggatttcgagaaacgtaattgtgggttaagaggtggattcctttcaatgttctagagacatgcaagtaaaaccccagattcctttcca

SEQ ID NO: 29309 - DNA, 916 bp, Artificial sequence
  DNA replication origin
acccctggcagggttagttcccctcctcggagtcccataggcccacgccctcataacagcactcaagccccgggtatgtggttgacaggtgctgcatccgtccctggttcctcgcggtatcgcctcctagcacggcatagtgaatgaacagcaagcacgtgctggcacagggtaacggaatgacccatgccctctcgtcaaccccacacctgaagcacacctaagggctccagatcccactgcgccccatgaggaggggtgggagaggtcaccatatccattcgatggaggaagctgaggctcccagagattcagcctgtcccctgaggctgaccccacccctctgctccgtgccacctgaatcttgctcccaccgtgtcatcagcaaagcaacctccaggtgctaggggtgaggatgcaggtcacggcaagggtgggctggggtgggggtgggcaacacctcccggcatcctggggtgctcaggaacgccagtgtggagggtgaggactggtggagaggaaggggaccctccggtggagcttgattggaacacacgccctgcaagggtggaggctggggactaactgaggtccttcagcaatggggtgggctgcggggtgttggaagagactggagaaagtagccactgcagatgatccgcccacacccacccctcccaaagctggagcctctgtcgtgttctggccacgaagttcagggcctccttcaccccccgtcacctctccttgggcagagcgggagggagaaagaacatgcccagccaggggaaagctctaaagacgagaaactccagcagaagaggagatgatgacgagggggaccagccgcagggcagatagtgaaacacaggatgcatttcgggactggtcctcgccagttaaggcgcaccgtgtc

SEQ ID NO: 29310 - DNA, 1213 bp, Artificial sequence
  DNA replication origin
ggggtacgagtaagcattccttggaggccacctcatctggcctgcgtgctctagtgaggtcccgcgcacatgttttctggacctgaagttgtgacttgcctacaggtggggtttttctcttcacccccgtctccctctttctctataacccttgtgcatttctcttctactccttttctgccaggctcctttgggcctctggcccactcccctggcagatcttatcacacgcccctgtcgtttgcctgtggacttcctttctactttttcttgtctccctcaagcaccctccttcccttacttattcactcaagaaatgtttgtggagtgcgtggtgaacccgggagtgctggggatactatgagtaacattccattgaggtgatggcagaacaagcagccagggagaggctgctaggaagggaggccagcaggctccagatggagtggggctttctaggccatggtggtggggtggagtggggggtggggtgggattttattcgcactgaaaaggcagtgattgcatgagcttagggaggggagtgacatgatctgatttacgtctgtggaagaccactctgggtgctgcatgggggactggactgttgggtgagcagaggcatgagagtagagagaggactggtcagcaggtgatctaagcactccccaggtgagagctcatgggaccttggtctgggcgggtgaggaggtgggagaagtggtcggatttggggtaggtttagaggtgcaccccataggacttgctgatcagctagatgtggagaggtggggaatgagatacatgaagggcggggcctttttttttgggtgtggtgtgccgttgattgagatgggaaagagtggggtcgtgactgagtgggggaggttctgctttgaccctcctgccctggagttgttaagtggccagttggatagacgcccttagggatgcatcgtcagcctgagagttttccagatatctttttttgtttaaacttcgtgaaactgaggttccccattagctcctttgtggagagcatgtagatgaagggaaggccgaggactaagcccgggtgctcccggcgtttacatgggtggaggagaagtatccagtcagagaccgggtgtggctagggggaagggaagtcagtgttgtcccccaggcccctcactcctgagactggtgttccctctcccacttccacggttca

SEQ ID NO: 29311 - DNA, 1310 bp, Artificial sequence
  DNA replication origin
agcctccgggtcccctcaaaccgcctcgagcgcccctctccgcgagagctgcgcggccggaactgcgccggcgtgacgtcactgacctcgtcgggttcacttccggcgctcgcaccgccccgctctccagccaaggctccgggctgaggcatttgcttggctgcagcctccttccgacctgcccggcgggacccaggggaccaagccgagccgagccgcggggcccgctccagcccggccatgagcgcggccgcatgatgcgtccctgcctcggccgctgcagtcgccgccgccgccgccgcaggccgggaggagccgcagcgccgggcgaccccgcccgggcctcgggtgagtgcggcgggctgggccgggcgggctgctcactcccgggtctcccggccacttctggcccccggcgtgccctgtccttccgtcggttccgccgctctgtctccaccccgccgcacacctgcgaccttctggagttcctaggggcacctccgtgcccgcacctgacttcccttccaggtgcccccttgtcattccttagttgctctctcgggatagggcccggattgcagccccagctttttgcctgaccttgggcgtgacactcagctctccgagccctggttttctgtgtggctaatgacggggtggtggttacagagcagctataaaccctgtgtaagctgtaaagagttttttaataggcaggtattacaatgagcagtctcgcacttcgcgttgtggcttctcttcctcttaagctgtaaacttttctcttttattctctgcccatcttcctagttatcttccctcctgctccacgtcagtcatctttgggtgttagttgcctgaaagggcatctgggacagtaaagctttcagggcagtaaggctcacctctcctggtgtggttccttctacaactttgtcacactcagttagatagacacactttattagcttatgaagaaccagtttattgtggccgttaaattggagtgtaagagacagtgttgatgcggctacctgccttgtagcttcttttactgtctgggctgtatacagtgctgggcaaatcgctgctacagtgttgcattttcagtctgcttagtgtatgcacttaagcgcacgtatttatctattttactgttactatcccaaggggtttagagatttaggtcaatgtgtattaatatttctttctgaactcttcatctcacagatgaagaatctcttttttgttatgttttacagtgtttacatacctgaaatcaccttttagtcactttgtggcctggtacg

SEQ ID NO: 29312 - DNA, 1136 bp, Artificial sequence
  DNA replication origin
ccctaggaactccagaaggtcgcaggtgtgcggcggggtggagacagagcggcggaaccgacggaaggacagggcacgccgggggccagaagtggccgggagacccgggagtgagcagcccgcccggcccagcccgccgcactcacccgaggcccgggcggggtcgcccggcgctgcggctcctcccggcctgcggcggcggcggcggcgactgcagcggccgaggcagggacgcatcatgcggccgcgctcatggccgggctggagcgggccccgcggctcggctcggcttggtcccctgggtcccgccgggcaggtcggaaggaggctgcagccaagcaaatgcctcagcccggagccttggctggagagcggggcggtgcgagcgccggaagtgaacccgacgaggtcagtgacgtcacgccggcgcagttccggccgcgcagctctcgcggagaggggcgctcgaggcggtttgaggggacccggaggctcttacaaactggcagttcattgagaaaaggcagcttttagtcacagcccctctcgctaagacagagatgccgccaaactgaagtccggaggagaaaggataggggctacgggctgcagcagggtccaagccacgccgttaggctgcggaaccgggttgggaatgcccttagcggagtgtgtacccgcgcccgcggcggtgtctcagaggcagctccagtggcctgtactatatgcggggatgtgaccgaaggaaatgggaaagtaagggagcgggagtggaaatggctgagccagaaagcacttgggaaaagaggaaagcgccctgaactggggattggaggcctgactcctgaggtccgcggagcccccggcctcctccttgagggacttggacactagagcaccgccactgtcccttccatataggaagccctaagtgtttgaaagtaggaacatgtattttaaggccgggcgcggtggctcacgcctgtaactccagcactttgggaagccaaggcaggctgatcacttgaggtcaggagttcgagaccagcctgaacaacaatggtgaaattccgtttctattaaaaacacataaattagccggatgtagtggtgcacgcctgtaatcccagcagcta

SEQ ID NO: 29313 - DNA, 1338 bp, Artificial sequence
  DNA replication origin
ggcccctcaggctccgccctgtcacgtgacaccaagcgctggccgcctcccgccccccgcgaggggagggccgtctcgcgcctgcgcagaaggggctggaggcgggcgcgtccggttgactgacagctcgcgccgcggcgccgggaaaggacccggctgctcgcgggcggcgcagtcgccgcagcagccgagtctgacggcgccggttcgctgcccggtccgcccgcggtgagaggtgcggtggggtggcctcaggccggcctgacaggctcatgaggggaaggatgacccgggagggacggcggggacccgggatgggggtctgcgaggggtgacagctgggagcgccgtggggcgaggggcgcggggagggaggaggggtccgcggggcgagcgggggcggggcctcgcgggccgagggctcaggccggggttctccgcgggctcctcgcctgctgggaggcaaagggaataggggaaggtcgccgggagcccacgggcggaggggcagtgcggacgcccgtgaatgagtgcaacccgggccgctgcctggaggaggcgcccccaaccccggggcagatggtggcagcaggtggctttgggatggagctggtgtcccagtcttgggggaagaagaaaccccggactcctgcaagggcattctggggagagggtgcaaggaccccgggggaaagacattggcgagtcatgcgtgtgtgcggggtgtgaagttgctgcctcaccgctcccggggcttagcagggtgggggtgagagaaaggggcttcctggcctgggtggccacccctgtccattctgcgtcttccctctgctcttgatgggccagtgagcaaaggggaggattgcagggaggatagcaatggaaatgcggttttagcagctcagtttaggaccgctggatcagatagaattgaacccgtttagaggatcttgcaaaggacagaattgagtgttctggagctgggtgcgtgccccccacccccgcccttgtcctgggtttgtgctttcctgggttgcaggttgattagacttgggaagatgaaaaggggaagaggaaaaaaagactttacaggggcactagccaggtcctattcctctctaggtaggggccaggcatgagtcccagcctccagattgagcaggaacagcctctgagctggcacaggtgaggcgcccctgacgtggaagtagtggctgtggtgagtcagtgttagaggcaggctgacagctgtcaggaccgaggctgctttagccagcctgcgactcgatgttgatgtttcggattcatttccttagaggcatcctcctccctcagcct

SEQ ID NO: 29314 - DNA, 1153 bp, Artificial sequence
  DNA replication origin
cacgagggcagggcctcagctgtctcgttcacagcagttcctggtgcctggcgccgtgcctggcacatggcactcaataaatatttttgaacaaattaatgaacgaatgaattagtgaacgagggctacttagtaccgggtgctgcccacagacttcagatctgccgctggaagtcaccagactcctcctagaagaggccacagcccccagtgccccaccccagcaggggtcagattctccctgggtggtcctgctcagaaaacacggctgggggagctgccaggcggcagggggttgggggagtcccagcctctcctgtttcttcggccttgcgggcgccgtgaccttccccacctggccctgtccgtcttgctggctgccctggccaccagggagcccgcagtgcctgccccggctcccctttcacacggagaggggcgccttctccatctgtacggcctcaccgggactttcctccccagctctcaggttacattccattcacaaaaaacagtccagattgtaagatgtgtgagcgaattataaggaaaaaagcgaggtggaaaaatgtggtcagagagtgagctagctgggatcggggcacaggaaattgttccacccacccccttccacccacccacacacatgcccggggccagctggaagcctttccatctgctgcgtgggcttccaggctcagggctgcccgctctatgcaggggggttggtggggtagggagcgggggaggggacactgagcaagagaggcaaagagattcagtggcagaggctctaattaacaaccactccattatgtcctcttggccaaagctgccaggtactgttgggcaggttgttcactctgcaagggtgcttggctccatccaacaagccatgtgccctggcataaggctctgtctgcccagcgggggacatcttttcctcacacacacaaaggtagctcatgcactggtggtctcggctcataaatcttcacttctaaaatgcttaaaatagaactttgctcaatgtgactctctcactccaagactctccatggctcccactgatctacaggataaaaatagcagcacatttcctgatgactgcctgtgtgcctggactgtgccaaggggtttcgtgtgcaatgcc

SEQ ID NO: 29315 - DNA, 948 bp, Artificial sequence
  DNA replication origin
gggactacaggtgtgagccaccatgtccccaggccacttgaaagcatgtttgttttgtttaaaagcgtcatctcttctgcacgtgactgggtaacatgtctccaggagagcctggggaggccggtagacgaaggggctcaggggggcgtgggcaggggttctggtccctggcctcctcaaacccagcatggcagagaaggcctacgtcccttcactcatccatttgtttctcaaatattggccgagtcctgttgggggtgagggtgcatgccaggcatctggattataacagcatgcgagacagaatatcctgcctcctccattttagtgaaatgcgaggaataaaaacataaccaagtgggtaaatacggtaattgtcattagggtgggtctaggaagggagtcagccaggtgctggagcccgtgagtctaaggtcagcctgcttctgaggggggctcctttcacctgggctgggcaggaggagagggcccagtcacatggggagcagtaggaattctcctggcagcaggagtgcatgtgcaaaggccctgaggcacaagaggtttgctgggctgtagagtatggaaggaagccccagggggcttacaaggagggaccaagggaaggggggcaggatctgatccgggcgtcctgtgggccatggtgacgacttggggctttattctaagatcagtggggaggtcactagtgggcttgagcaggggagctcagggtctgactcatgctttaggaagacccccttggccaggtggtgggaccgcgtgaggggagggagagtgagcggggaggaggcgattcttcattgtttaagtggaggtgctggtgacatcaatgagatggtgaccccagaggtagggaataaaggatgaaacctagagaagtcaaaggtccctatcctcacagggggctggctagcaaagagaaca

SEQ ID NO: 29316 - DNA, 749 bp, Artificial sequence
  DNA replication origin
tttttagtagaaacggggtttcaccgtgttagccaggatggtcttgatctcctgacctcgtgatctgcccgccttggcctcccaaagtgctgggattataggcgtgagcgaccttgcctggcctcattttgtattttttagtagagatagggtttcaccatattggtcaagctggtcttgaactcctgacctaagatgaatccacgggcctcaacctcccaaagtgctgggattataggtgtgagccaccgcacctggccttgtctggctatcttgatcacgctgtgcacatcttccctgtgggagcagctggggcaccgtcctggacctgggagaactgcagtcaccatagggttgaggagctgtcagagtcaatcacgataagcactaaacacactggaccgccccaaagctgctctggggaggagtgtgggccttccaggcagatgcggcggccaagacaaagacctcagtcagggcgggagtgtttggcgtaagactggtctgcctggagagagggctaccactggtggagacgctcgagaaagcctgcctgccaagcttcagtgtctagacttgatcctttgggcaatggggagccatggaatgtatgtaagcagaggagtgagaaagtgggattttaggaaggctgtccctcacagctcgaaactcccattgccctcccaggtcagcctttctgttcccctgcctgaccactgctgctcaaggccgtgatgatcccagggggc

SEQ ID NO: 29317 - DNA, 925 bp, Artificial sequence
  DNA replication origin
ccacgtcctggttatcaaccttcctcccacagcctgcagctaccccaagcccccaggttggccaccaactctatctacctcacagatgagggaaactgaggctcagagaggtgaagtcccttgccctgggtctcgcagcatgcgggtggcagtcctaggatgcacacacaggtcttgggtccaagcgtgtccactggtgggcttcctcaccacgcagagcctcgccctgagcgaatttgggtcaaaacgcaagacactgatgctgggatgtgtggccctgggagcagaaagctgggggctgagagctgggggctgagagctggggactgctgggccctggggacggctaagctctgggtcacggctggcaggatggccccggaggctgttcctgctgctccccaagaagcagccaagatggggttgcaagggctgcacgtgtgcacagggcctgtgagggctgggggctctgtgggggatactgggatcagtttgtatgtgtctgtgtgtgtgtgtatgtgtctgtgtgtgtgtgtgtctgtgtgtgtgtgtgtgtctgtgtgtgtgtgtgtgtagctgcatgtgtgtgcctctgtctgtgtctgtgtgtgtctctctttgggtgtctctgtgtctctctgattctgtgtgtgtctgtctctttgcatgtctgtttctgtatctctgtgtgcctctgacacactctgtctctgtctttgtgtctctgtatttctcagtgtctctctgtatccctgtctgtctttctgggcccctgtgtgtctctccatctctgtatctctgtctctgtatctgtctcacagcatcctgtgtgtgtgtctctctgtctctgtatctctgtctctgtatctgtctcacagcatcctctgtgtgtgtctctctgtctctgtatctcgttctgtctctc

SEQ ID NO: 29318 - DNA, 1524 bp, Artificial sequence
  DNA replication origin
ggcgcacggcccctcgcagcggcgcccccccgggcctgccgagcaccccccggcggcggcgcgggccgaggcggcgccgcggcgagcgcgcccggaacgcggcggcggcggcggcggcggcggcggcggcggcggggcccgggcggctggagcggcagccgcatgtgcgagctccggcgcctgccaaggcgtggggtcatttaattggggaggagggggcggggcggcggcgggcgggaggggcggggaggggcggagggcgggcgcgcggcgggcgggggaatccctccccgcgcgctccctccccccgccctcctcctccaagcctgcctccctcccgcccgccgccgcctccccccgcgtcccaaactgcgcacaatagcggccggctcctctatctattttgtgtccagccggagccgcgcgcgatgattcattgccccaattaggggctctctgcagcgcgcccggctctagccgtctgaagggtctcctgggggacccgccgaaacccatcagcggctggagctggtctttaagtaaaggtcaatcaggacgcgggaggagccaggtaaggacgctgcgggcgcccctggaggcggaggaaccccccaccccagggctgcagtgagggcagccccagcctagatgcaggcaccctgccgggttcgttcagggttgtccgaccctctcaaaaggggggaccaagcgagaaagccatttacagtcccgaacaggcccgagttggggataccattcagggccccgcgttctaattttggagagagaaaagaggagccgtccccgtctcctagaacccgttagtgaatgcatcatcctgcggacagtctgaggcctgctctgccccttcccaccatcgacaggggtcactgggtcaccagcagaggtagaaagggtcctgtgtgtcccaaggtcagtgaatcaacctctctgggtcctgattttattcccttcaacaggagctgcagcaggggattaactgtttccgtgtctttattgtgcatgtgtagagatccattgtatttatttaacaagcagagggacttgcggtgcgaggcgcttagggttaactgtggtgatcagccccatttcacatacaggaaagaagtggcattgagtgttaagttttcgtccaaaggggctaagcagaattcagacccaggacgtcgggctccaggccctactcttgaccaccagggcgagtagccgtgcgaggcaaacgtctggtccacgtcgccagtctgctgatggggacgggaccgtccatggcaggacaaggccaggatccctggatcctcccggatgatctggctcaggccctggtccaatctaggcatctccagacctctcattccccatctgtgaaatggcaccccttccagcttcaaaattctactagtgtctgacttctgggcagtttagagcttcctcatttgcaagcagcagcccagaatcagcctggggacaaaggtgcccggtggtcccctccaccctctgggacac

SEQ ID NO: 29319 - DNA, 1032 bp, Artificial sequence
  DNA replication origin
cgccgtgtgccgctgcttcctgggcgagcagtgggccgccttcgagcgcgcccgcacgccggtggacaagcgcatgtactggctcaagcggccccaccagtgcgacgcgggcgcaggcggccgccgtggcggcgccggggccccccgcgagtggaacgtcgcctacgcgctgggcagcgccaccggcgacgacgacgaggacgacggtggcggcccccggctgcgcggggccgcggaggagacgcgagactccgacctgtcggagctgtcggacaccgaccccctttccgagcccgacccgcccgcgcgggacgccgccagcccccaccaggacggggccccagggccagggcctcgcggggggcgcggccaggagtggaggccggctccgggacccgctccgggacagggcgcagaggcctcggcgcaggggcgcgcggaggaggaggggctccccgcgaaggcccacgcggatggggagcccaagtccggggttaggcgccggcggaagggggttgggaggcactgggttcccgaggcccgggccagcgtcctgaggagcattcaggatccctggcaaggccctcttgtccaagaggcccctgcagacggcatgaaagggcctccctctggcagagccactaagaccctggagagcaggccgctgggggagaccctacggggcttctgcacctccgaggacagtgacatcaacatcaccagtggggaagaggaccacaaggaacagcctttcccaggcgtctgcaaccccaaagagaagaacagtggccgtgtcccccgggctctccaggacagccgggcggcaccagcagaaggcctttgctgctacatctgcggggccccgctgtccccggcctcgcaccaccaggtccacgtgcagaagcaggagaagctggctcaggccccgttcttccccttcctgtggctgcacagcccgcccccaggggcacagcccatcagcgagggcggcagtaccttggtgtgcgccagctgcttctcctccctcacgca

SEQ ID NO: 29320 - DNA, 2015 bp, Artificial sequence
  DNA replication origin
cctggagagcaggccgctgggggagaccctacggggcttctgcacctccgaggacagtgacatcaacatcaccagtggggaagaggaccacaaggaacagcctttcccaggcgtctgcaaccccaaagagaagaacagtggccgtgtcccccgggctctccaggacagccgggcggcaccagcagaaggcctttgctgctacatctgcggggccccgctgtccccggcctcgcaccaccaggtccacgtgcagaagcaggagaagctggctcaggccccgttcttccccttcctgtggctgcacagcccgcccccaggggcacagcccatcagcgagggcggcagtaccttggtgtgcgccagctgcttctcctccctcacgcagcagtggcagagcttcgagctggccaacgtgccagtcctgcagcgactctatgtggtgcccctggacagccacgcccccggcatggcctctaagggcaggaggctcccgagggaagagggcctgccctccggggccctgcgagaggcctgctacctctgtggggaggactgtaccccggatgcccgggcggtcccctccaggatcctcaacggcaacgccaggagcgccatgcatttccccttcctcagcctcctgccctgcccgcccaacgcccagggccccaacaagcgctgtgaagtccgcagctgccccaagtgcttcagcgtcctggaggatgtctgggccctgtaccgggcctgccagaacgaggagctcatcacctccgtgcagggcttcctgggcaggtaccaccaggccttctccgcctccgaccctgccctctccgagctgccggcgtcggcccagggcggccccgtgtccatctgctacatctgtggggctgagctgggccccgggaaggagttccagctcaacgtgaaccccgccagccgcttgggcgagaaggagcccttcttccccttcctcaccgtgtacccgcctgcccctcgtgccaggcctgtggactccaccggcctggtggctacctgtgtgctctgctaccatgacctgctggcccagtggctgcagcatgaggcccgcagctcccaccacgctgtcagcgcctggtcccggcagtaccaggtggagacgttcgtgtgcttcttttgtcagcaggagaagaaacggtgtctggggctgaagtccgtgcgggtggcccggctgcccctgttcctatacaccctgcgagcaagccacagcctgttggtggatgacggacagcagctgatcatcggtgcttgcgtggagtgtgggaccctggtgtgtgcgggccaagggctcacccgccaaggacccatgagctggagctccccggtggcagcagcgacgaaggtaagcagcagttttcatctcatcttagacgcttcctccaaaatccattcagggaagggagagatgttttctgttcctcagaaaaactctgaaggaggagttttcactggttctgtgcggggtgttccgggggaggtaccctccctgagtcactgggctggtgcttggtgggtacgttggcctggctgaccttggaggcatggggcaggggtcagaggagtggggatcaggagtggtcttagggaagaatagggcactgctgagaacagcaggcacgggcctgaacttgggtgtgtttgcagtgggatctatcaaacagaggaagttcggggcatgtctgtcatccgcctgataacattggtaattagtccagccgtgcgggtcacagagaggtctccgtgctcacccggtttgaaacacatcagaggtggaagttcctctccgttctagctcccgtgtggcttggcttttccagagttttccacctaagttcacactgttcttttgagaccgtgcttgctttacggcggagggaaatagggttccagacatgggggtgtggaatttgagggacagtggcctaaacagacttttcccccagcgggaagagagtctttcctctctgcaagtcagctgtgca

SEQ ID NO: 29321 - DNA, 943 bp, Artificial sequence
  DNA replication origin
aaggtccccacttccaatcagtcctgaccaggtgttccagagcctgggcctggggaggaggggcagccaggccccctgaggagcagggaactgcgtgggcgcagatagtcaggaagcatgggaaacagatgtgcacgtggcctgatgggtgggtgacgacagacgctctctgcagacctcagatgtccctgcagagaagaaaggtggttgcggcagcaacacctgttctgggctcggaggccacactcggggggcctggccggggcatccccacagtgagaggctggggtatggttaggtaaacagctgcatgcgccattaaccagaatgctctccggacagagtcctggaagcgggaagcgcggcccgcccgccaactggcttgcagggagagccaatccatcatgcagcagacccatcttcgacgggagctctcccagcaacagaaggaaggtgccggctaagacctcaacagatggtccacactggggaagccaaggcacggggcaccactgctcagtaagcaaagaaactcaggggtgcagccaaggcagccaagtggggcgtctcagggcctctgccccatgcaagctaactcctgcccctgagatgttctagaggctgtggcaaggaggggtgggcacacacaggaaattaagagccactgccccacctccaggccatggccacctccacaactgcagacccacaggagacagaaaggcaggatttggggaggccaaggtgggaggatcacttgagcttaggagatcagccagggcaacagagtctctagaaaacaacaaaaaattagcttggcatggtggcgcacacctatggtcccagctactcagaagactggggtgggaggtttgcttgagctcaggagggggaggctgcagtgagtgcacattgtaccattgcacgccagcctgggcaacag

SEQ ID NO: 29322 - DNA, 752 bp, Artificial sequence
  DNA replication origin
cgaatcagtgtcaatcaatctgaatttaaaaataccaatgacagggccctgcccccaggcctgttaaatcaggatctctgaggggtggtcccgggccatggtattttaaagcttctagcagattcaagtgcaagggtgagaactgctgacggacggcatcgtgggcacagctgaggagtctgggatttatcctggaaggccacgggaaaaggatgctattccaggtttcagcctgtgtttactgagtgcccactgtgtcccaggcactgttctagacaccaggacccagcagtgagcaaccaggcagggtcttgggggcagtgatggtggccagcagagtggccggagagaggggtggtgggggcctgccgtctgcacagtgacgagtgtcctggcaggggctcgaggtgggactgagggacggtgaggagggaggtgcggggggtgggcagggagggatgaggggtacgttgtccattgtagcagcgggcggggacccgtcaggtgggaatagggactgtggggctgccctggagaaagcatggtggtttttgttgttgttttaattgtgatacaattcacacaccgtgaaagtcaccctttgaaagtgtacagttcagtgggtttcagtgcagtcacgaagttgtgcaccaccatgactgtccagttccagaacattcccatcacccccaaaggacaccctgtgcccgtcaggagtcaatccccgtcgcctcctccacccacccctggca

SEQ ID NO: 29323 - DNA, 881 bp, Artificial sequence
  DNA replication origin
cccatgggcctgccttgtggggagctctggggagcgggacccaggggcccatctgtgaaatcctcgcagactgggaggacatttgaactgagccctggatgacctttccaggtgacacggctgcctgactcattcattcatctggtgcttcattcatttaacaagtacttactgagtgccgtcacgtgcctgcaagacagaaacgtggtgtgcaaagccagacacagctcctccctcacggagcttccagtctggtgggagagacagatgtcggtggccaaatcacacaaacaaatgtcagcgtgccaccaggacaggggtttggaaggagagaaacagggaacagggcaggtagggaactgacttccctggggaggccgggaggcatctgccgggggtgctggctgatcccagttctgaacgataagggggagtgaaccgggcacgggaaggggggagggaagcacccagatggggggggcgcatgtgcaaagggcgccgggtgtggtgggaagacctgtgtttggcaaggaggcgggcgttgggggaagcccgggccggagaccttcttggagacccaggccatgatctgaagggtgggggcacggtggaagggtctcagctggggatggccgggccacatctgccctttgagaagccttgtgttccagcaaggagaactggaatgaagccaggttttgagcctgactggaaccagcagccaggagcagagtgagagttggtgtgagaggcttttcggggtggctgaactgggtctcgatggggcctggacaccccctccccaggaacccccaggttttcccagatccagctgcaagccaggtggggcttggcatgctggaaaagcgtctgcctacctg

SEQ ID NO: 29324 - DNA, 1194 bp, Artificial sequence
  DNA replication origin
ggaaggaatcatcagtgctccctgaacggtctgcggagttctcagccatcgcccgtggcatctcggctggtgctcccactcagtactccctcctggtgcctgcctggggctcgaggggcgtcatagcagccacgccctggaccaggccccttccctgacgctttgcctgacgctggcctcctgctgcctcagctcctgactccttcaggtcctcgtcccccacaccacctgtcccctttcacatgattccaaaggaaactttggtacctctagaccagggaccgcaaactctgtgaaggaccagattgtagataccttaggctttgcgggccacttagcctcaggctctgtgccccatactctcccttgtttttttttttgaatgactttttaaaaatgtaaaagtcattcttagcttagcctgggccgcagttgactgctgcccgctctagattagcggatgggggtgggggtggggttcgccgcgtgttggggttcgcctgtgttggggtttgccacgtgttggggttcgtctgtgttggcgttcgcctgtgttggggttcaccatatgttggggttcaccacgtgttggggtttgccgtgtgttggggtttgccacgtgtcggggttcgcctgtgttggggttcgccgcatgttggggttcgcctgtgttggggtttgccacttgttggggttcgcctgtgttggggttcgctgcgtgttggggttcgcctgtgttggggtttgccacttgttggggttcacctgtgttggggttcgctgtgtgttggggtctgccgcgtgatggggttcgctgtgtgttggggtttgccgtgtgtttactgagtccagtgtttctgttctctgctcactgtggccctggcctgcagaagctgcgcaggaattggctcctttaactctcacaacaaccccacgaggtaggcacaatgctcccattttacagatgaggaaactgaggcaccgaggattaaggaacttgcccaaagtgtcatagctggccagggcaacatcctccgtccttgttcgtgacctcgatgtgcacctcctggctgtcagtgcctggctcccgtgcccccgcccctgctctgatcatttggcatgcagaggaacctgccgcattctgttcttgaagtcttctgcatctcttgtggcccccagctggcgtgcatcccc

SEQ ID NO: 29325 - DNA, 801 bp, Artificial sequence
  DNA replication origin
tatatgtacatggtgtgtgtgtgtgcatgtacttggggtgtgtgtgtgtgtgtgtgtgtgcgcgctagggaagtgtgaaccaggccagtagcctgcagctgacctccctggcaaaccagccgcacagtggggctcctcgcacagcccggccccccgcccgcccagcacgggagggacagctgcagatgccgaccctgtgaccatgaggcctgtgcccctggcctccctgcctctgggcgggggctgcaccgcttgacctcggaggtctggtcgactccaggattttacggctgggggcctggttttcccagccgcagggtctcggagagggggcagcccggaggacgctgaatccccacaaaggcttggctgttctcccatgtgccttgctgggccagggagggggagaggggccactggaggagggggtgggcaggaggggtggggggcaaggtaggaggaagctggaggaagcagtggggggcacgatttgggaaggtttcctgcaacggaaaagggatggggaggaagtggtgggagagagtgaatcagagacagagacacatactgagagagatggagagacaaaaaaagagaaaccgaagcaaggagagagaaagggatagaggcagacaccagaggtgcagagagcgcgagagagcacgagagtggcaaagccagggactccaggcagcaagacagagacaaagcgagacgggccagggcaagcgggcagcagcgggcagcagcgggcaggcccgagaagcccgcctgtgtggggaggctgaagttcaaaaggga

SEQ ID NO: 29326 - DNA, 966 bp, Artificial sequence
  DNA replication origin
aggttctccttgcaggaataagtcagtcaggtagcggccatccccacacctagggcccacctgcccatccagccacccacgcatcccctttccatccattcacccacccacccattttcctttcatcttccatctgtctatttatatacccattacccatctttcctcagtccttcttttcatccatccatccatccatccatccatccgcccacccatctgttcattggtccgtctatccatccaataggcagtggattttatgctgaagacatagcaatgaacaaaacagcccctgctatcagagagctccagtctggttgggaaggcctgttcttcatgcatgaatggagaagatggttagtcatcctgcagtggtttagtgagcacctgctgttctcagtgaaggctactgcacgcaggcctcttctcacggacctcaacggtgggtatgtccagaggatgaggtgccagaaggggctgtgatcagctctatcttgcaagggacgaagtacttgaatgggcttttgagggatgtgcaggagttgactgggtgggtgagagataaagggcgatccaggtagcaggaacagcacaggcagggcccaggaggcatgagagtgtggcgagcatgggaaagtgtaagcagctgggcagtctcttgggagagcagcggggaggttcttgcaggttggggctggatgccgggtggttgggtcacttgagggaaacattgagggttggggaagatgagggcaggcagagaggaagtgggaggggagattcatttcagggcagccgcaggctctggagcacccaccatagtctggctctgcgctgggccctgggagatggagattgatgggttgactgattgattcattcattccctcactgtttgctgaatgctggcctcatgccgaccgggggatacagcagtgaacaagagagggagggccctacctt

SEQ ID NO: 29327 - DNA, 1126 bp, Artificial sequence
  DNA replication origin
ggggagaaaggacacccctatttcgagctgggcggagctgcctgggaggggcagcggtgaggagtctggggcccctaggacccctgcccctccacctcaccccacccaggaacaccccgcccccatctacagatgtctggtcccatctctgagggtcctggggatgcgaggagccaggagggggatcagggcccagattggcctctctctctagtatccgggtctccggcggggcccagggcaacccccgcccctccgcagtagataaaggcgccggcagccgcctttgtttctttggtgtaaactgagccagatgccttctaatcccccagctgggccgtattcgctggcggccgcggctcccaccgcctccaccccacccgccagcattcccaaggctgccggctcctccctgctgctgcgggggcggagccggggcggggccggcatcctcagcctctcccctggtccagcagagggtcaagggcagtgtgaggccagcggctttgagatctgccctcctgggcctcctggcgttgggaacgtcacagggcctccctgagccttggttttcctgtctgtaaattgggaatgaggacacagcccacagggatggaaagtgcttggcaggcatctgttacccttagtgggatccgctagctcagagccaccccgccccacctaaccgcccatccgtctccagggcagagaatagcaatggcaggaaacgtcactatccagagttgctgctggagcggtccctgtgctcactcactccttccatgagccggagaacctggggaggtggtgctcatgtgatccccactgtacagaccaagaccaagatggtggagcccagagaggccccaaagctagtaagagaggagactctggtttcaaaatgaggcagtagcccagagaggtaaagtgactagcctagcatcactcagcaaaagggagccaggggatgggtatctaaggggcaaatataggagggcggggagtggataccttcctggcctgcaccaagactcccttgcagcactaggtgggttcttcaaagcccaccagaaccagacgcctacaatggttgttaaaatgcagattccctcgccctggtcttgtc

SEQ ID NO: 29328 - DNA, 1369 bp, Artificial sequence
  DNA replication origin
gggttggattccgtcccctcccccagaccattgggtggcgttctggccccttcccctctgcggcgggactaggaggtggggggcccgcccgccccaggaagcgtggcgggtgccaggcgggcgaggcgccggccggtgagcgcggctggctggagccaggagctgaccttacgggcgccggggcagctgttcgcgatgcacatctggcagcggcgcccgcgccccgcccccgcgctggccgggcgctaccttccaggaatgcgcgcatctggggagcgaggctgcagcagccggcgccccctccggcgccgggcctgggcctgggcctgggcctggggctgaggctgggcctggggctgcggctggggctggggctggggctggggctggtgccgcccctcccggatttcccggctcctccctccctggctgcctgtgtggctcccgggcaggctgtaagctgggccaccggaccggaaaagagggcggccgggctcgggtttctcctggtgggggctgggaccggctcttggggcccccatagtacggagggagaaactgaggcccggaggggtgaagggccgggtcctagggcaccttggctggcccccgtggtgcgagctgtggcacaacagatgctgacttctgtgtaaaagtcaaataaggatctgagtgtggtcaagtccacagagcttcattttcacatcccccaagttgcatggccctggctgggtctgggcctctggcccagtgggctaaaaactctgagacttggggtcccactgggggcataggaatgagcggaggcaagcacatcatgtgtgactcccgttgtggggagaacggcctgtgcataggcctgggtgtgggtaccttccgtgtgtctcatggtgtggagagagaacagtgtgtgcataggcctgggggtgggttgggccagcttgaaggctgtgaatgcctgctcttgggtcccaacagcctgtatttctttggactttgtggttgagtcatagggagccattgaaggttcctgagcaggagagtggcctgtggagtcctggccaaagttctctctccagcctgggtagagtgccccagagattatgagggaacaactcctgctgcctgtaatacctctaaggtgtgcctcccctgtacctacaaggccccctgggaccttgggacctctgcctggctccccccgaccatcccttccttagacctcacaacttccagccacctgcccttgcagaactccccgaatgaactgtgagtcacttgcaccctgagtgcatttatgaccactgtcaccaccccaagggtttccatttcaagctggtgtctcacagaggatgaaagagacttccag

SEQ ID NO: 29329 - DNA, 1004 bp, Artificial sequence
  DNA replication origin
ggtgctcagtaggggccacagacatccaggggggaggctcccccagagggtgcccatttcattgcttccaggcacagtgcctttggctgccccccaggccctctctagtccactagggttctggggcctccgagggtgggagtggggtgggcctggtgcccagaacccctgctgagatttcaggctcccagccctgcaaagcgcctcatttctcctcctccagggccggggataattagacgactggggacataaatcacggctgctcctgcacagctgctaatcacatctcctgcagacagcgtcgggggggggggggtgtgtagagtgtgtgtgtgtgtgtgtgtgcagcgtgtggggtgtgtgtgtgtgtgtgtgtgtgtgtagagagcatggggtgtgtgtgtgtgtgtgtagacagcgtgtggggtgtgtgtgtagacagcgtgtggtgtgtgtgtgtgtgtgtgtagacagcgtgtggggggtgtgtgtgtgtgtgtgtgtgtagacagcgtgtggggtgtgtgtagacagcgtgtggggtgtgtgtgtgtgtgtgtagacagcgtgtggtgtgcgtgtgtgtgtgtgtgtgtgtgtgtgtgtgtgtgtgtgtagggtccctgaagctggggcatcctgcagtagggcctccacggcaccccatgtccaccaaactccccaggaaaacacgggtgctagtgtgtgtggtctcaggtttcctgcaactcacaagcattcacacagtcacacacagatgctctgcacactaacacatgcagacaacccccaacacacacacacgcacacaccccttgcctccccactaacacacccagacagccccccacacacacacgccctgctccccaactaacacacgcagacacctccccacacacacgtagacacctcgacacacacgcacacacacacacgcacacgcaggaggcagaactcccagtgaggaccaggaaagttcagggttgggttttggtgcc

SEQ ID NO: 29330 - DNA, 1267 bp, Artificial sequence
  DNA replication origin
cccaggtggagacagcagaggtggctgcagcagcagctctgttccccctggagaccccaccccatttccagggccacacaggctgcagctctgcaggatctggcaggggacagcgacacctagcgggcagcgggcacagtgccccaccacccaggaggcccagcacagcccaggccccaagcaagcggggttgcagactccagggcaggactggggcagaggggcacccagcaagccaggcgggtgctgtgagtcgccggcggcgaggcaggccttggcgccttctctgctcctcctgcctcctcccgtgggcagctcattcccgcgtggcatatgcccgccatatgctctccccgtcacagcatcttcagcgggcctgcaagcagcctgctggtgggggggggggggtggggggggggcgggggcgcctatgagctggagccgcctggctgctgcaccttacaagctgtggggagtggctaggggctgccgagggcagggagcccacccagcttccacttcccttccacctccctgtgggcatgtgtcagctccacgaaggcccctgcaagggagccgagcctgtggtcatcccacattacaggcagccaaactgaggctcggagaagctgagtgccttactggagtatacagagcctgcaaggacaggcccgtcctgtcaccggcagcctcagactgcacctgtaactcggggcaggtgaatggggtgactcaactgtggcgttctctgatgttggaggctcaagggttcaaagctttgctgtgccgtccccacaccggcatgacctcagtttcctcctcccctgaagccacagctggggcctctccagcctcttcctgctctgacaaacccccgaaggaggatcttcagggcacttctgggcctgacacctgaccctgacttgagcttctcaaactgggttccccagagtgctggcgcctgcagatgggcttgggtgtgcccaaggggctcaggggaaatttgagatggggaccgggggttgtcccccttaaaccagaaagtgtctagggctgatttccacagtaatttcatgcacgtacacatcctaagcaacaaggggagggaggaagattccagaactttgtgctatggaggaggtaacactgagctacagtgacaggtccagccccctcctgccaccagattccctcaagagccaggccgggtgatcgcatggagatagtgacaggctcagccccctcctgccgccagattccctcggga

SEQ ID NO: 29331 - DNA, 1040 bp, Artificial sequence
  DNA replication origin
tctgccccagtcctgccctggagtctgcaaccccgcttgcttggggcctgggctgtgctgggcctcctgggtggtggggcactgtgcccgctgcccgctaggtgtcgctgtcccctgccagatcctgcagagctgcagcctgtgtggccctggaaatggggtggggtctccagggggaacagagctgctgctgcagccacctctgctgtctccacctgggacccctttgttcctctgcctcctctttctggagtccctcctgtaggctggtttctgggtgttgcagagggattgggaggcctcaccctcccagggctcactgtgccagggtgggctatggcacagtgtgattgatgccactggtcggagctccaggagtctgggagaacccagaggaaggacatcccgcccagcctccttcctggaagacctggaggaagagttagccaggggagaaggagggtggcaagagtgctcccggtggagggaactgtgcgtgcaaaggccaggaggtgggacaggctgggtgctgtgggcttggaggctgctcttggcagtgagaactgtgtgtgcaaaggccaggaggtgggacaggctgggtgctgtgggctcggaggctgctctggcagagggaactgtgtgtgcaaagggcaggaggcggcacagactgggtgctgtgggctcagaggtggcaaacatgtctggatgtctggagcatcgtgtctggaaggtgtgggatggagctggagcaaaaatagaggccgaattcccatctggagaaggatggggaccctgccgtgtggggcatagcctcagcaccatccgattgccagcccgtatggggcacttaccatgtgccaggcagcagctcatctcacctctcgggatcgcccccaagggggcatggtttctaccctggtgtactctggtgcacagagaggtcaagtgactagcctggggtcacacagcccgttggcagagccggcactggagcccactcctgggaagcaggaacaggtggtgggacccagcttttctcc

SEQ ID NO: 29332 - DNA, 1010 bp, Artificial sequence
  DNA replication origin
tacagatggggaaactgaggctgggaggggtatcatcagtggtcctggaccacacagccagaaggcagcgggtcaggctgggccggcagctgggctttcaggcctcccaagcccaggctctggcctctgggctcccgggtctcccaggcagcaggagtcgggggagaagcctctggaagggctggggagcgggtggggtggtgtggacagcaggctgggcttctgccactcgctccatcctgcctctcacgcccgcccctcggggagccggaagctggcaacagcgaccgccgccgccgcctccctctctgggcccatctgctccggcaccgggatccggtgggtggcgggtccctgcagagaccgcccgcggcagaggtgggtgctgcccccaaccacctcttctccccagcctggggatcaccgggggacacagaacagtgtttatgagcgcactgtggtgggcagagcaggccggatgcccctccacctccagcactgggacctgggcacacatctccagcctcggctgctgcaggtgtgaaacgggcatagcatgtcttggtttaacagtgggctctaggccagctcctgcccctgactgggacccctctgcctgcgtccttcccttcaggtttcctgaccataacgtctgggtttccaagaccctcccatttcaaatcagtgctgccgcccaggagcacggtcatcctggtcacaggtgtgtggccgggcttaggatcagagcgagcgaggcgcgaggatgtgtggacagggagtgagatttccaaaagacctccccagtgggtggcaagggccccccagaagctaagagcccagagtcacctgtctcaattgatgacgctcattgccagacctcctggggtcaggggacctctccgagtgggggggtcatgctaaagggtcacctaataccagcatatgtgctgagtacctgctgtgtgcgaggcgctgtgggagaggctaggggacaacttcttcagggtcaa

SEQ ID NO: 29333 - DNA, 925 bp, Artificial sequence
  DNA replication origin
aaggccgggaggccgggccaggtgctggatcaggcccagtgggagcttcgccaaggaacgtgcctgggcggccctgaccccgagtgagcacctcagccacatcacacctcagctaccccatctgcaccaaggcaacgagaacagtcccaaacctaaggctactctaaggctgaatgagccagtgcatgcaaagcgtctgccttatacagggtgctcctaagtgctgactgttgtcatttttattaatgcaaagcacttagacgtgtctgccttatagcgggtgctccacaggtgctggctgttgtcattattattattatattattatcatcacatgtttgttgggttgttttccccacttgaagctcccaccctccaccccccggtgctgtccgagtctgcctgccgagggaagagcctccaactcaccctgttggcgtcccctccccaccgcatgatttaaccagaaaaaccggcactgtttcagccccacaacactatgaggaaattagtattattctcccatcttacatatggggaagctgaggcacacggaggttaagggacttgcccgaggtcacgcaggattgagaagtaggcactggccgggtgtggtggctcacgcctgtattcccagcactttgggaggctgtggtaggaggactgcttgagcccaggagtttgagaccagcctggacaacacggtgagaccccatctctacaaaaatttaaaaatgagccaggcatggtcatgcacactggtagtcccagctgttcaggaggctgaagtgggaggatggcttgagcgcaggaggtggaggctacagtgagccgagatcacgccactgcactccaaaaaaaagaaagaaagaaaagtaggcactgactggccgggtgcggtggctcacgcctgtaatcccagcac

SEQ ID NO: 29334 - DNA, 867 bp, Artificial sequence
  DNA replication origin
ctgtcacccaggctggagtgcaatggcgtgatctcagctcactgcaacctccgcctcccggggtcaaacgactctcctgcctcagcctcccgagtagctgggattacaggtgcacgccaccacatcaagctaatttttatatttttagtagagataaggtttcatcatgttggccaggctggtctcgaactcctaacctcaggtgatccgcctacctcggcctcccgaagtgctgggattacaggcgtgagccaccgtgcccggccaatagcgcttatttcatgatgatctccatttcttccttccacaaatacttccgtgcctactgtgcgcaggcattattctgagtcctagggatgccgctgtgaacaaaacagaccagccatggagctcctgcggctcctttaggcttcagcaggggtgagggcaggagacaagaggtacaaggtcagtaagtaactcaccagccagtgctggtaacacatgccaaggaggaaaatggcatcggggggtgtggtcaggactgtcaagtctggggctggagttttagaaagggtggtcaggaaagaccccacagagaaagtgaccaatatggaaaggccgaaggaagcgagggaggagccgtgtggaaatcaggaggaaagcattccaggcagagggggcagcgggtacaaaggccctgaggcagcggcgtggctggtgcaatcaaggaacagcaagaaggccagcaggggcagaacagagcgggtgcgtggaggagatgaagccagaggcgggggtgtgggtggatcattactgccttgtcagtcaccgtagggacatgcacggctgtttcactttgaggtctcccatgaggtcccacaaaac

SEQ ID NO: 29335 - DNA, 1381 bp, Artificial sequence
  DNA replication origin
ggacaaccctgggggcagcggcactgccaggcgattcccagccttctcccatgcaaccctcgcaaccccgccaggccagggcctgtgttcaccctcgtttcactcgtgaggaaactgaggcagggccaggccgcagccgctttcccaggtgcccccagaactcgggaggcggcggccggtgcctgtggccccagcgcccggctcctgcccgcaccgccgtgtttcctaacctggtctgcagctggccagctgtgcggcctcgggcagccccgtttacctctctgagactcagtcttcctgtcaacaaaatgggagtcacaatagaacctgccaccctcagttgtcgggaaggtccaatgagcgagtccagcggccccgggctcacagcaagcgctcagcaagcggcggacagcggcgggggtgcggcgccctctggtggctaggagggcttcctgcaggaggaggggatgcgcggcaccgtcagaccgacaggtgggaaaccacagacctcctttctggaaacatctgggtcgggactccccaccgaggggtcatagaccctcacttccagggtgtgccctgacctcagcatgactggggctggggcatatcctggagccccagataggaacccaaccagagtgaccgcggcaagcagggcagtgggtcccatggaaaactccgcctccgcttcccgttgcttggccacctgtcctcaatgccgggcaccccactaggcctccgggctgggcaacaacggccagagggatggtcactaaacccgtttcctcgctctggacacatggctaagcaacattttcaccccctcgctgcaggcgggggccacaggactggctccagtcagcgcaatgtaggtcgaggtgacgtcacctctgtgccatcctctgctcatcactagcagtggggaggccgaggctccgggaaaccggaccccgagtcaccttgtggaagacccactgagcaccccgttggacccgattgaaggagaatgcgcttcggctgcatcacgccactgaagacgcagggttacttgtgacagccgctgacctcacccaccctgcccagcacaccgcacctcgacaaggccaaggccaagaattgacctcctggagctcatcacgttctcaggttcagatgcctgggccccctacaccagaattaccaggggtgcttgtgaaaatgcagattcctgggcccaatcagctcttttgattcagaggctctggggatgaggtcctgcaatccacattttaaaccagcagccctggtgatgctgaggcatgcgtgcatttcagagctgtcagtatcagcgcaggaaagcacaacctctcacgcctgctgtcctcccgagcccagcccc

SEQ ID NO: 29336 - DNA, 1015 bp, Artificial sequence
  DNA replication origin
ttcccacctgtcggtctgacggtgccgcgcatcccctcctcctgcaggaagccctcctagccaccagagggcgccgcacccccgccgctgtccgccgcttgctgagcgcttgctgtgagcccggggccgctggactcgctcattggaccttcccgacaactgagggtggcaggttctattgtgactcccattttgttgacaggaagactgagtctcagagaggtaaacggggctgcccgaggccgcacagctggccagctgcagaccaggttaggaaacacggcggtgcgggcaggagccgggcgctggggccacaggcaccggccgccgcctcccgagttctgggggcacctgggaaagcggctgcggcctggccctgcctcagtttcctcacgagtgaaacgagggtgaacacaggccctggcctggcggggttgcgagggttgcatgggagaaggctgggaatcgcctggcagtgccgctgcccccagggttgtcccggggacgccccggccattggtgctgctctcggctgccggcctcctgcctctgggctgcttgcgaagacagcggagacaatgagaacaggaccccagtggtctagggcaggagaaggttccagaagcgaggcccagataagaggagacagcagaaaaagccgcaggacagagccccttggcctcctgaggtccctggtgtgtctctccatggttagggaacagaatcgctgcccagtggcctttctgcaccgcatcccattgccagggaatacagagcaaacgggccccagagacatagccagccgtcctgctttatgccgggaaactgagtcccaggaaaaggaagggatcgatcactcggctgcgtggtggagagctgggagtagacccctggcatggtgtctttactgacctcctgcccttttcttctcctggctacagccaggtggggagaggccctcggtggggccggggctctctagcagaggggctgggtgcctgcattctgtgggggc

SEQ ID NO: 29337 - DNA, 914 bp, Artificial sequence
  DNA replication origin
caggctgccctcccctctgccgtcctccacggctgtcagatgccctgcctgctggaggacgagataatccttcttgacagagccatggccattgctgacggccgcggaaaggcggctgggtttatatttagcctcaaactgctcctgcctgccggttgctgaaggatgcggagcggcggggggccctgctgtcccctctactgtgcctgtgggtgcccccctccatccccagcccctgagcagacacacagggctttggctgtgcactgccttgcagcccacctggccacacttgctggaccccgggtgggtgttgaggggaggggctgggctggggaggtgggtgggggggggacgcaggccagaggttgctccgagcacctcaagtggaccttgactgggtgcgctccccttccacatcaggctccatctctccctggtgggccccagcgggccctcctgctccctccctccctccctgccagcctgggatggctgagagaggatgcccaggtgtcagggagcagggagaggggctcaaagggagaagcaacaaggaccaagggcagtgggcaggtgacaggatctgagaggtgggggagaaggaggaggtgggaggaggggggaggggcagagaagaagagcacggcaggggaggggagggagggaggaaaacaggaaggaaccgctgatcagagccactgtgaaaggaaggcagccgacaatgacattaatgagaacgacagcttaataaagtagctactgtttctccagtatcgccagctggttcacacatattaaggcgctgaacctcacaaacatcccatgcagtggccacagcgactgttcccatttccagatgtgcaaagtgaggcccacagcagttacacgcctcacgcacccctcccgggtcc

SEQ ID NO: 29338 - DNA, 664 bp, Artificial sequence
  DNA replication origin
aacaccaggcgcttcctttcagagccgcacctgctaattagagggcaaggaactcattaaaacagtaactccagggactgcctgggaagaaggctggggacgggaggggagggaatgtgtggggagggcggagggcaggaggggaaagggccaggcatcaggggcagggggcaaggggctagggggatgcagggggcaagaggctggtgggggggcaggggtaagaccccgccctccaggggctcccatgcttcctgctttattttctgccccctggcagatgcccctgccaggtgctctgcagtctccccggtgggctccgaggtgcacgtgttcttcctggtggcggccaggagtggggaatgggcagagccacgtctgtgaaataaatgcctgctgtgctgggccgagcagggaccccagggctcatgtcctgatcccctcaccaaagaggctttgcagatgtgagctagggactttgaaacagaatgtcctggtttgtccttgtgactgtccttagaagagggtgatggaagctgatgctgcaggagaggaagtgggctgcgtggtgacagaccgaggagctggagtgctgtggggtgggggccaccagccaaggaacgcaggggcctggagaagctggaagaaaggacgggtaacagtc

SEQ ID NO: 29339 - DNA, 1535 bp, Artificial sequence
  DNA replication origin
catactcatgttaaaatactgtgtgtctccccagccagaatgtcagcagggatttttagctgtttttcttgctgctacatcccaggcacagagcctagcacatagttggtactcagtaaatgtttactggatgaatggattgatggatgatgagcaaatggacaggtggatgagtggatgaacagtggatatgtggatgggtggatggatgactggatggacagatagatagatggtggacacatggacacgtcaatgaatggacagatggatgggtggatggatagatgcatggacagagggacaggcagtggacagatggacaagtggatgaatggatgggtggatgaacaatggataggtggatggatgcatagatggaggggcgggcgggtggatgatggatggatggatgaacaatggatgggtagatggatggatagatggaggggcgggtgggtggatgaatggatggatggatgaacaatggatgggaagatggatgcatagatggaggggcgggtgggtggatgatggatggatggatgatggatgggtggatagatgatggacagatggatgaatagtggatgggtggatggatgatggatggatggatgatgggcaggtagatggatggtggacgagtggatggatggtgggcaggtgggtggatgatggatggatggatgatgggcgggtggatgggtgatggacaggtggatggtggatgagtggatggatgggctgatgggtggatgatggatggatggatgatggacaggtagatagatgggtgatggatggatggtggatgggtggatgataggcgggtggatgggtgatggacaggcggatggtggacgagtggagtgatggtgggcagatgggtggatgatggatggatggatggatggatgatggacaggtagatggataagtggtggatggatgatggatggatgatgggtggatggatgagtgattgacaggtagatggatggtggatgagtgggtggatggtggacaggtgagtggatggtgggcaggtgggtggacggtggatggatggatggatggacaggtagatggatgagtggtagatggtggatggatggatggatggatgatgggcaggtggatgggtgatggacaggtagatggatggtggatgagcggatggatggtggacaggtgagtggatggtgaacaggtgggtggatggtggacaggtgggtggatgggtagatatgagggtgtgacagaaatgtggatgcaaagctgagctgaaccaaataacgtggctcttagatgtcacgtgacagggtcagaactttggtaaggggttggcgggataagtgtggtgtttcaggaaggccgctgctcggtggtgttgagagctgtggctggcagggctgtacacccaggtctagccggaggctctcacccttggaggcaggagatgagcaggtatggggcaggctgggggttggggaatacctctggggctgggaggggtccctgggagagacagg
